United States Patent Application Publication US 2011/0296543 A1 - sequence listing, part 12

SEQ ID NO: 51635 - DNA, 2463 bp, Unknown
  Obtained from environmental sample
  misc_feature (1)..(2463): n is a, c, g, or t
ttgcccgaattaagcatataccccatgaaagaagttatctggacagacgacagaatcgaggcgctgcagaaaaatctctcttcctgcaaggaattttccgacggcggcaagtccgtgattgaaagccttattacttctaaaaccgtaaaaggcgaggagatgtttttctcccttgcctttgaaaaacaaagctgtcttttggattacatcgggcggaatggttctttattcctgattgacagggaaaggcttgaaaacacccatgagagccttgtacgcgagtaccacggtttgtattcgagggcggtaagggaaaagtacgaatatcccctgccggagcgtctattgcttaattttgaggaaatgctaaaggaacacgcttcttccgtttcccgcatgatttcgtttagatcgattaagggggaggcaaaaaagggagtctgtcacattgaacttgcctgcgaaccggggcgcagttttttcggcaatatcaattacctaaaagaagaatttgcctctctgcttgaaagcggctggcagatagccgtcgcggcggaatcgcaggtacaggcggatcgcataaaaatgcttcttgagccgcataaatccttatcgataatggcagtccctctttccgccggattttgtctgccggatatcaaatttatgctggtgcaggaaaatgaaattttcggcaggcgtaaacttccgccgcgttccttaaaaaccgtccgctcaagcccgatagacaccttccttgaaatcaaccccggcgactacattgtccatgtaaaccacggtatcggtctttttaagggtatcgaaagattatcgtccggcggaaacgaaagggactacataaaaattgaatacgcggacgaggagacggtatttgttcccgtagaacagcttaaccttgtacagcggtatatcggaaacgacggcttgcaatcgccgcgattagacaaactcggttccaagaactgggaaaacagaaaaggaagggtaaaaaagtcagtagaggacatcgcgcatagactgatagaactgtattcaaaacgaaaacaggcgcaagggttcgcgttccccaaagacagcgaatggcagacaatgtttgaagccgcctttccttttgacgagacggaggatcaacttcgctgtatacaggaaatcaagcaggacatggaaagctcctcgcccatggacaggcttgtctgcggcgacgtaggctacggcaaaacagaagtcgctctgcgcgcctgcttcaaggcgataatgggcgggaagcagaccgccttcctcgctcccacgacaatccttgttgaacagcactatgaaaactttctggaaagattttcgcgcttctccgtaaatgtggcaatgctttcgcgttttgtagacaaaaagaaaacgcgcataattcttgaacagttaaaaaaaggcgagattgatttacttataggcactcacagaattattcagagggacgtgcagtttaaaaacttaggtttaattgtaattgacgaagaacagcgtttcggcgtaaaagacaaagaacgcttaaaggaattaaaaacaaacgtagactgcctgactcttaccgcgacgccgattccccgcacgctccacatgagccttgtaaaaatcagggacatgagcctattggctaccgctcccggcggcagacacccgatagaaacatttgtcgaagaatacgacgaccatttgatagcgcaggctgtccgcagagaagttgaaaggggagggcaggtcttttttctgcacaaccgcattgaatcattaaaagagattcgcattaaactggaacatttaatgcctgagatacttattgaaaccgcccacggacaaatggattcgcaggaacttgaggatgtaatgcgccgttttatccacggcggtttccatgttctagtatcgactacgattatcgagaacgggattgatattccaaacgtaaacacaataataatagaccgcgccgacatgtacggcgtatcgcagttataccagttaaggggcagggtaggtcgctccgaccgagtcgcctacgcctaccttttctatcccgaacaaaaagctctttccgaaatcgccatgaagcgtttgcagacaatttccgattttacggaacttggctccggttttaagatagccatgaaagatatggaaatccggggagcgggaaatcttttgggcagggaacaatcaggcgacatttattccgtgggcttcgatttatatgttaaacttttagaagaagccgtaaagcgtcttgaagactccaattacgagtcggaaacggaaacccttcttgaacttgaatacacaggtttcattcccgactcctacatcgactcgccacagcagaaaatggaagtttataaaatgatagccgcaatacgcgacaaagaagactggagcgcgtatactcggaattgctag

SEQ ID NO: 51636 - protein, 820 aa, Unknown
  Obtained from environmental sample
  DOMAIN (377)...(539): Type III restriction enzyme, res subunit
  misc_feature (1)..(820): Xaa is any amino acid
MPELSIYPMKEVIWTDDRIEALQKNLSSCKEFSDGGKSVIESLITSKTVKGEEMFFSLAFEKQSCLLDYIGRNGSLFLIDRERLENTHESLVREYHGLYSRAVREKYEYPLPERLLLNFEEMLKEHASSVSRMISFRSIKGEAKKGVCHIELACEPGRSFFGNINYLKEEFASLLESGWQIAVAAESQVQADRIKMLLEPHKSLSIMAVPLSAGFCLPDIKFMLVQENEIFGRRKLPPRSLKTVRSSPIDTFLEINPGDYIVHVNHGIGLFKGIERLSSGGNERDYIKIEYADEETVFVPVEQLNLVQRYIGNDGLQSPRLDKLGSKNWENRKGRVKKSVEDIAHRLIELYSKRKQAQGFAFPKDSEWQTMFEAAFPFDETEDQLRCIQEIKQDMESSSPMDRLVCGDVGYGKTEVALRACFKAIMGGKQTAFLAPTTILVEQHYENFLERFSRFSVNVAMLSRFVDKKKTRIILEQLKKGEIDLLIGTHRIIQRDVQFKNLGLIVIDEEQRFGVKDKERLKELKTNVDCLTLTATPIPRTLHMSLVKIRDMSLLATAPGGRHPIETFVEEYDDHLIAQAVRREVERGGQVFFLHNRIESLKEIRIKLEHLMPEILIETAHGQMDSQELEDVMRRFIHGGFHVLVSTTIIENGIDIPNVNTIIIDRADMYGVSQLYQLRGRVGRSDRVAYAYLFYPEQKALSEIAMKRLQTISDFTELGSGFKIAMKDMEIRGAGNLLGREQSGDIYSVGFDLYVKLLEEAVKRLEDSNYESETETLLELEYTGFIPDSYIDSPQQKMEVYKMIAAIRDKEDWSAYTRNC

SEQ ID NO: 51637 - DNA, 1050 bp, Unknown
  Obtained from environmental sample
  misc_feature (1)..(1050): n is a, c, g, or t
atggataacaattcgcgcctgtcactttggcggcaggtgcaggaagaaattgccgagagacgtttccgttccgatgtaaccgggcttatcaagccgggcgcggaagccgaatttatcggaagaatggaagcccgccagcgcagtttcaggatgactgtttttgaggtggacgcctatcctgacgaggaatacgaagcctatgcccgcgaacattcggatctgtttcgcaatgtgaggctctcaatggtgacatttagttcaagcgaacgggaggctcggcgtgtgcttgattcgataaaaaacggagaaaccacttttgaggacgcggccagggctcattccaaggatatgtacgccgacaggggaggggacatgggaatgaaaatgttccatgaattgagcgttgatatcccggaggaagacacgcgcgatattataatttccttgatggccggcgattacagcaatgtgataaagacagacgcgggctggttttttttccgctgcgaggatgcggcgcaggaagccgatttaaacgatccggcggttatggaaaaagttcgttcctatttgcgtaattttgaaagagggcgtatggagaactgggctatagagaaggcgaatgacttcatcgcgcttgcaaacgaacacggttttgacgaagcgctgtcattgcagatgcttcaaagcaggagtttcggccctgtcccggtaaactacggcgatatacagctctttaccacccttcagtcccaagccgttcccgagctcgcgggctccgcggaaaatgaaaatttctggaaagccgcgttttccgcgcctgtcggaaaaccctcccggtggatagtgcaggggagcaatgtgctggtgcttttcccggtggaggagatcgaggctgaagcttccaaacaggagaccgtcgcatccaattacagcgagtactggctggattatatgctcgggcagtccatgcagcagttttttatgaacagccccaaaatggaagacaagttcatggatgtctatttccgcttttttatcggcaactga

SEQ ID NO: 51638 - protein, 349 aa, Unknown
  Obtained from environmental sample
  DOMAIN (85)...(171): PPIC-type PPIASE domain
  misc_feature (1)..(349): Xaa is any amino acid
MDNNSRLSLWRQVQEEIAERRFRSDVTGLIKPGAEAEFIGRMEARQRSFRMTVFEVDAYPDEEYEAYAREHSDLFRNVRLSMVTFSSSEREARRVLDSIKNGETTFEDAARAHSKDMYADRGGDMGMKMFHELSVDIPEEDTRDIIISLMAGDYSNVIKTDAGWFFFRCEDAAQEADLNDPAVMEKVRSYLRNFERGRMENWAIEKANDFIALANEHGFDEALSLQMLQSRSFGPVPVNYGDIQLFTTLQSQAVPELAGSAENENFWKAAFSAPVGKPSRWIVQGSNVLVLFPVEEIEAEASKQETVASNYSEYWLDYMLGQSMQQFFMNSPKMEDKFMDVYFRFFIGN

SEQ ID NO: 51639 - DNA, 1392 bp, Unknown
  Obtained from environmental sample
  misc_feature (1)..(1392): n is a, c, g, or t
atggaagggggtttttcctacaagggaaagaccctgctttcccgcgttgatcccgccggcaaggccgatcgtattgttgacactgtccctgtcgttgacggaaccctgtacctttgtccctcacccctgtacggctacgggcttgaacgcctgctttcccgcattgaagaaccggcgccgaattccgcggtgctgtgcgttgaagcggagcctgagttatacgacatttcgcgcaagtccttcagcggggccttgaaaagcagccgtcaattgtgcctgacaaacgcccgcgagcccgccgaattatgcgccttgataagggaaaaatggggttccagggtcttccacagggtacatgtgctgcgccttaacgggggctggcagttgtatccggctttggatgatctggccgacaccctgcggcgcgagattgcccttgactggggcaacgcgatgacccttgcgaaactgggccgccgctatatccgcaacgcgctgcgcaacctcagcctgattccgcgctgtcattcgctgaagcggctttctttcggcggcgctccggcgctcgtgctgggggcgggcccttcgctggatcaaacgcttgacggtctgcaagcccgttttggccgggcgttgtttacgccggaacagcggccgttcagaatcatctgtgttgatacctgccttccggcgttaaaggaacggggcataaaccctgatcttgccgttattctggaaagccagcactggaatttgggagactttatcgggctgtccggctggaatgttcccgccgccctggatctttcagcgctgccccgctcggctgatgttctttcaggcgggttgtttttgttttttactccctggacaaatttgaccatttttgaacggctgggagccgccggtcttctgcccgcgagtctgccgccgttgggatcagtgggcctgagcgccgcgtatatcgcgcggcggcttaccaatggaatcataattaccgccggactggatttttcatttacccttgattcatatcacgcgcgttcaacgccggggcataaaggcaaattacgccgccacaatcgctttaccggcattttaaatacctatgccgcttttggcggagcggcctctcccgcggtttccaaaacaggggacgaagttttttcaaatccttcactgcgcanataccgtgatctttttgaacgggaatttgccgatgcgaataacgacacccggttcttcgaccttaccggcagcggccttcctctgggcataaaaacccttgcgccggaaaccgcctttgactattgtcccgcggtgatttcgctgccggtggcagtcttttcgctcccgcctgcgcggacaatcccgtccttgccgaaacaatga

SEQ ID NO: 51640 - protein, 463 aa, Unknown
  Obtained from environmental sample
  DOMAIN (160)...(338): Protein of unknown function DUF115
  misc_feature (1)..(463): Xaa is any amino acid
MEGGFSYKGKTLLSRVDPAGKADRIVDTVPVVDGTLYLCPSPLYGYGLERLLSRIEEPAPNSAVLCVEAEPELYDISRKSFSGALKSSRQLCLTNAREPAELCALIREKWGSRVFHRVHVLRLNGGWQLYPALDDLADTLRREIALDWGNAMTLAKLGRRYIRNALRNLSLIPRCHSLKRLSFGGAPALVLGAGPSLDQTLDGLQARFGRALFTPEQRPFRIICVDTCLPALKERGINPDLAVILESQHWNLGDFIGLSGWNVPAALDLSALPRSADVLSGGLFLFFTPWTNLTIFERLGAAGLLPASLPPLGSVGLSAAYIARRLTNGIIITAGLDFSFTLDSYHARSTPGHKGKLRRHNRFTGILNTYAAFGGAASPAVSKTGDEVFSNPSLRXYRDLFEREFADANNDTRFFDLTGSGLPLGIKTLAPETAFDYCPAVISLPVAVFSLPPARTIPSLPKQ

SEQ ID NO: 51641 - DNA, 1299 bp, Unknown
  Obtained from environmental sample
  misc_feature (1)..(1299): n is a, c, g, or t
ttgttattagatatttcggagtaccatgtggatgtgaagatttttccggcgcggttgaacggcgcagttgacgccattccctccaagtcgcaggcgcacagggcattaatatgcgcggcacttgcggataaaccgacacgcgtcgaatgtaacggcgagtctgatgacattttggcaacgacagcctgcctttccacccttggcgcggaaattgaacgcgaatcaggggcttattttgtaagtcccctgaaacgggaaggaaatgacggcgctgcaacactaccttgcggggaaagcggcagcacgtttcggttcatgctgccgatcgttggcgcgttgggacggaaagtctgctttaccccgaaagggcggctgccggaacgcccgctctcccccttgtacgaagagcttgttcgccatggtgccgaattatcaccgcagggctccgtcccgttttacgccagcgggcggcttacgccgggccgttattcgctggatgcggacgtatcgtcgcaatttatcagcggcctgttattcgccctgcctttgctcgacggcgacagtgaactcgttctgaccggaagcgcggaatcattcccttatatcgagctgactatggcaatgctgaaggagtttggcgtaaaagcggaatttgacggcaggtctttttccatacctggcaggcaaatgtactgttcttccggcgttgtgcgagtagagggcgattggtcgaacgccgcgttctggctgggtgccggcgctatcggctcaggaggcgttacctgcgccgctttggacttgcaatcaaagcagggcgacagggcgatcctggatctcctggcgaaattcggcgcaaagattgaagtgaatgattccgccgtaaccgtgtctggcggaaaactgcggggtattgaaatcaacgcgaaagatattcccgatcttgtgccgatactggctgtgatcggcactgtcgccgaaggagccaccgttattcgcaatgccggaaggctgcgtaccaaggaaagcgacaggctcgctgccgtaagcgccgtactgtgcgccctgggcgttgacgttgacgagaccggtgacggacttgtcatacgcgggcccgccgttttcaaaggcggccaggtatcgtcctgcggggatcaccggatcgcgatgtctgcggcaatcgccgcgacggtttgcgcgggaccggttgttattcagggagcgcaggcggtcaacaaatcataccccggtttttttgacgatctgcgtttgcttggcggcttattagtaattagctattag

SEQ ID NO: 51642 - protein, 432 aa, Unknown
  Obtained from environmental sample
  DOMAIN (14)...(421): EPSP synthase (3-phosphoshikimate 1-carboxyvinyltransferase)
  misc_feature (1)..(432): Xaa is any amino acid
MLLDISEYHVDVKIFPARLNGAVDAIPSKSQAHRALICAALADKPTRVECNGESDDILATTACLSTLGAEIERESGAYFVSPLKREGNDGAATLPCGESGSTFRFMLPIVGALGRKVCFTPKGRLPERPLSPLYEELVRHGAELSPQGSVPFYASGRLTPGRYSLDADVSSQFISGLLFALPLLDGDSELVLTGSAESFPYIELTMAMLKEFGVKAEFDGRSFSIPGRQMYCSSGVVRVEGDWSNAAFWLGAGAIGSGGVTCAALDLQSKQGDRAILDLLAKFGAKIEVNDSAVTVSGGKLRGIEINAKDIPDLVPILAVIGTVAEGATVIRNAGRLRTKESDRLAAVSAVLCALGVDVDETGDGLVIRGPAVFKGGQVSSCGDHRIAMSAAIAATVCAGPVVIQGAQAVNKSYPGFFDDLRLLGGLLVISY

SEQ ID NO: 51643 - DNA, 390 bp, Unknown
  Obtained from environmental sample
  misc_feature (1)..(390): n is a, c, g, or t
gtggtcgcggatgagagggataccggcattcgccagatattgaacttcggtcacactatcggtcacggcatcgagaagcactcaaactacggcgttacgcacgggaaagccgtcgcaatcggcatggtaatcgccagccggggcgcttcccgcatgggtttgtgcggcgaggactgccacgcggaaatcgtcgaggccgttaggcgctaccagttgccgactgagactgacataacgccggaaagtttgatcgaggccgcttttttcgacaagaagcgaagtggtcagcgcattactctgatcctgcctgagagaatcggcaaatgcgcggctaaaagtttcagcatggacgagctcgcgaatttcattcgtctcggcatgagcaaatga

SEQ ID NO: 51644 - protein, 129 aa, Unknown
  Obtained from environmental sample
  misc_feature (1)..(129): Xaa is any amino acid
MVADERDTGIRQILNFGHTIGHGIEKHSNYGVTHGKAVAIGMVIASRGASRMGLCGEDCHAEIVEAVRRYQLPTETDITPESLIEAAFFDKKRSGQRITLILPERIGKCAAKSFSMDELANFIRLGMSK

SEQ ID NO: 51645 - DNA, 1404 bp, Unknown
  Obtained from environmental sample
  misc_feature (1)..(1404): n is a, c, g, or t
gtgatcaacgccggaaaagaaaaactaaaacagttttttgaacagctccggggcaagcagaaccttacagcccaagacatacggaacgcggccgcggcgaccggaaacgttacggaaatacttcctgagattttggcttttgccgatggaatgggaattgacgctacgtctgagctggccgattttactaatgcacaagaaaaagtgcggcaagaaaaagccttgcaggaaacagcggcaaacctggcagaacaatccggggcgcttgccacagagggcgatcccgagaaacggcaggaactcatcgagggcatacggcgatccgcttcctctcttggaatggtgggaaaaaaagacaggattggatcatggacggagtacatacaggaatgcactcagtacgatcctgagaaggattttaagcctgacctgtttgacggcttggctttccccccgggaaccacttcatacatcggggcacgtgccaaagccggaaaaacaacgtctatgatcaaccttgcaagggaagcggtattttccggccgtaaagttttattcatcaccttggaaatgagccgccgccagctacttaccaagctggtactatgcgttgccttttccattaccggggaaactccagaacgaggagaactatggggccgtggaagctatgagcgcaaggaacagacaggccaaacgccgcagaaagactactacgctttgctccatggaaaaaaactacagccatatagcggcgaagaaacgtttataaacaatgtcaacaaagcacaggacattgtaaaaaacgcatacggcaaactgctattgatttatgacgggcggggagctggtttccatgagatcactgcggcaatagaacaatacggcggccccggttcgctggtactcattgactacatacagcggatgcccccggcagacgaaaacgacagagataattttgtaagggttaaaaaaatatctgatggcgttttatcggcggcggtaaggacaaacgcgatcataatctcaggggcgcaattcaacaggaccgtaactagggacgttagcgggaatgaaattattgaaagcacatcatatcgggaatccggagatctggaacaggacgcgcataatatacttggcattggccgcctttccggaaagggaaaccgttatataaaaatgttcgcggggcgcgaagagatgatcgaggacaacgcatatagccttgattttgagggtgcgtattcatacatggccagaaaggaaaaaatcaaagccccggaagagaaaccataccagcccaaaccaaaacccaaaaaggaaacgctggaagaaaaacaggatgcagaaaaaaaatggagcgatctactgcccggcaaagaagtaaaagcgcaatga

SEQ ID NO: 51646 - protein, 467 aa, Unknown
  Obtained from environmental sample
  DOMAIN (144)...(355): DnaB-like helicase C terminal domain
  misc_feature (1)..(467): Xaa is any amino acid
MINAGKEKLKQFFEQLRGKQNLTAQDIRNAAAATGNVTEILPEILAFADGMGIDATSELADFTNAQEKVRQEKALQETAANLAEQSGALATEGDPEKRQELIEGIRRSASSLGMVGKKDRIGSWTEYIQECTQYDPEKDFKPDLFDGLAFPPGTTSYIGARAKAGKTTSMINLAREAVFSGRKVLFITLEMSRRQLLTKLVLCVAFSITGETPERGELWGRGSYERKEQTGQTPQKDYYALLHGKKLQPYSGEETFINNVNKAQDIVKNAYGKLLLIYDGRGAGFHEITAAIEQYGGPGSLVLIDYIQRMPPADENDRDNFVRVKKISDGVLSAAVRTNAIIISGAQFNRTVTRDVSGNEIIESTSYRESGDLEQDAHNILGIGRLSGKGNRYIKMFAGREEMIEDNAYSLDFEGAYSYMARKEKIKAPEEKPYQPKPKPKKETLEEKQDAEKKWSDLLPGKEVKAQ

SEQ ID NO: 51647 - DNA, 1752 bp, Unknown
  Obtained from environmental sample
  misc_feature (1)..(1752): n is a, c, g, or t
atggcaaatttcttttttatagaaaacccgcatatcgcggcattgtcttttattacccagggaaagaccgagaggcttattattaacaaaaggttcttttcatccggtgagattgacgaggatcttgccgtgtctttttttaacgggcgcagggacgctcttggccgctccattcggggtgagacgcttgtattaaacgcggcgccccatttttcaaggccggttcttgcattgtttttcccgtggcaggacgcgggagcgtgctgcgttcttttttcttcccataacttgaataataatttcggctcggggattaaccagtcttttatgcttaatactcagggcgatgttcttcttgccgccgattttgagcttatgagggccgccatgaatatcgcaaacgaggattttgtaaaagcgatacttgaaagcccgaagatgagcgaacaacaggtaattatttccgaatttaaatttttacagggctccagaagcgttgtaaaatcaggctttttcacggcaacatgggcaaacttaaggcctgtaatacaatttgtcttaaataaaataaataaatcttttaacactaatatgaatttaaaacctgcgttttccggagtgaatgaaaaaggggaacgcgttatgcgccagtttgtggcgtataccaaattaaacagcataaacgcggttgtaattaccaatattgaatacgacagggtgtttgagggcatagccgccaccacaaggcgcaatatttaccttacggtcgcggtcttaagcttgtcggttatatttatttggtttttctcaaaaacaatttccattcccataagggcgcttgccgtcgcggcgcgtagcatagagggcggggaatttaaaattgaattgccgcaaaagggcggcgatgaaatcggcatattaacgggcagtttccagcgcatgagcagcgccctaagcgttttcggcaagtttacaaaccgggacgtggcagtaaaggccatgagggggcagataaggccgggcgggcttccgaaacacgctactatctttttttcggatatccgcaattttaccgccatatccgaaacgtttacaaccaaattcgggggagactcttccgaccgcatagttttctggcttaacaactactttacgcagatgatagactgcgtggaaaaaacaaacggagtcgtggacaaatttataggcgacgcggttatggcgcactggggcaccgcttacagcgccggaagcccgcgcaaggacgcgttcaactgcgtcatggcggcgctgatgatgcgcaaggctctttttaatttgaacaggggaaggaaaaaagacgatcccgcaaacccgattatcagaatagggtgcggaataaatacgggcgttgtcaccgccgggcaaataggctccgatcttcgcatggaatacacagttatcggcgatcccgtgaatctcgcgtccagggttgaatcgcttaacaaacctctcggcaccgatattcttataacagaggacacatggaagcttgtgggcagtaaatttattaccgaggaaatgcctgccgtaacggtaaaaggaaaagaaggcgccatccggttattcgccgttgttaatcatgttgataataacaaagggccgtttacgcttgcggagcttcggacgcttttgggtattgagcctccgcagatgtcaaaggtagatgtcaatgcagacgagaaaaagtacaaaatcggcgccgcagtataa

SEQ ID NO: 51648 - protein, 583 aa, Unknown
  Obtained from environmental sample
  DOMAIN (251)...(320): HAMP domain
  misc_feature (1)..(583): Xaa is any amino acid
MANFFFIENPHIAALSFITQGKTERLIINKRFFSSGEIDEDLAVSFFNGRRDALGRSIRGETLVLNAAPHFSRPVLALFFPWQDAGACCVLFSSHNLNNNFGSGINQSFMLNTQGDVLLAADFELMRAAMNIANEDFVKAILESPKMSEQQVIISEFKFLQGSRSVVKSGFFTATWANLRPVIQFVLNKINKSFNTNMNLKPAFSGVNEKGERVMRQFVAYTKLNSINAVVITNIEYDRVFEGIAATTRRNIYLTVAVLSLSVIFIWFFSKTISIPIRALAVAARSIEGGEFKIELPQKGGDEIGILTGSFQRMSSALSVFGKFTNRDVAVKAMRGQIRPGGLPKHATIFFSDIRNFTAISETFTTKFGGDSSDRIVFWLNNYFTQMIDCVEKTNGVVDKFIGDAVMAHWGTAYSAGSPRKDAFNCVMAALMMRKALFNLNRGRKKDDPANPIIRIGCGINTGVVTAGQIGSDLRMEYTVIGDPVNLASRVESLNKPLGTDILITEDTWKLVGSKFITEEMPAVTVKGKEGAIRLFAVVNHVDNNKGPFTLAELRTLLGIEPPQMSKVDVNADEKKYKIGAAV

SEQ ID NO: 51649 - DNA, 699 bp, Unknown
  Obtained from environmental sample
  misc_feature (1)..(699): n is a, c, g, or t
gtgttttcccgcgaaaaacttccgtttatcaactttataacgctatttaccaaatataactacggaaagtggtatcttaacacgttgtttgtcgcgctgttgaccacaattttttcgcttgtgattcacacaatgacggcctttgtatttgcccgttttaattttaagggaagaaaaacagggttgttgtcggttatgatccttcagttgtttccaagttttatgagccttaccgccctttatatgattgcccttaacttcggtatgttaaataatctgtatatgttggttatcgtgtatgtcgccggtgggattccctctaatatctggcttgtcaggggttatatgctgaatataccaaagtcgatggacgaggccgcttctatagacggtcttaccaaacttcagctttttttcaagattattctgcctctttctacaccgattatgttctttatcgcggtaacttcatttatgggaccttggatggattatatgctgccccgttatctgatcaatactgatgcaaagcgcacgctggcaatcggtctttttgatcttatcaccggaacaaacgccgatttttcggccttttgcgccggcgcggtgttagtcgctattcccattacgattatgtatatggtcttccagcgtttccttctggaagggcttatggcaggagcaaacaagggagagtaa

SEQ ID NO: 51650 - protein, 232 aa, Unknown
  Obtained from environmental sample
  DOMAIN (25)...(226): Binding-protein-dependent transport system inner membrane component
  misc_feature (1)..(232): Xaa is any amino acid
MFSREKLPFINFITLFTKYNYGKWYLNTLFVALLTTIFSLVIHTMTAFVFARFNFKGRKTGLLSVMILQLFPSFMSLTALYMIALNFGMLNNLYMLVIVYVAGGIPSNIWLVRGYMLNIPKSMDEAASIDGLTKLQLFFKIILPLSTPIMFFIAVTSFMGPWMDYMLPRYLINTDAKRTLAIGLFDLITGTNADFSAFCAGAVLVAIPITIMYMVFQRFLLEGLMAGANKGE

SEQ ID NO: 51651 - DNA, 1158 bp, Unknown
  Obtained from environmental sample
  misc_feature (1)..(1158): n is a, c, g, or t
atgccggaatggttaggcgacgcagttttttatgagatatatccgcaaagtttttatgactccaacagcgacggcatcggcgatattcagggaataatcaaaaagcttgattatataaaagagcttggctgcaacgccttgtggatcaatccctgttttgattcgccgttcaaggatgcgggttatgatgtgcgggattataagaaggttgcgcagcgttacggcagcaatgaagacctgttttgtttatttgacgaagcccacaggcgaaatatccgggtactgctggatttagttcccggacatacatctgaggagcacgagtggttttctgaaagcaaaaaagcatcccctaacgatgaatttaaaaaccgctacatctggacagacagttggttttgcgcgggaattgagggattaaaatttatcgcaggagaggcggagcgggatggctgttatatcactaatttttttaaatgtcagcctgctcttaattacggtttccgtgattgccgtgcaaaatggcagttgccgcctgaacatccagattgtattgctactcgtgaggcgttaaaagacattatgcggttctggcttgcaggcgacaaaagcagaggctgcgatggtttccgcgtggacatggcggactctcttgtaaaattcgatgatgataaaaaaagcgccacaagcgctgtctggcgaaatatccgtgaaatgctggacagcgaatttccggacgcggcaatggtgtcagaatggggttcaccggacttgtcgcttaaagcgggtttccacatggactttctacttgatcatccgaacagtggttatcgttcattggttcgcgattacgaggatagcgataagaacaacagttattttaaaaaagagggctgtggagatatcaagcgtttccttaatcagtatctgccatggtacgaattgtcaaaaaaagacggcggctatataagcataattaccggcaatcacgacacccctcgtatcagcctcaacttggagagccgcgaacttgcccttgcgtacgctgtaatttttaccatgcccggcgttccttttctctactacggtgacgaaatcgggatgcgttatttgtataacatacccaccaaagaaggcgggttggctcggccgatctga

SEQ ID NO: 51652 - protein, 385 aa, Unknown
  Obtained from environmental sample
  DOMAIN (12)...(383): Alpha amylase, catalytic domain
  misc_feature (1)..(385): Xaa is any amino acid
MPEWLGDAVFYEIYPQSFYDSNSDGIGDIQGIIKKLDYIKELGCNALWINPCFDSPFKDAGYDVRDYKKVAQRYGSNEDLFCLFDEAHRRNIRVLLDLVPGHTSEEHEWFSESKKASPNDEFKNRYIWTDSWFCAGIEGLKFIAGEAERDGCYITNFFKCQPALNYGFRDCRAKWQLPPEHPDCIATREALKDIMRFWLAGDKSRGCDGFRVDMADSLVKFDDDKKSATSAVWRNIREMLDSEFPDAAMVSEWGSPDLSLKAGFHMDFLLDHPNSGYRSLVRDYEDSDKNNSYFKKEGCGDIKRFLNQYLPWYELSKKDGGYISIITGNHDTPRISLNLESRELALAYAVIFTMPGVPFLYYGDEIGMRYLYNIPTKEGGLARPI

SEQ ID NO: 51653 - DNA, 390 bp, Unknown
  Obtained from environmental sample
  misc_feature (1)..(390): n is a, c, g, or t
atgaacctgtatcacggaagcaatgtggttgttgatacgcctactctgaatttcagccgtaaggaactggatttaggaaccggtttttatactacgaccaattacgaacaagcggtactgttctctgaaaaagtcgtcgaacgaaagaacgggcgtaaggttgtaaacatatatgattttgacaccggtgtcctgagtgaatttaaagttcttgaattctccgaacctaatatagattggctaaatttcgtcaccgctaacagaaatttctcacctccgcaatatgactcacaaaaacgccttaatttgaaacgaaaacacgtgccgcataggcgccaaaactttttcatcaggctttctcgtcaactccccgcgatacatacccgatag

SEQ ID NO: 51654 - protein, 129 aa, Unknown
  Obtained from environmental sample
  misc_feature (1)..(129): Xaa is any amino acid
MNLYHGSNVVVDTPTLNFSRKELDLGTGFYTTTNYEQAVLFSEKVVERKNGRKVVNIYDFDTGVLSEFKVLEFSEPNIDWLNFVTANRNFSPPQYDSQKRLNLKRKHVPHRRQNFFIRLSRQLPAIHTR

SEQ ID NO: 51655 - DNA, 1530 bp, Unknown
  Obtained from environmental sample
  misc_feature (1)..(1530): n is a, c, g, or t
atgatgtggatatggtttattatcctccctcttgccgggttaaccttaggctggattattagatggttatatgccagatttcaacttacggcatcagagcagttcgcagaacgaataaaacaagatgcaataaaagaggcggaggcaaagaagaaagaaattcttcttgaggcaaaagaacaggttatccgggaacggaaccagcaagagagggaaactcgggaacgcagggctgagttacagcggtatgaacgccgcgttgtagttaaagaagaagcgattgataaaaaaaccgctcaaatagaaagaacagagcagttattcgcagaaaaagaaaaaggttttcaggctcgtgaagacgcgctttccaaagaggaacagcgttatcgagccgagcttgagcgtatttcggggttaagttccgaagaagcgaaagctctcattatcaaagaccttgaaaatgacgcgaaacacgatgcgcagtcgcttatcaacaaaatcgagcaggaagccaatctcggggcggaaaagaaagccagagatatccttgtaacaactattcaaaggctggcgacggaagttacgggcgatgttactgtaaccaccgttactctgcccaatgatgaaatgaaagggcggattatcggcagggaagggcgcaatatccgcactcttgaaaccttaacgggcgctgatatcatcattgacgacacgcccgaagcggttgttatctcctgtttcgatcctgtccgccgtgaaatagcgaaaatcgctcttgaacggcttattcttgacggtcgtattcatccggcaagaatcgaggaaattgtcgttaaagtaagcaaggacatttcgcagaaaatttttgaagagggcgaaaaagttctctttgacatgggtattcacaacataaagcaagacgctgtccgagcgcttggcaggctttatttccgcacgagttacgggcagaacgtactccaccattcaaaagaagtggcgataatcgcgggtatgcttgcggcggaagtcggctgtaaccgagaccttgccaaacgagccgccttgttacacgacatcggcaaaggtacggaaacaaattccgatcttaaccacgctgaaatcggcatggatatggctcgcaaaatgggcgaagacccaagaattatcaacgccatcggaagccatcacaacgacattgagccgacctgcatagaggcggttcttgtacaaatagccgacgcaatttcggcggcaagacccggagcgagaaaagaaacgctggacaactacatcaagcgtcttgaaaaccttgaaaacatagccacaggctttagcggcgtagataaatcgttcgccattcaggcgggtcgtgagcttcgcatacttgtaaacaacgaagcggtcaacgacgagcaaaccagagagatggcaaaagaaatcgccaaaaagattgagaacgatctgcgctacccgggacgcattaaagttacgatgatccgtgagacgagaattacagagtacgcaagatag

SEQ ID NO: 51656 - protein, 509 aa, Unknown
  Obtained from environmental sample
  DOMAIN (200)...(259): KH domain
  misc_feature (1)..(509): Xaa is any amino acid
MMWIWFIILPLAGLTLGWIIRWLYARFQLTASEQFAERIKQDAIKEAEAKKKEILLEAKEQVIRERNQQERETRERRAELQRYERRVVVKEEAIDKKTAQIERTEQLFAEKEKGFQAREDALSKEEQRYRAELERISGLSSEEAKALIIKDLENDAKHDAQSLINKIEQEANLGAEKKARDILVTTIQRLATEVTGDVTVTTVTLPNDEMKGRIIGREGRNIRTLETLTGADIIIDDTPEAVVISCFDPVRREIAKIALERLILDGRIHPARIEEIVVKVSKDISQKIFEEGEKVLFDMGIHNIKQDAVRALGRLYFRTSYGQNVLHHSKEVAIIAGMLAAEVGCNRDLAKRAALLHDIGKGTETNSDLNHAEIGMDMARKMGEDPRIINAIGSHHNDIEPTCIEAVLVQIADAISAARPGARKETLDNYIKRLENLENIATGFSGVDKSFAIQAGRELRILVNNEAVNDEQTREMAKEIAKKIENDLRYPGRIKVTMIRETRITEYAR

SEQ ID NO: 51657 - DNA, 1785 bp, Unknown
  Obtained from environmental sample
  misc_feature (1)..(1785): n is a, c, g, or t
gtgcttccgccgcaggaggcccgccgtatagcggccggcgaagtaatcgacaggcctgccgcattaatccgggaattcattgacaacgccattgacgcgggagcttccgccatagatgtttcgattgagggcggcggaggcaaaaaggctgaagtgtcagataacggttccggcatggacagggaaaaccttgaaaagtgcgttcttcctcacgcgacaagcaaaatccgttcccttgatgatctggataccgtggaaacgcttggtttccggggcgaggccctggcggcggcggcggcggttgcccggttggaaataatcagcggcgttgggaatggcggcgccacctgtggtggcgaagcatggcggcttgaagcgggacccggcgaagaaaggcccttgcgccttagcgccgcgagcaggaccaggggcagcacggtacgcgcgctcaacctttacgaaagcatacccgcgcgcaaaaaattccttaaacgggacggcagcgaagccgcgctgtgccgtcaaatctttatcgacaaggcgcttgcctttccggaaataaccttccgctttacccaggacggacgtcaaagggatttccttcctgccgcanattcaaagaaggatcgttttgccgccgcaatactggaaactaatgaaagagaatttctccacgagatcagcgtttcaggcgaaggcttttccgtagaagtggtaattggcggcccggaactttcccgcgccgaccggcggatgttgtatgtatttgccaacggcaggcgtatacaggattatgcccttatgatggctttggaatacggaacccagggatggtttcccaatggcgttcacccgctgggagccgtgtatgtcgacattgatcccgcgctggcggattttaacattcatccggctaaaagggaggctcgctttcgggatcccggcgcgattcatcacgcgataacttccggcttgcgggacttttgccgccgcctcaacctgaaaaacggcatacagaaagaacaaaatatgccgctggcgctggatgcgttgggagatggtgtctctgacaagccgtttgaggcggggactcaggctgcggctgaccggggcggcggtttgtcatacggcaataacagcgccgctcatgcgccttatgcgcctaacgctggtatggcgcataaaatcagcgacctcgcttccgttgccgccgccttccatgccgccgaagaagcccccatttacggcgaaccgcgttacgcgggaaaaatcttcggcgtttttctgctggtcgaatggggcgacaaattatttatcattgatcaacacgccgcccatgaacgtattttgtataaccgttttctcgaatcccccatcccccaacaagaattattgatccctgtttttttcaacaccgaaaccgtggaagacaccgattttctcgcggcgaanaaagaagaacttgctgcattagccattgtcattgaaaaggacggagacggctggcgcattgacgctctgccggaaggctggcggttaagtgatgccgacaccgtgaaggaaatccttgccctgcgcggagccagcgaaaatattgccgaacgctgggccgccaccctctgctgtcatcaggcgatacggacgggcgaccatcttgacgacgggacggcgcttgccctggcaaaggaggctcttatgctgccccaaccccgctgcccccacggccgcccaatctggaccgaagtcagcaaagaagcgctgtacaaagcagtacgccggatttaa

SEQ ID NO: 51658 - protein, 594 aa, Unknown
  Obtained from environmental sample
  DOMAIN (14)...(154): Histidine kinase-, DNA gyrase B-, and HSP90-like ATPase
  misc_feature (1)..(594): Xaa is any amino acid
MLPPQEARRIAAGEVIDRPAALIREFIDNAIDAGASAIDVSIEGGGGKKAEVSDNGSGMDRENLEKCVLPHATSKIRSLDDLDTVETLGFRGEALAAAAAVARLEIISGVGNGGATCGGEAWRLEAGPGEERPLRLSAASRTRGSTVRALNLYESIPARKKFLKRDGSEAALCRQIFIDKALAFPEITFRFTQDGRQRDFLPAAXSKKDRFAAAILETNEREFLHEISVSGEGFSVEVVIGGPELSRADRRMLYVFANGRRIQDYALMMALEYGTQGWFPNGVHPLGAVYVDIDPALADFNIHPAKREARFRDPGAIHHAITSGLRDFCRRLNLKNGIQKEQNMPLALDALGDGVSDKPFEAGTQAAADRGGGLSYGNNSAAHAPYAPNAGMAHKISDLASVAAAFHAAEEAPIYGEPRYAGKIFGVFLLVEWGDKLFIIDQHAAHERILYNRFLESPIPQQELLIPVFFNTETVEDTDFLAAXKEELAALAIVIEKDGDGWRIDALPEGWRLSDADTVKEILALRGASENIAERWAATLCCHQAIRTGDHLDDGTALALAKEALMLPQPRCPHGRPIWTEVSKEALYKAVRRI

SEQ ID NO: 51659 - DNA, 531 bp, Unknown
  Obtained from environmental sample
  misc_feature (1)..(531): n is a, c, g, or t
ttggcggacattatgaccctccaggagaattttggcgcagtaaagggaaagaccctgtgttatgtaggggacggacgcaacaatgttgcaaactccctcatggtgattagtgccaagctgggcctgaattttaccgttgtgacgccgccggagcttaaccccgaccctgtactgattggaaagtgcgctcctttggccgccgcttccggcgcgaagctaaccgtcagcgccgatattgccgcagtttccggcgcggacgcgatatacaccgacgtgtgggtgtctatgggggaggatgacaaaagagaggagcgcgtaaagctcctgtcaccatatcaggtgaaccagacgctgatggaaataaaccagcggaaggattccattttcctccactgccttcccgcggtcaaaggcgaggaagtaacgtcaggcgtgatagacggcccgcacagccgcgtctgggatcaagccgaaaaccgcaagcacacgataaaggcgattatgttagcaacactggggactggggactag

SEQ ID NO: 51660 - protein, 176 aa, Unknown
  Obtained from environmental sample
  DOMAIN (14)...(171): Aspartate/ornithine carbamoyltransferase, Asp/Orn binding domain
  misc_feature (1)..(176): Xaa is any amino acid
MADIMTLQENFGAVKGKTLCYVGDGRNNVANSLMVISAKLGLNFTVVTPPELNPDPVLIGKCAPLAAASGAKLTVSADIAAVSGADAIYTDVWVSMGEDDKREERVKLLSPYQVNQTLMEINQRKDSIFLHCLPAVKGEEVTSGVIDGPHSRVWDQAENRKHTIKAIMLATLGTGD

SEQ ID NO: 51661 - DNA, 366 bp, Unknown
  Obtained from environmental sample
  misc_feature (1)..(366): n is a, c, g, or t
atgaaaaagaggctttttatcggttctttagtttttgccgctttattggctggttgctctttggcaaattcgcctaaagcaacagtgaaaaaatttggaaaagcaattgaaaagaatgacatgaaggcattggcaaaagtggcaacacctaagacagtacagttagtgtcaacatttggttcgaaagtccaaggatatgcggcgagtatgtcagatagaaaaatcataaaagttacagaagaaattgacggcgataccgctgttgtaactgttatttttgccgatggagaggaagaaaactttgacttggtaaaaatcgacgggaaatggaaagtcgatatagatatgggctctaactataaataa

SEQ ID NO: 51662 - protein, 121 aa, Unknown
  Obtained from environmental sample
  SIGNAL (1)...(22)
  misc_feature (1)..(121): Xaa is any amino acid
MKKRLFIGSLVFAALLAGCSLANSPKATVKKFGKAIEKNDMKALAKVATPKTVQLVSTFGSKVQGYAASMSDRKIIKVTEEIDGDTAVVTVIFADGEEENFDLVKIDGKWKVDIDMGSNYK

SEQ ID NO: 51663 - DNA, 501 bp, Unknown
  Obtained from environmental sample
  misc_feature (1)..(501): n is a, c, g, or t
atgaaaaaaatacttgttggcgtttttacagtattttttattgcaattattgtgattgttattcagcaaaagcgtcaacatagtatttttaaaaatgttcaatatattcaagaagatacaatatttccttttttaaatgacggtgatattatttgccgtttaggagatcgaatttggtcaatttattttaaagaattatcgcctaatgataaaaggttttcacatcttggaatagtcagaataaggaataatactgtttcagtaataaatgccgaaggtttgactaaagaaaagaaagattttgttaacgaagtatcattaaaagagtttttaaaatgtgctcaaaaaataggaatttacagattgaagaatattgaaggaaaaacagtttctgatacagctttagaatttattgggattccttttgattggcaatttgatatggaagataacagtaaattgtattgttctgaattattatttgtaatattaaaaaaatag

SEQ ID NO: 51664 - protein, 166 aa, Unknown
  Obtained from environmental sample
  misc_feature (1)..(166): Xaa is any amino acid
MKKILVGVFTVFFIAIIVIVIQQKRQHSIFKNVQYIQEDTIFPFLNDGDIICRLGDRIWSIYFKELSPNDKRFSHLGIVRIRNNTVSVINAEGLTKEKKDFVNEVSLKEFLKCAQKIGIYRLKNIEGKTVSDTALEFIGIPFDWQFDMEDNSKLYCSELLFVILKK

SEQ ID NO: 51665 - DNA, 636 bp, Unknown
  Obtained from environmental sample
  misc_feature (1)..(636): n is a, c, g, or t
atgataacaggcattatcggtttgggcctaatcggaggctctttcgccaaagcgtacaaggccgccggacacactgtcttcgcgggcgagatcgataaaagcattcttgattttgcccttctttcaggcgctcttgacgcccccttgaccgctgacacgcttaagcgctgcgatctgatcctgatcgcattatatccccaggcggccatagaatttctggacaggatggctctgcatatacaaggttccgccacagtcatcgactgctgcggcacaaaaaagagtatttgcgccgcagggtttaaggcagccgctcagtacggcttcacctttgtgggcggtcacccgatggcgggaaccgaacattccgggtttaaacacagcaaagagaatttgttcaagggcgcgtccatgatcatagtgccgcccgtgtatgatgacatcatgtttcttgaaaaaatcaaaactctgctcgcgcctgcgggattcggcagactgaccgttaccaccgctgaaaaacacgacgcgatgatcgcgtttacatcgcaaatggcccatctggtatccaacgcgtttattaaagcccgacagtatttgagcactggggattctccgccggaagctacaaagacatga

SEQ ID NO: 51666 - protein, 211 aa, Unknown
  Obtained from environmental sample
  SIGNAL (1)...(28)
  DOMAIN (3)...(147): NAD binding domain of 6-phosphogluconate dehydrogenase
  misc_feature (1)..(211): Xaa is any amino acid
MITGIIGLGLIGGSFAKAYKAAGHTVFAGEIDKSILDFALLSGALDAPLTADTLKRCDLILIALYPQAAIEFLDRMALHIQGSATVIDCCGTKKSICAAGFKAAAQYGFTFVGGHPMAGTEHSGFKHSKENLFKGASMIIVPPVYDDIMFLEKIKTLLAPAGFGRLTVTTAEKHDAMIAFTSQMAHLVSNAFIKARQYLSTGDSPPEATKT

SEQ ID NO: 51667 - DNA, 1443 bp, Unknown
  Obtained from environmental sample
  misc_feature (1)..(1443): n is a, c, g, or t
atgagctcgatctttttctcgcttccctccgggaatacagggacgcgctgcaggagaaggactttccaaaactccggtctcttcttctcgacggtaagcgccttaaagaagaggttgaccgacgatgaacctcaaccgaccgaaacgaagtgtagggaggttcccctcttgaacagcgatgtgaaaattctaccgctgaggttaaacggcgttgttcgcgcaatcccttccaagtcgcaggcccacagagcgcttatatgcgcggcattagctgacaaacctacaagcatagaatgtgaaggcagttccgaagacatagcggcgacggcggactgcctgtccgcgctgggggctgtaattaaatgcgaatcaggcgtctatgttgtccgccctctgaaacgggagagtaacgacatcgctaccctgggctgcggggaaagcggcagcacattccggttcatgctgcccattgtcggcgcgcttggacgtaaagcttcgtttatcctgaaaggacggcttcccgaacgccccctctccccgttatacgaagagcttgtccgccgcggctgcgaactgtcgccccagggctctgtcccgttttattccgcgggcaagcttgcgccgggacgctattcgcttgacgccggcgtatcgtcgcaattcatcagcgggctgttgttcgccctgcctttactcgacggtgacagtgaattgcagctaacaggaaaggcggagtcatttccttatattgagatgacccttgctatgctggagatatttggcatacaaacagaatttaaaggcgatgttttttcgataccgggcgggcagacgtaccggtctcccggcaagacgcgggtagagggcgattggtcgaacgccgcgttctggctgagcgcgggggcgattggaaaaggcagcattacctgtaccggtttaaatttcaaatcacggcagggagatcgcgcgattctggacattctgtcaaaattcggcgcggacattgatattattgaaagcgactccatggtaacagtatccggcgggaaactgcggggcattgagatagacgcgcgggatatacccgatctcgttccgattttagcggttgtcggatcaagagccgaaggaaccaccgttattcgcaacgcggcgcggcttcgcaccaaggaaagcgacaggcttgccgccgtaagcgccgtactgcgctccattggcgctgatgtgaatgagaaggaagacggacttgtcatatatggcggaaaggctttcgaaggcggacaggtatcgtcctgcggggatcaccggatagcgatgtcagcggcaatcgccgcggcagtatgcgcggagccggtggtatttcagggcgctcaggcagtcaacaaatcataccccggcttttttgacgatctgcgtttgcttggcggcgaggttgaagaatga

SEQ ID NO: 51668 - protein, 480 aa, Unknown
  Obtained from environmental sample
  DOMAIN (63)...(471): EPSP synthase (3-phosphoshikimate 1-carboxyvinyltransferase)
  misc_feature (1)..(480): Xaa is any amino acid
MSSIFFSLPSGNTGTRCRRRTFQNSGLFFSTVSALKKRLTDDEPQPTETKCREVPLLNSDVKILPLRLNGVVRAIPSKSQAHRALICAALADKPTSIECEGSSEDIAATADCLSALGAVIKCESGVYVVRPLKRESNDIATLGCGESGSTFRFMLPIVGALGRKASFILKGRLPERPLSPLYEELVRRGCELSPQGSVPFYSAGKLAPGRYSLDAGVSSQFISGLLFALPLLDGDSELQLTGKAESFPYIEMTLAMLEIFGIQTEFKGDVFSIPGGQTYRSPGKTRVEGDWSNAAFWLSAGAIGKGSITCTGLNFKSRQGDRAILDILSKFGADIDIIESDSMVTVSGGKLRGIEIDARDIPDLVPILAVVGSRAEGTTVIRNAARLRTKESDRLAAVSAVLRSIGADVNEKEDGLVIYGGKAFEGGQVSSCGDHRIAMSAAIAAAVCAEPVVFQGAQAVNKSYPGFFDDLRLLGGEVEE

SEQ ID NO: 51669 - DNA, 573 bp, Unknown
  Obtained from environmental sample
  misc_feature (1)..(573): n is a, c, g, or t
atgtcttcgcaatacgggaaaaagttaaaaatatcgatcttcgggcaatcgcactctccggcgattggcgttaatattgacggcttgcctagtggcatcaaaattgatattgacgaactgaggggcttccttaaacgcagaagcccagggcaaaacgacatttctacggcgcgggcggaagatgacgcgccggaaattttgtcgggtctggtaaatagcgttacctgtggtgctcctcttgcgataatcatccgtaacgaagacgcccgctccgcggattaccgcgaactgcgggatattccgcgcccgtcccacgccgattttagcgcacacataaagtacggcgggtttcaggacgtggcgggcggcgggcatttttccggcagacttaccgcgcctttgtgcggtgcaggcgggatatgtttgcagatattgcgcggactggggatcaacatcggcgcccatatattgcggatcggcggcgcggaagatgatccgtttgaccctgtggctgtatcaggcgcggactttgaggtaattttaaaaaacnccgctgcctgtactcaatcgtga

SEQ ID NO: 51670 - protein, 190 aa, Unknown
  Obtained from environmental sample
  DOMAIN (9)...(190): Chorismate synthase
  misc_feature (1)..(190): Xaa is any amino acid
MSSQYGKKLKISIFGQSHSPAIGVNIDGLPSGIKIDIDELRGFLKRRSPGQNDISTARAEDDAPEILSGLVNSVTCGAPLAIIIRNEDARSADYRELRDIPRPSHADFSAHIKYGGFQDVAGGGHFSGRLTAPLCGAGGICLQILRGLGINIGAHILRIGGAEDDPFDPVAVSGADFEVILKNXAACTQS

SEQ ID NO: 51671 - DNA, 423 bp, Unknown
  Obtained from environmental sample
  misc_feature (1)..(423): n is a, c, g, or t
atgaatgatggtcaaaattatcaaaaaattaagttgaaaatggaggatttgaatatgaagaaaaagattcttgtaattgatgatgatgaaacttcccttaccatgacaaaaaacatgttggaagataattatgacgttaccacagtcacttccggtacggcggcttttgatttgatcaaaaaggggtttattcccaatttggttttgttggatatgtatatgcctgaaatgggcggctggaatacccttctcaaaatacgaaaattatgcgaatcacacaaagtccatatagcgatatactcgtcatcggaagatccggacggtatggcaaaagcaaaagaatttggcgcggttgaatacttacacaagccgctcagtagaaccaaattgaatgagaaagtggaacagttgttaaatttataa

SEQ ID NO: 51672 - protein, 140 aa, Unknown
  Obtained from environmental sample
  DOMAIN (21)...(135): Response regulator receiver domain
  misc_feature (1)..(140): Xaa is any amino acid
MNDGQNYQKIKLKMEDLNMKKKILVIDDDETSLTMTKNMLEDNYDVTTVTSGTAAFDLIKKGFIPNLVLLDMYMPEMGGWNTLLKIRKLCESHKVHIAIYSSSEDPDGMAKAKEFGAVEYLHKPLSRTKLNEKVEQLLNL

SEQ ID NO: 51673 - DNA, 1386 bp, Unknown
  Obtained from environmental sample
  misc_feature (1)..(1386): n is a, c, g, or t
atggatatttacccaaaagggcagtcccagaatgaggctgtccagcttagaaccagaatcccttatcatgatcccaatctgcttccctcgttaagggaaaaaggaatcaatatttccggctccgtttccaggttaagccccctgcgcataattctcgatcttttcccatggataatttttatcggtcttatctggtttatgttccggaatatgccgggcggagggggcaaggcctttcaattcggcaagagcaaggcaaagcgttaccatgatgaagggaaaaaggtcagcttcgccgatgtcgcaggacagaaagacgccaagttcgagcttgaggaagtagtggccttcctgaaaaacccgcagaagtttacaaagatgggagcaaggatccccaaaggcgtcctgcttgtggggatgcccggaaccggcaagacgctgatggcgcgctcggtcgccggcgaagcgggagtcgcctttttccacatgtccggctccgattttgtcgagatgtttgtcggcgtgggcgcgagccgcgtcagggacctctttgatcagggcaggcgcagcgccccctgcatcatttttattgacgagctggacgcagtaggccgcacccgcggcgcgggttacggaggcgggcatgacgagcgtgaacagacgctaaaccagttgttagttgaaatggacggctttgacaatacgggcgggcttattgttcttgcagcgacaaaccgcccagacgtgcttgaccccgcgcttctgcgtcccggccgcttcgacaggcaggtgcttgttgacaagcccgacgtaaaaggcagggaagcgattttaaaaattcattcaaaaaatatcgcgggaatttccactatagatcttgaagttgtcgccagaattacatccgggttttccggagccgaccttgccaacattgtaaacgaagccgcgcttttggccgtcagggcggggcgaaaaatggtggcgcagcgtgattttgacgaggctatagaaaaaaccgtagccggcctgcagaaaaaaaccagggttatcaaagaagaggaaagaaggcttaccgcctaccacgaagccggtcacgcaatggtcgccgcctttacacctaacgccgaccctgttcagaaaatttcgattattccgcgcggctttgcgcttggctacactttgcagcttcctctggaagaccgctatacggttacaaaatccgatcttttgggaagaatagacatactcctgggcgggcgcattgccgaagaaatgatttcaggcgaatattccaccggagnncgcagcgatcttaccaaggcgacggacattgccccgcaaaatgataaccgattatggaatgagcgaccgtttcccgcaatgtag

SEQ ID NO: 51674 - protein, 461 aa, Unknown
  Obtained from environmental sample
  DOMAIN (134)...(268): ATPase family associated with various cellular activities (AAA)
  misc_feature (1)..(461): Xaa is any amino acid
MDIYPKGQSQNEAVQLRTRIPYHDPNLLPSLREKGINISGSVSRLSPLRIILDLFPWIIFIGLIWFMFRNMPGGGGKAFQFGKSKAKRYHDEGKKVSFADVAGQKDAKFELEEVVAFLKNPQKFTKMGARIPKGVLLVGMPGTGKTLMARSVAGEAGVAFFHMSGSDFVEMFVGVGASRVRDLFDQGRRSAPCIIFIDELDAVGRTRGAGYGGGHDEREQTLNQLLVEMDGFDNTGGLIVLAATNRPDVLDPALLRPGRFDRQVLVDKPDVKGREAILKIHSKNIAGISTIDLEVVARITSGFSGADLANIVNEAALLAVRAGRKMVAQRDFDEAIEKTVAGLQKKTRVIKEEERRLTAYHEAGHAMVAAFTPNADPVQKISIIPRGFALGYTLQLPLEDRYTVTKSDLLGRIDILLGGRIAEEMISGEYSTGXRSDLTKATDIAPQNDNRLWNERPFPAM

SEQ ID NO: 51675 - DNA, 513 bp, Unknown
  Obtained from environmental sample
  misc_feature (1)..(513): n is a, c, g, or t
atgcccgcctccgtaacccgcgccgcgggtgcggcctactgcgtccagctcgtcaataaaaatgatgcagggggcgctgcgcctgccctgatcaaagaggtccctgacgcggctcgcgcccacgccgacaaacatctcgacaaaatcggagccggacatgtggaaaaaggcgactcccgcttcgccggcgaccgagcgcgccatcagcgtcttgccggttccgggcatccccacaagcaggacgcctttggggatccttgctcccatctttgtaaacttctgcgggtttttcaggaaggccactacttcctcaagctcgaacttggcgtctttctgtcctgcgacatcggcgaagctgacctttttcccttcatcatggtaacgctttgccttgctcttgccgaattgaaaggccttgccccctccgcccggcatattccggaacataaaccagataagaccgataaaaattatccatgggaaaagatcgagaattatgcgcagggggcttaa

SEQ ID NO: 51676 - protein, 170 aa, Unknown
  Obtained from environmental sample
  misc_feature (1)..(170): Xaa is any amino acid
MPASVTRAAGAAYCVQLVNKNDAGGAAPALIKEVPDAARAHADKHLDKIGAGHVEKGDSRFAGDRARHQRLAGSGHPHKQDAFGDPCSHLCKLLRVFQEGHYFLKLELGVFLSCDIGEADLFPFIMVTLCLALAELKGLAPSARHIPEHKPDKTDKNYPWEKIENYAQGA

SEQ ID NO: 51677 - DNA, 483 bp, Unknown
  Obtained from environmental sample
  misc_feature (1)..(483): n is a, c, g, or t
atggagggcggacgaggaagccgctattttaacactacaagcaacaccgaccgttttcagaataccaacgccagaaattcagattttacccgatcaaccttgtccgaagattataaagtgacagccggagaggacgtaacattggggcgttttaaatgccggcttctgacactggaagccgtaaccaaagacgtaacataccccaaaatgaaagtctggatcagcgaagacggcctgttacgcaaaactgaggattacagtctttccggacaactgcttaggacatcggcagttcccgattattaccagattggcggacgttatgttcccaaacagattttatttgtagacgcgctgcaggggttggttattaacggaaaattcgtgaatgaaaaaactcaaatatcaatttcaaggccttcttttaacaaagtagcggattcagttttttcaaaaacctttttggaaacggttaacaaatga

SEQ ID NO: 51678 - protein, 160 aa, Unknown
  Obtained from environmental sample
  misc_feature (1)..(160): Xaa is any amino acid
MEGGRGSRYFNTTSNTDRFQNTNARNSDFTRSTLSEDYKVTAGEDVTLGRFKCRLLTLEAVTKDVTYPKMKVWISEDGLLRKTEDYSLSGQLLRTSAVPDYYQIGGRYVPKQILFVDALQGLVINGKFVNEKTQISISRPSFNKVADSVFSKTFLETVNK

SEQ ID NO: 51679 - DNA, 1827 bp, Unknown
  Obtained from environmental sample
  misc_feature (1)..(1827): n is a, c, g, or t
atggcggatgcgctatatttcgggattctccttttcctaattattttatgctgtatacttgctccggttttagcgccttacggcgagtctgaacaggatttgaccgcttctctcgcgccgccatctgcggaacatttgttgggggcggataagatgggtagggatctattttcacggctcctatacggcggtagggtaacgctgatttccgcacttggtgtggtaattctttcggtaatcattggcgcgcctctggggctattctcgggattttacggcggtaaattcgattccatcgtgtgccgttgttgtgatgtgttgctttcattcccttctttgctacttgcgttcctctttgtaaccgctatggggcgcggtattactagcgcggtgatggcgctgggaatcatctatgtgccgatgattacccgcctgatcagatcgctaaccttagttgaaaaaaataaaacttatgttgaagccgcggagtcgattggcttttccagaccgtacatactgttccgtcatattctgccaaactgcgtttataccatgctggtacagcttacccttgatcttgcttacgcgattctggacttggcggcgttaagttttatcggtcttggggtaagcccacccacggccgactggggagccatgttacaggaagggagaaattttttgctgatgagtccgctccttgcccttgctcccggagccgccattgttgttacggtaattagcctgaatattttcagcgactgcataactcagtacctggatccacaggggagggttctcccttcttttgaaaaaattgaaaaacgtaaaggcgtaatcgggagtgaatcaatggaaactgattgtctctccatagaaaacctttcctgcgatttcctgaccattgaagggatcgtgtacgctttaagcggggttaatctgcaattaaagcgcggtgaaatccacggccttgtcggggagtcgggatgcggaaagagtgtgacatcacgcgctattcttggtcttgttgataaaaagcatacccgcatgaggggactaatccgatttgacggaaaaaatcttttgtctctgccggaaagagaaatgcgctttataagagggaaacgtatttccatgattttccaagacccgctcaattccctttcaccgctggagactgttggcagtcagattgaagaagccatgaccaatcatttggagatagataaggcaaaactgcgccaccgtaccgcttttctcttggaaaaagtagggcttcaccccgacacaagcctgcagtacccatttgaactttcaggcggaatgcagcaacgggtaatgatcgccatggcaataagttgtaaccctgaactgattatcgccgatgaaccgactaccgcccttgaccttaccattcaggcccaagtgttggatcttcttaaaagtttgcaaaaggaactttcccttaccgtactgcttatcacgcacaacttcgctctggttacggaaaactgcgacagggcgtcggtaatgtatgcggggcgtattgtcgagacagcgccggcaagaagcctcattgaatcagccgcccatccttacactaacgcgctgatcaactgtataccccgatcaagcgctgccaaccgtcgggaaaaacttccggtaatttcaggctccccaccaagactctacgctccgcttgatgggtgtccatttgttccacgttgccccaaggcggataaggcttgcgcacggatgcctgaggttactgacctcggtgagggaagatcggtgtgctgtcaccacatagggggcgcatcatgttag

SEQ ID NO: 51680 - protein, 608 aa, Unknown
  Obtained from environmental sample
  SIGNAL (1)...(25)
  DOMAIN (517)...(583): Oligopeptide/dipeptide transporter, C-terminal region
  misc_feature (1)..(608): Xaa is any amino acid
MADALYFGILLFLIILCCILAPVLAPYGESEQDLTASLAPPSAEHLLGADKMGRDLFSRLLYGGRVTLISALGVVILSVIIGAPLGLFSGFYGGKFDSIVCRCCDVLLSFPSLLLAFLFVTAMGRGITSAVMALGIIYVPMITRLIRSLTLVEKNKTYVEAAESIGFSRPYILFRHILPNCVYTMLVQLTLDLAYAILDLAALSFIGLGVSPPTADWGAMLQEGRNFLLMSPLLALAPGAAIVVTVISLNIFSDCITQYLDPQGRVLPSFEKIEKRKGVIGSESMETDCLSIENLSCDFLTIEGIVYALSGVNLQLKRGEIHGLVGESGCGKSVTSRAILGLVDKKHTRMRGLIRFDGKNLLSLPEREMRFIRGKRISMIFQDPLNSLSPLETVGSQIEEAMTNHLEIDKAKLRHRTAFLLEKVGLHPDTSLQYPFELSGGMQQRVMIAMAISCNPELIIADEPTTALDLTIQAQVLDLLKSLQKELSLTVLLITHNFALVTENCDRASVMYAGRIVETAPARSLIESAAHPYTNALINCIPRSSAANRREKLPVISGSPPRLYAPLDGCPFVPRCPKADKACARMPEVTDLGEGRSVCCHHIGGASC

SEQ ID NO: 51681 - DNA, 639 bp, Unknown
  Obtained from environmental sample
  misc_feature (1)..(639): n is a, c, g, or t
gtgctgtcaccacatagggggcgcatcatgttagaagtaagagacataaagaaatattttgagttaagtgacggtcggcggattcgggcggtagatggggtatcctttcaggtacaggagaatgaagtcttaggtgttgtcggggaatccggctgtggcaagtctacgctgggcaggcttattctccgcctgattgaaccggacgcggggaacgtgtttttcgggggcgaagaaatcacttgccttagccgaaacgctttacggctcaaacgcagatcgatgcagatggtttttcaaaatcctttttcttcttttaacgcaaagattagcatcggcggagcgcttatggaagtgtgccgtttttatggcatgagcgttcccgaaagccgcgaaaaaattgaacggctgttaagtgatattggcttatccgacgacatgcttaaccgctggccgcgtgaactttcaggcggacaacttcaacgccttgccatcgcaagggctattattggagaaccttccctgcttattgccgatgaacctctgtccgccctggacgtgtctgttcaagcccagcttctcaatctgcttgatgatattcgcgccagccgttccatggcgatgatttttatttccccatga

SEQ ID NO: 51682 - protein, 212 aa, Unknown
  Obtained from environmental sample
  DOMAIN (41)...(212): ABC transporter
  misc_feature (1)..(212): Xaa is any amino acid
MLSPHRGRIMLEVRDIKKYFELSDGRRIRAVDGVSFQVQENEVLGVVGESGCGKSTLGRLILRLIEPDAGNVFFGGEEITCLSRNALRLKRRSMQMVFQNPFSSFNAKISIGGALMEVCRFYGMSVPESREKIERLLSDIGLSDDMLNRWPRELSGGQLQRLAIARAIIGEPSLLIADEPLSALDVSVQAQLLNLLDDIRASRSMAMIFISP

SEQ ID NO: 51683 - DNA, 891 bp, Unknown
  Obtained from environmental sample
  misc_feature (1)..(891): n is a, c, g, or t
ttggggttttccttccttgtcgcggtagtcgtatttatcttatgggtctatcatgacgcttcaagagttattccggtaatctcaatgtatgccctggccctgtaccgtatcctgcccgcgatacaccggatgctgctaaatgttaataatattatctattatcaagagtgtatggaaggcgtagaagagagtttgcggcagccggttgagaaagagggagacgcgccgcttgagtttaaacgttttattcgtctggaaggcatcaattataggtatataacgggtaatgaggttattaccgatgtctcactagaaattaaaaaaggtgaaaaaatagccattaccggggaaagcggcagcggtaaatcaactctggttgatattatcataggtattcacaagccgctttccggtaaagtttatattgatgaagccgtaatcacagatgataatatccgttcatggcgaaagaaaatagggtatatcccgcaaagcatctacctttttgacggaacggtcgcggagaatgtttcttttggttctgaacctgacgaagaaaagacaaagaaagccctgcagatggccaatatatgggattttcttaccacaaaagacggcattaacaccctggtaggcgaggggggcattcagttaagcggcggacagcagcagcgtatcggcattgcccgcgccctgtacgatgatcccgacgtgctggtccttgacgaagccacctcctcgcttgataccgaaaccgaacaaaaaataatggatgaaatctataatgtaagcgtaaataaaactttaattgttatagcgcacagactaagcactgtagaacactgcgacagaagaattcgtattgaaaaaggaaaaattgtaaatgaataa

SEQ ID NO: 51684 - protein, 296 aa, Unknown
  Obtained from environmental sample
  DOMAIN (81)...(295): RecF/RecN/SMC N terminal domain
  misc_feature (1)..(296): Xaa is any amino acid
MGFSFLVAVVVFILWVYHDASRVIPVISMYALALYRILPAIHRMLLNVNNIIYYQECMEGVEESLRQPVEKEGDAPLEFKRFIRLEGINYRYITGNEVITDVSLEIKKGEKIAITGESGSGKSTLVDIIIGIHKPLSGKVYIDEAVITDDNIRSWRKKIGYIPQSIYLFDGTVAENVSFGSEPDEEKTKKALQMANIWDFLTTKDGINTLVGEGGIQLSGGQQQRIGIARALYDDPDVLVLDEATSSLDTETEQKIMDEIYNVSVNKTLIVIAHRLSTVEHCDRRIRIEKGKIVNE

SEQ ID NO: 51685 - DNA, 1287 bp, Unknown
  Obtained from environmental sample
  misc_feature (1)..(1287): n is a, c, g, or t
atgaataaaaatatatttatattcctgttattttttttgttcttttctttattattaagcgctcaggaagctcttaaatccgccgaagaagaatactataactttcttgctttacagggattaacagagcacccaacgcttaattaccgcactctttcagattcagtctggaatgtagaaaatgattcttctcatccatggcaagaaaataatcttggaatgtttcatcatttattcggcgatttccgtatgcgggtttacggccctgatcttttcatgtcagctaacaccattgccccttacgggcaaaatgacggcgtattgtggcagggacgcggctttaactcgctcttaaaaaccggagtgcgttttgaaggatacggcattgaacttacaatattgccgcatctcgctttttcgcaaaatgccaagtttgaaataatgccttcaatgtatgacaatgaatacggttatttttggggatattatcataatgtaggcatggacgttcctcagcgattcggcgataaatatttctttgactgggacttcggcgattctgaaattcgctatacatggaaaacgcttactatcggattcggaactcaggcaatttggctgggtccttcttatctcaattcgatacttcattcgaataacgctcctgcgtatcccaagtttgatatcggattacgaaagcaaagaatcgtaattccatggattaattggtatgccggagatgttgaaacgcgattttgggtagggcggctttctgaatctgaatattttgatagtgatgatacaaataattacactatgtttcatggattttcttttgcgtacactccgtcttttttgccgggattaacattatttacaaaccgtgtatgccttattccatgggaaattgaaaatataaaatttataattccaagtgatgataatactattgaagatcagaaatcctcttttgggttttcatggatttttcctcaagttggatttgaagtttatggagaattaggatttgatgattttgttcctaattcttttccacaaggttatattcgttatccatttcatactatgatgtatacgattggattaaaaaaaacaattccgataatttcagctagtaaaatatatttagaattattatttgaaagtaactctatggaaatgtctcaggattttcattttcaatggccttattcaccatattttcatcatcaagttttacatggttacactaatagaggacaatggcttggagcgggaagcggatga

SEQ ID NO: 51686 - protein, 428 aa, Unknown
  Obtained from environmental sample
  SIGNAL (1)...(21)
  misc_feature (1)..(428): Xaa is any amino acid
MNKNIFIFLLFFLFFSLLLSAQEALKSAEEEYYNFLALQGLTEHPTLNYRTLSDSVWNVENDSSHPWQENNLGMFHHLFGDFRMRVYGPDLFMSANTIAPYGQNDGVLWQGRGFNSLLKTGVRFEGYGIELTILPHLAFSQNAKFEIMPSMYDNEYGYFWGYYHNVGMDVPQRFGDKYFFDWDFGDSEIRYTWKTLTIGFGTQAIWLGPSYLNSILHSNNAPAYPKFDIGLRKQRIVIPWINWYAGDVETRFWVGRLSESEYFDSDDTNNYTMFHGFSFAYTPSFLPGLTLFTNRVCLIPWEIENIKFIIPSDDNTIEDQKSSFGFSWIFPQVGFEVYGELGFDDFVPNSFPQGYIRYPFHTMMYTIGLKKTIPIISASKIYLELLFESNSMEMSQDFHFQWPYSPYFHHQVLHGYTNRGQWLGAGSG

SEQ ID NO: 51687 - DNA, 477 bp, Unknown
  Obtained from environmental sample
  misc_feature (1)..(477): n is a, c, g, or t
atgacagctcctttgggattacgcgccataatgaaaaaagcgctctttgttcctgaaacaatgcccgctataaaagcgtttgagtcttttaaacaggggcgctcaaactttttatttgtaatggacgaatacggcggactatccggtcttctttcgattacatcgttagttgaagaaatagtaggcgaactttccgtccctgccgcaagtgaaaaaccgctccttaaacaggaagacggcagttttcttgccgacggcacgcttaatattgacgacgccgcaaaagcgcttggtcttactggttttggagaggaaaaagattttcacacccttgccggtcttgttcttaatattgccggagaacttccccgtgtaggcgacagttttaattatcagggatataagtttaaagttattgataaagacgggaataggatagataaaatattagttacaaaattacctgttaaggaataa

SEQ ID NO: 51688 - protein, 158 aa, Unknown
  Obtained from environmental sample
  DOMAIN (75)...(155): Transporter associated domain
  misc_feature (1)..(158): Xaa is any amino acid
MTAPLGLRAIMKKALFVPETMPAIKAFESFKQGRSNFLFVMDEYGGLSGLLSITSLVEEIVGELSVPAASEKPLLKQEDGSFLADGTLNIDDAAKALGLTGFGEEKDFHTLAGLVLNIAGELPRVGDSFNYQGYKFKVIDKDGNRIDKILVTKLPVKE

SEQ ID NO: 51689 - DNA, 489 bp, Unknown
  Obtained from environmental sample
  misc_feature (1)..(489): n is a, c, g, or t
ttgacgaagccagaccgccttgtaagcggtgaaatgatagacgacacaacagaattatgttcgataatccgaaaattcgcaaagactgataacattcttcttgccgcatgttccgctacgataaacaaaaaatgcgtagaaaaaatacaagccgttttctttggcggcggggagggcaggggagtctcctttattgaatccgaggataatgaaatcctgcgcgataaaattgaacactgggctattttcagcgagaaacggcgcaaggatcaaactttgcgctcattgttagccgccattaaaacaaaaaaatcccgcgttaaagcgctggtgtttataagcaagggcgatgaagccgcgttagtcctttcgcgcctccagtaccaccatgtcccggctgccggactttttggaaaaataggcaataaaccagctctccggcgcggagcgcaaagaggcgctggagctattcagaaacggaagcgttga

SEQ ID NO: 51690 - protein, 162 aa, Unknown
  Obtained from environmental sample
  misc_feature (1)..(162): Xaa is any amino acid
MTKPDRLVSGEMIDDTTELCSIIRKFAKTDNILLAACSATINKKCVEKIQAVFFGGGEGRGVSFIESEDNEILRDKIEHWAIFSEKRRKDQTLRSLLAAIKTKKSRVKALVFISKGDEAALVLSRLQYHHVPAAGLFGKIGNKPALRRGAQRGAGAIQKRKR

SEQ ID NO: 51691 - DNA, 489 bp, Unknown
  Obtained from environmental sample
  misc_feature (1)..(489): n is a, c, g, or t
atgaattttgagcaattaggcgttgcgccgtgttttattaaatgtcttgaaaaacgaaacataaaaacagcgactgatattcaatgtaaagtgattccccgccttttcgccggtgaaaacgtcttttttacctcggctacggggacgggcaagacttttgcctatcttttgccgcttttaaccaatttacttgtaaatgaaaaatcggcttttggaccgcgtattttgattttagcccctactttggaactttgttcccagatttcatcggaactggattttcttttggatggttcgccaattcgttcttttttggcaatcgggagcatcagtcttgaccgtcaaattgaaaattttaaaaagaccaaacccgatattgtcgtaggaaaccctaaccggcttcttcttcttgcccaaaaaaaaatccttaaattgaataacttgtcttcgctggtttttgacgaagccagaccgccttgtaagcggtga

SEQ ID NO: 51692 - protein, 162 aa, Unknown
  Obtained from environmental sample
  DOMAIN (25)...(162): DEAD/DEAH box helicase
  misc_feature (1)..(162): Xaa is any amino acid
MNFEQLGVAPCFIKCLEKRNIKTATDIQCKVIPRLFAGENVFFTSATGTGKTFAYLLPLLTNLLVNEKSAFGPRILILAPTLELCSQISSELDFLLDGSPIRSFLAIGSISLDRQIENFKKTKPDIVVGNPNRLLLLAQKKILKLNNLSSLVFDEARPPCKR

SEQ ID NO: 51693 - DNA, 735 bp, Unknown
  Obtained from environmental sample
  misc_feature (1)..(735): n is a, c, g, or t
atggattctgcagaattacttgaaatttctaactctgacatcaaagatattgatgcaaggcttttttctgaatattttaaaaaagaatttgaaatgacttatgaagaaaaggggcttactctggaaggggccctcattgcaaaaaaagctatgcgtaacaatcatttgacgcttgccggacttttattttttgggaatgaaccgcaatcctttcggcccgcttttacaataaaagcggtaatgtttgcgggaaacgatataggcgaaaataattaccgcagtaagcccgaagattttaccggtacaataccggaactttataaacagggaatgatgtatgtaaagagcagtataaaatatcttcagaacgggcagggatttaactcttccggagtgccggaggtatccattattgccatggaagaagttttacaaaacgcgcttattcaccgtgattatttcaagaattcgcctattcgtttaatgatatttgaaaatcgcattgaaataataagtcccggcaagctgccaaacagcttaactgtagaagatgttaaatacggaaacccggttataagaaacaatcaaatagtgatgtttgcaagcaaaaccatgccatacagcgggcttggttcgggattacgccgcgcgtttgcaaatcaaccggatttagaattggtaaacgatattgaaggcgagcaatttattgtacggtttccgcgaaaacaggattaa

SEQ ID NO: 51694 - protein, 244 aa, Unknown
  Obtained from environmental sample
  misc_feature (1)..(244): Xaa is any amino acid
MDSAELLEISNSDIKDIDARLFSEYFKKEFEMTYEEKGLTLEGALIAKKAMRNNHLTLAGLLFFGNEPQSFRPAFTIKAVMFAGNDIGENNYRSKPEDFTGTIPELYKQGMMYVKSSIKYLQNGQGFNSSGVPEVSIIAMEEVLQNALIHRDYFKNSPIRLMIFENRIEIISPGKLPNSLTVEDVKYGNPVIRNNQIVMFASKTMPYSGLGSGLRRAFANQPDLELVNDIEGEQFIVRFPRKQD

SEQ ID NO: 51695 - DNA, 672 bp, Unknown
  Obtained from environmental sample
  misc_feature (1)..(672): n is a, c, g, or t
atgctggtctatcatggcggacgtacgccggttatagaaatagatttgcagagatgcagaccatacaccgattttggaagaggtttttacgttacaaaatataaggtacatgccgagaattgggcaagaagattcaaaaaacaaaataataacggttttgtgacaacatttaattatattgaaagccaattttcagattatatctgcaaaataaagaaattcgacggatatacaaatgaatggttggattttattgttaataacagaaatgaagaaatcattgaacaagctcatggttatgacatagtagaaggaccggttgcaaatgataaagttcaaaacaggctttataattatttacgcggtgaaataacaaaagaagcatttttaaaagaattaaagtatcacgaagatacgcatcagatttgtttttgtacgcttgcttcttttcaagctttaaaaagaattgaaaatgaattgactgttttcattgaaaagataagtgaagatatattaaataatcttgttaatgagaaaggaatagacgctaataccgcttcagatttgtttttttcatccaaaacttttattaatatcgcagatactaaaacaggctcttttaagaaggattggcatgagatatataaaatgctaagggatgaaatagggtaa

SEQ ID NO: 51696 - protein, 223 aa, Unknown
  Obtained from environmental sample
  misc_feature (1)..(223): Xaa is any amino acid
MLVYHGGRTPVIEIDLQRCRPYTDFGRGFYVTKYKVHAENWARRFKKQNNNGFVTTFNYIESQFSDYICKIKKFDGYTNEWLDFIVNNRNEEIIEQAHGYDIVEGPVANDKVQNRLYNYLRGEITKEAFLKELKYHEDTHQICFCTLASFQALKRIENELTVFIEKISEDILNNLVNEKGIDANTASDLFFSSKTFINIADTKTGSFKKDWHEIYKMLRDEIG

SEQ ID NO: 51697 - DNA, 789 bp, Unknown
  Obtained from environmental sample
  misc_feature (1)..(789): n is a, c, g, or t
ttgggccccctttgcagtgtttttatcgcgcttaaaattccagggggatctcccgcgttacctgtaattttattgtgtatactgggcggcatggcgggcggcgctttttggggagcgttgacaggttttttaaaaaccaaattcagaatccacgaagtaattgtcgcaatactgcttaattatattgcgataaattttgtttcatatattgtgaactatcccctgcaatcggcggcgggactgcctgaaacggatatgatcccccagcggttccgttttcccatccttatcgcgagaacccagttttcggcaagcgtgtttttggcggctgccgcggttgttacggtatatcttttgattttcaagacggtaaccggctacaaaatacgcgccgttggaaataacgcaacggcggcggaagcgggcggcattaaagtccccgttatttccgtgctcactatggctataagcgggttattgggcgggcttgccggaaccgccgaagcgcttggcacttacggcaaattgtttgagggattttccagtaatgtcggctttaccgggcttgcggtggcggtactggccggaaataatccctttgtggttattttaaccggacttctttttggcgtcatggattcgggcgccaggcagatgagcatacaggcgggactttccgcggatatggttattgttattcagggacttgttattttgtttgtggcgacgccggagattttccgttttctcaaacgctggcagggacggtgtgttgtgaaggagacataa

SEQ ID NO: 51698 - protein, 262 aa, Unknown
  Obtained from environmental sample
  DOMAIN (2)...(242): Branched-chain amino acid transport system / permease component
  misc_feature (1)..(262): Xaa is any amino acid
MGPLCSVFIALKIPGGSPALPVILLCILGGMAGGAFWGALTGFLKTKFRIHEVIVAILLNYIAINFVSYIVNYPLQSAAGLPETDMIPQRFRFPILIARTQFSASVFLAAAAVVTVYLLIFKTVTGYKIRAVGNNATAAEAGGIKVPVISVLTMAISGLLGGLAGTAEALGTYGKLFEGFSSNVGFTGLAVAVLAGNNPFVVILTGLLFGVMDSGARQMSIQAGLSADMVIVIQGLVILFVATPEIFRFLKRWQGRCVVKET

SEQ ID NO: 51699 - DNA, 684 bp, Unknown
  Obtained from environmental sample
  misc_feature (1)..(684): n is a, c, g, or t
atggcagcggttaaattcaacggagtagagcttagatttgtacctgacgaactgcgtaccaaagaactctgttatgccgcagttgaatcaaatccatatgcgctaacctttgtacctgaaagcataaaaagcagccaactgtatttaacggctttcaaaagcaatacatgggcgatagaaattatacccaaggaatgcattacttggaaaatgtgcgatatcgccgtaaaggaacatggaacaaatctgaagtttgtccctgacagatgcaaaactcctgaactctaccttatcgcggttaaaagctacggtgaaacccttcggtatgtgcccgcaaaattaaggactcccgaactctgcctagttgctgtaaaggcttttggaaaaaacctgaagcatgtccctaaagaaataataaatgcagaactatgtatggcgtctgttcaatcggagggcgagaatctaaaatatgtcccgaaagattttaaagacgccgaattttgtatggcggctgtaaaattgaatggtaaaaaccttaaatatgtcccggaagaatttaaaagcgctgaagtctgtcttaacgcgctaattcaagcttgctccaataggatctacggattctatgaaattgtaaaatacatccccaagcgttttaggaattttgatttcaggaaaaggaagtga

SEQ ID NO: 51700 - protein, 227 aa, Unknown
  Obtained from environmental sample
  misc_feature (1)..(227): Xaa is any amino acid
MAAVKFNGVELRFVPDELRTKELCYAAVESNPYALTFVPESIKSSQLYLTAFKSNTWAIEIIPKECITWKMCDIAVKEHGTNLKFVPDRCKTPELYLIAVKSYGETLRYVPAKLRTPELCLVAVKAFGKNLKHVPKEIINAELCMASVQSEGENLKYVPKDFKDAEFCMAAVKLNGKNLKYVPEEFKSAEVCLNALIQACSNRIYGFYEIVKYIPKRFRNFDFRKRK

SEQ ID NO: 51701 - DNA, 348 bp, Unknown
  Obtained from environmental sample
  misc_feature (1)..(348): n is a, c, g, or t
ttgtcaacctcttcatccaaactttccgcgtctaattcggcggcttcaggtggttcttgctcgggttgtgccgtttcttcctctattgattcaatatcaccggcggaagagagatcgtcatccaagtccaactcggaatcaattgacaggtcatcaagtgaatcaaggttaaaatcgtcaccgtccagggaaggttccgacaattcgtcattaatgccttccgccgataattccggttcgtcaattaccgcatccgaaagatctatatcgccgccttcttcaagatacgagctgttttccggcgtttcggtaattgggataggagcgccttcttcgcggagtatttga

SEQ ID NO: 51702 - protein, 115 aa, Unknown
  Obtained from environmental sample
  SIGNAL (1)...(26)
  misc_feature (1)..(115): Xaa is any amino acid
MSTSSSKLSASNSAASGGSCSGCAVSSSIDSISPAEERSSSKSNSESIDRSSSESRLKSSPSREGSDNSSLMPSADNSGSSITASERSISPPSSRYELFSGVSVIGIGAPSSRSI

SEQ ID NO: 51703 - DNA, 570 bp, Unknown
  Obtained from environmental sample
  misc_feature (1)..(570): n is a, c, g, or t
gtggtagatcatgattttccaatcaaagaactgggaaaagtaacgccgtacggggtatatgacataggtagaaatgaagggtttgtcaatctgggaatttcctcagatacatcggaatttgcggtagaaagcatatcaaggtggtggttgacattagggaaaaacacttatccgaaagcaaaaaaaatctatatcaattgtgatggtggtggcagcaatgggagcagaaacaaacttttcaagttccaattgcagcaattagcgaaccagagcggccttgaaatccatatatcacatttcccacctggaacaagcaaatggaataaagtagaacacaggatgttctgctacattaccagccattggaagggtcaaccattaataagtgttgagacggttatacagttgattggcagcacaacaacaacgactgggttgaaaatcatttgtgtgaaagatgatactgtttataagattggcataaaagtcagtgatgaggatttcgcgacaataaatataaaaaatgtgaaaacactacccacttggaactatatcatctcccctttataa

SEQ ID NO: 51704 - protein, 189 aa, Unknown
  Obtained from environmental sample
  DOMAIN (1)...(189): Rhodopirellula transposase
  misc_feature (1)..(189): Xaa is any amino acid
MVDHDFPIKELGKVTPYGVYDIGRNEGFVNLGISSDTSEFAVESISRWWLTLGKNTYPKAKKIYINCDGGGSNGSRNKLFKFQLQQLANQSGLEIHISHFPPGTSKWNKVEHRMFCYITSHWKGQPLISVETVIQLIGSTTTTTGLKIICVKDDTVYKIGIKVSDEDFATINIKNVKTLPTWNYIISPL

SEQ ID NO: 51705 - DNA, 519 bp, Unknown
  Obtained from environmental sample
  misc_feature (1)..(519): n is a, c, g, or t
gtgtatgacgtattagaaaataaaatcaagcaaataatgccaattttaaacgaaaaacagttgagacaatacctgggaagtgaagcagaagtaataggccgaggtggaatagcaataatagcaagaataagcggcaaatcgagaaacacgattgtagccgggataaaggaaaacaggagtggaaggaatgccacagaaggaattcgcaaggccggtggtggcaggaagtcgatcaaggaaaaatatcctgatattaccagagagatcgaaaggatagtaagcgattcgacttttgggaatcctgaaaaccctctgtcctatacgacaaaaagtacaaggaagatacagcagatattgaacgagaaaaaatatgaaattggatacgatgtgattgcaaacatactgaaagaactgggatacagcttgcagttgaatcagaagatgctacaagtcgggaaagagcatccggacagggatatgcagtttcagttcatcaataataaagcgaaaaggttttaa

SEQ ID NO: 51706 - protein, 172 aa, Unknown
  Obtained from environmental sample
  misc_feature (1)..(172): Xaa is any amino acid
MYDVLENKIKQIMPILNEKQLRQYLGSEAEVIGRGGIAIIARISGKSRNTIVAGIKENRSGRNATEGIRKAGGGRKSIKEKYPDITREIERIVSDSTFGNPENPLSYTTKSTRKIQQILNEKKYEIGYDVIANILKELGYSLQLNQKMLQVGKEHPDRDMQFQFINNKAKRF

SEQ ID NO: 51707 - DNA, 912 bp, Unknown
  Obtained from environmental sample
  misc_feature (1)..(912): n is a, c, g, or t
ttgataagtgcacgtccagcaggcagtggggatgttacagaatttgagtttaagggacaagtttatacgccagggagaggtacttttaaaacaaatcaaaatggattaataaatttagtaaaagtaaatcgtttaattccatctggcaatacattgcgttatataagattttttgatgattttccatataatgagtataccaatctttgggaagatacttatggtgcgtcagatatgaagtatgttgttgaaacatcaacttatgtcatccaacgctgtctcctcatgaccaccgaccccggcgatctagtgcttgatatcacctgcggaagcggaaccaccgcctacgttgccgaacaatggggacgccgctgggtaacctgcgacacttcccgcattgccatcaccctttcaaaaaaacgcctgatgaccgcaacatttgattattacaaactggcgtacccggaacagggagtatcaagcggctttgtgtataaaacagtcccgcacatcacgctcaaatctatagcgaataacgaaccgcccgaacaggaaacgctctacgatcagccggaaatagaaaaaagaaaagtccgcatttcaggaccctttaccgtagaagcccttcccgctccggtagtaaaaccactcgacgatgatactcaccccgctccgtttttccatgaaaacgccgctaaaaaacaatccgactggatgcaggaattaaaagcgtcaggcatattgnggcggcagggagaaaaaattcaattctccagagtagaaccattggaaggaacaaaatttctccacgcggagccgagacaaagaaacagacagaaaaaaagccgtcatttgttttgcgggcgaaacccgccctctcgatattcgcatggttacccaagcgctgaatga

SEQ ID NO: 51708 - protein, 303 aa, Unknown
  Obtained from environmental sample
  misc_feature (1)..(303): Xaa is any amino acid
MISARPAGSGDVTEFEFKGQVYTPGRGTFKTNQNGLINLVKVNRLIPSGNTLRYIRFFDDFPYNEYTNLWEDTYGASDMKYVVETSTYVIQRCLLMTTDPGDLVLDITCGSGTTAYVAEQWGRRWVTCDTSRIAITLSKKRLMTATFDYYKLAYPEQGVSSGFVYKTVPHITLKSIANNEPPEQETLYDQPEIEKRKVRISGPFTVEALPAPVVKPLDDDTHPAPFFHENAAKKQSDWMQELKASGILXRQGEKIQFSRVEPLEGTKFLHAEPRQRNRQKKSRHLFCGRNPPSRYSHGYPSAE

SEQ ID NO: 51709 - DNA, 609 bp, Unknown
  Obtained from environmental sample
  misc_feature (1)..(609): n is a, c, g, or t
atggttacccaagcgctgaatgaagcggaaaccataagaccgaaaccagtttatatcgttttcgccgctttccaatttgacccaacggcggcaaaacatattgacgatactaaatggcccggggttacattgttaaaagtacaaatgaaccccgaccttatgaccgccgacctcaaaaagaaatcatcctcaagccaaagtttctggcttgtcggacaacccgatgtagagcttatccatatcgaaaagggagccgacaaaggcaagtataaaatcaaagtaaaaggctttgactattacgatataaaacaaggaatagtaaattcaggcggaaccgataaaatcgccatgtggatgcttgataccgattatgacggtatgtccatagaacccaaacaggtatttttcccaatggaaggaaaaaacgaaggttgggataaactggcaaaaactctaaaagcggaaatcaaccctgaccttatagaaaaatacagaggtactgaatccctgccatttacaattaaagataacacccaaattgccgtcaagatagttgatgataggggaattgaaagccttaaagtaatttcggtaggcgcaaatggctga

SEQ ID NO: 51710 - protein, 202 aa, Unknown
  Obtained from environmental sample
  misc_feature (1)..(202): Xaa is any amino acid
MVTQALNEAETIRPKPVYIVFAAFQFDPTAAKHIDDTKWPGVTLLKVQMNPDLMTADLKKKSSSSQSFWLVGQPDVELIHIEKGADKGKYKIKVKGFDYYDIKQGIVNSGGTDKIAMWMLDTDYDGMSIEPKQVFFPMEGKNEGWDKLAKTLKAEINPDLIEKYRGTESLPFTIKDNTQIAVKIVDDRGIESLKVISVGANG

SEQ ID NO: 51711 - DNA, 1035 bp, Unknown
  Obtained from environmental sample
  misc_feature (1)..(1035): n is a, c, g, or t
atggctgaaataatcccagcagaagacacagtttatcaaagtatccgtactgttcttgccgccgcacggcaaaaggtgtataccgcagtaaattctgctatggtcgaagcctattgggatatagggcggcaaatcatggaagctcaggaagggcaacgggctgaatatggcacgggtttaattaaatatctggcggaacgactatcaaaggaattcgggaaaggttttgatgaaagcagcctacggcggatgcgccagttttttcaggttttcccaattcgtgccgcagtgcggcacgaattaagctggacacattaccgccttttaatgaaggttggaaataaggttgaacgtgaattttaccttaatgaatgtatcgaatgtaactggagttcccgtcagcttgaacgtcaaattacgactttttattacaaacggctccttgccaccagaaaagaaggcaaagaatcggtaaaaaatgaaattcaagaaactgaaccgaaaacagaccccgacttcatattaaaagacccctatattctggagttccttgacctgaaagaaaacaaagattaccacgagatcgagcttgaacaagctcttatagacaaattacaggaattccttttggagttaggcaaaggtttttcatttgtagcgcgccaaaaacgtataactattgaaggggatcattattatgttgatctggttttttacaattatctcttaaaatgctttattataattgatttgaaaaccggaaagctgtcatatcaggatattgggcagatagatttttatgtccgctattttgacgatcaaatcaagcttccgggagataatcctacattgggcatcattctatgtgccgataaaaatgaaactatggcaaaatattctgtcctttctgataaagacaatctttatgcatcaaaatatatggattatcctcccacggaagaagaactgaaacgagagctggaacgcgagcgggctattatcgaaagcaagcttaaggaagacaataatggctaa

SEQ ID NO: 51712 - protein, 344 aa, Unknown
  Obtained from environmental sample
  DOMAIN (11)...(330): Protein of unknown function (DUF1016)
  misc_feature (1)..(344): Xaa is any amino acid
MAEIIPAEDTVYQSIRTVLAAARQKVYTAVNSAMVEAYWDIGRQIMEAQEGQRAEYGTGLIKYLAERLSKEFGKGFDESSLRRMRQFFQVFPIRAAVRHELSWTHYRLLMKVGNKVEREFYLNECIECNWSSRQLERQITTFYYKRLLATRKEGKESVKNEIQETEPKTDPDFILKDPYILEFLDLKENKDYHEIELEQALIDKLQEFLLELGKGFSFVARQKRITIEGDHYYVDLVFYNYLLKCFIIIDLKTGKLSYQDIGQIDFYVRYFDDQIKLPGDNPTLGIILCADKNETMAKYSVLSDKDNLYASKYMDYPPTEEELKRELERERAIIESKLKEDNNG

SEQ ID NO: 51713 - DNA, 582 bp, Unknown
  Obtained from environmental sample
  misc_feature (1)..(582): n is a, c, g, or t
ttggtgaaggtgcatgattttatcgataaagaactcggcaaagcgacgccgtacggcgtttacgatttgaagcagaatgtcggctgggtaaatgttggcattgaccatgacacggcagagtttgccgtagaatcgattcgtcgttggtggaaacatttagggcaggaactgtataagaacgcgaaacatctttatattaccgcagattcaggcgggagcaatgggaaccgcaatcgtttgtggaggtattgtttacaggaattttcagatgagagcggcttaacgattcatgtcagtcattttccgcctggtacgagcaaatggaataagatcgaacatcggctgtttaatcacatttcaatgaactggaaaggacagccgcttataagcatggaagtaatcatcaatttgattggacataccaccagccaaacaggtttaaaagtgtatgctatggaggaccggaacaaatatcctacaaagcgtaaaatctccgatgaagaaatgaaaaacttgaatatttcccagtatgaggttcttggaaaatggaactataaaatattgccaaaaaaattatcataa

SEQ ID NO: 51714 - protein, 193 aa, Unknown
  Obtained from environmental sample
  DOMAIN (1)...(190): Rhodopirellula transposase
  misc_feature (1)..(193): Xaa is any amino acid
MVKVHDFIDKELGKATPYGVYDLKQNVGWVNVGIDHDTAEFAVESIRRWWKHLGQELYKNAKHLYITADSGGSNGNRNRLWRYCLQEFSDESGLTIHVSHFPPGTSKWNKIEHRLFNHISMNWKGQPLISMEVIINLIGHTTSQTGLKVYAMEDRNKYPTKRKISDEEMKNLNISQYEVLGKWNYKILPKKLS

SEQ ID NO: 51715 - DNA, 822 bp, Unknown
  Obtained from environmental sample
  misc_feature (1)..(822): n is a, c, g, or t
atgcgggatatacaggattttgactcgataatgattcggctggcttccccggagatgatcaggaactggtcatatggggaagtaaaaaaaccggaaaccataaactaccggacgcttcgtccggaaaaagacggcctcttctgcgaaaggattttcgggacgacaaaggaatgggagtgttattgcggtaaattcaagtcgatacgttacaaaggggttacctgcgaccgctgcggcgtcgaggttacccactttaaggtgcgcagggaacgcatgggccacatagaactggcggccccggtttcgcatatatggtattaccgctcggttcccagccgcatggggttgctccttgatatgacaatgactgccctccgttccgtgctgtactatgaaaaatatgttgtcattgaccccgccgacaccgagttgaaaaaagggcagatgctctccgaagacgaatactttgaggaacaggaaaggtacggcggcggttttaccgcaggcatgggagccgaggcgatccgcaccctgcttgaaaacgtcgatctggacaagctggccgcagagttacgggaaaagatgatagaaaaaggcgcaaagagcgacaagcgcctcctgaagcgcattgagattgtcgagaatttccgtaattcccagaacaagcccgaatggatgatacttgacgtgatcccggtgataccgccggagttacgccccatggttcagcttgacggcgggcgttttgccaccagcgatcttaacgatctgtaccgccgcgtgatcaaccggaacaaccgcctaaaaggctgcaaggtctaa

SEQ ID NO: 51716 - protein, 273 aa, Unknown
  Obtained from environmental sample
  DOMAIN (4)...(273): RNA polymerase Rpb1, domain 1
  misc_feature (1)..(273): Xaa is any amino acid
MRDIQDFDSIMIRLASPEMIRNWSYGEVKKPETINYRTLRPEKDGLFCERIFGTTKEWECYCGKFKSIRYKGVTCDRCGVEVTHFKVRRERMGHIELAAPVSHIWYYRSVPSRMGLLLDMTMTALRSVLYYEKYVVIDPADTELKKGQMLSEDEYFEEQERYGGGFTAGMGAEAIRTLLENVDLDKLAAELREKMIEKGAKSDKRLLKRIEIVENFRNSQNKPEWMILDVIPVIPPELRPMVQLDGGRFATSDLNDLYRRVINRNNRLKGCKV

SEQ ID NO: 51717 - DNA, 2214 bp, Unknown
  Obtained from environmental sample
  misc_feature (1)..(2214): n is a, c, g, or t
atgcatcagatcggccgaggtagtatatgcgctgctggagaatattctgggggacgcaaaagtttttgcgctattggcaatgagttagcgtttatcagggagggggacaaaatcagcgcggcaaaaatcatcgactcggaacaaataatagcatccctttgcgaaggcggctctgtcgcggaacttcttccctcctacgagccgcgcaaatctcagcttgacttgcttgccctgattatccgcgcttttaacgaggacgcgcttgttatggcggaagcgggaaccggcgtaggcaagtcattcgcctaccttcttcccgccatgcgttttgcgcttgaaaacaaggaaaaagttgttatctccaccgctactatcacactgcagcagcagttatttgaaaaggatatccctcttgtcgcttcaagtatgggagatgtaaaaatcaaatcagtcattatgaaaggaaggggcaattatctatgcctgcgaaggcttaacgacacattacgcgaaggtttgctttttgagttcgataaaaaagaaattgacagtattgtggaatggtcgcataacacaaaaacaggggtgaaatcggaactttcatttatgccttcagaaactttatgggctggcgtatgctccgaatccgatttatgtttggggaatcactgcccctggagagaacagtgttttatatttgccctgcgcaaagaggcaaataacgcgcacattatcgttgtaaatcatcatctgctctttgccgacttggcggcgaggtatcagggcgcgggttatgaaaacgcggtggttctgccgcccttcaaccgacttgtaatagacgaagcgcacacgattgaaaacgcggctacttcattcttttcgcaggagttttcaagaacaggtattttccgccagcttacaaggctctacaatacacgcaaggcaaacatacacggcttgctggtaagactctgcgctatgctgccttcaagcgaagaccgattagacgatatggctgacgctatccaaaaaatacgcgtatcggttgaaagcttggataattgcgctttagagatatgcggcatagaggggattttcaggctctccccttccgtagatgaatcatttctaaaaaaatctttattcccgaattttaaggacctacgaaaagatattctcggttttacaaacatgatccgcgatattttggaaaatcttgacgatgaacaaacggctgaccctgttgtctgggaaattaaaactattgtaaggcggctggacggcgttgctgaaatctgcgatgttttttgcaaatataaaaaacacgaggacaatgttttatggatagaaaaattaaacctaaaaaataatccctgggctgtctttacaaaaacacctctggagttagctcccattctgaaagacagcgtattctcgccgaacaaaaccgtggtttgcgtatccgcgactctggcgattaacgatgattttactttctgggcaagccgctgcggcatcgacagtatcaatacccgccagccgctatcgggctgtttcccctctccattcccctactcaagcgcggttctccttgcctctcccacagacgcccctctccccgacgaagaagggtatcaggaatttgttaacaaggctgtggcaaaacttgccgccgtcgcgggaggctccgcccttgtgctgttcacttcctaccagtccttaacaggcagttataacgcagccgtaacggaacttacccccatgggcatacgttgtctgaaacaaggcgatgacgaccgcacccgcctgttacaagctttcttatccgatgaaagctcttgcctgtttgccaccgactcgttttgggagggggtagacgctccgggcgacaccctgcggctggtcattatctgccgcctgcccttcaggacccccagcgatccggtttttgaggcacgccgtgaagcggtggaaaaaaacggaggcaatcccttcatggatctttctcttccggaagcggtaatgaaattcaagcagggctttggccgcctgatgcgccgttccagcgaccggggcgtggtcgcggtgctggacggccgaattctgaaaaagcgttacgggatttttttccgtgagtccctcccggaaacgcttaccagcttcggcagttttgaagggatattacgcgataccgagaatttcctgtatccctag

SEQ ID NO: 51718 - protein, 737 aa, Unknown
  Obtained from environmental sample
  misc_feature (1)..(737): Xaa is any amino acid
MHQIGRGSICAAGEYSGGRKSFCAIGNELAFIREGDKISAAKIIDSEQIIASLCEGGSVAELLPSYEPRKSQLDLLALIIRAFNEDALVMAEAGTGVGKSFAYLLPAMRFALENKEKVVISTATITLQQQLFEKDIPLVASSMGDVKIKSVIMKGRGNYLCLRRLNDTLREGLLFEFDKKEIDSIVEWSHNTKTGVKSELSFMPSETLWAGVCSESDLCLGNHCPWREQCFIFALRKEANNAHIIVVNHHLLFADLAARYQGAGYENAVVLPPFNRLVIDEAHTIENAATSFFSQEFSRTGIFRQLTRLYNTRKANIHGLLVRLCAMLPSSEDRLDDMADAIQKIRVSVESLDNCALEICGIEGIFRLSPSVDESFLKKSLFPNFKDLRKDILGFTNMIRDILENLDDEQTADPVVWEIKTIVRRLDGVAEICDVFCKYKKHEDNVLWIEKLNLKNNPWAVFTKTPLELAPILKDSVFSPNKTVVCVSATLAINDDFTFWASRCGIDSINTRQPLSGCFPSPFPYSSAVLLASPTDAPLPDEEGYQEFVNKAVAKLAAVAGGSALVLFTSYQSLTGSYNAAVTELTPMGIRCLKQGDDDRTRLLQAFLSDESSCLFATDSFWEGVDAPGDTLRLVIICRLPFRTPSDPVFEARREAVEKNGGNPFMDLSLPEAVMKFKQGFGRLMRRSSDRGVVAVLDGRILKKRYGIFFRESLPETLTSFGSFEGILRDTENFLYP

SEQ ID NO: 51719 - DNA, 372 bp, Unknown
  Obtained from environmental sample
  misc_feature (1)..(372): n is a, c, g, or t
atggtctccatcagtactctctcagaagaagaggatatctcttccctgtttctggaacagatctttttcaagctaaaaaaagcggggatagttaaatcgatacgggggcccggcggcggatttttattcaaccgcccgcttgattccataaatgtcaaggaagtacttgaggcggcgggggaggaattgacagtgctgccctgtgacaggcagacaaccggatgcgacaggataagcgagtgtattacccataaagttattatctcagtaacaaataaagttaacgattatttagaaagcataacattaaagacgctgctggaaagcccggaatggaagaccagggatcggggactggggatcagggactag

SEQ ID NO: 51720 - protein, 123 aa, Unknown
  Obtained from environmental sample
  DOMAIN (1)...(98): Transcriptional regulator
  misc_feature (1)..(123): Xaa is any amino acid
MVSISTLSEEEDISSLFLEQIFFKLKKAGIVKSIRGPGGGFLFNRPLDSINVKEVLEAAGEELTVLPCDRQTTGCDRISECITHKVIISVTNKVNDYLESITLKTLLESPEWKTRDRGLGIRD

SEQ ID NO: 51721 - DNA, 993 bp, Unknown
  Obtained from environmental sample
  misc_feature (1)..(993): n is a, c, g, or t
ttggaaagcgaccgctatctgacggtaacccttacgggaattatttttatttttggttacaacgccctttcggctatactccggggcatgggcaattccaggcagcccctttattttgtcctggccgcctgcattaccaacatagttctggatcttatctttgtagcggtttttcgctgggacgcctttggcgctgcgttggccactgttatgtcccaggccttgagcgtttttctctgcatcgcttatatgaagaaaaacaatttccagtttgattttcgcctgcgttcttttaaaatatacggggaacagctaaagcttattttcaagattgggcttcctacctgcgttcaaaacagcgttaccagcatatcgtttgcgtttatccagacaattattaatatcgtgggcggggtgagcgcctccgccggcgtgggggcggtatcgaagtttaacagttttgcctttatgcctacccaggcgatgagcgcgtccgtttccgccatggccgcgcaaaacttcggcgcggggaaagtcgacagggcggcggcagcctgcaggatcggggttattttttcggtctgtgtatgcgccggatttttcgcacttgttatgatctttccggaatcggttctcaggatttttggaaacgaccccaggatgatccatgacggggttacttatcttcgttcttttgcctatgactttctgcttattccttttatattctgcatcaatggttttttaatgggaggcgggcataccttctttacgcttgtcactaatgtattatcttcgatcctccttagggtgcctgtgtgctattttctcatcataacgctaggttggggccttaaagggctaggttttggcgcgccctctgcaagcaccagaactcttttggcaatcatcatttacctttttaccgggaagtggaaacaccatgttattcatcatactccccctgactatagccagagtcatgcaatatga

SEQ ID NO: 51722 - protein, 330 aa, Unknown
  Obtained from environmental sample
  DOMAIN (114)...(276): MatE
  misc_feature (1)..(330): Xaa is any amino acid
MESDRYLTVTLTGIIFIFGYNALSAILRGMGNSRQPLYFVLAACITNIVLDLIFVAVFRWDAFGAALATVMSQALSVFLCIAYMKKNNFQFDFRLRSFKIYGEQLKLIFKIGLPTCVQNSVTSISFAFIQTIINIVGGVSASAGVGAVSKFNSFAFMPTQAMSASVSAMAAQNFGAGKVDRAAAACRIGVIFSVCVCAGFFALVMIFPESVLRIFGNDPRMIHDGVTYLRSFAYDFLLIPFIFCINGFLMGGGHTFFTLVTNVLSSILLRVPVCYFLIITLGWGLKGLGFGAPSASTRTLLAIIIYLFTGKWKHHVIHHTPPDYSQSHAI

SEQ ID NO: 51723 - DNA, 768 bp, Unknown
  Obtained from environmental sample
  misc_feature (1)..(768): n is a, c, g, or t
atgacaataaaatacataaacggtcggcagcttccggcaacgacgccttttactgtacggggcatagtgtcatgcggctacaacgaactggacgctttatggtgcataatcagctatgaaggcggaaaacgcgccctgtctntggaacaatcttcgtccagcctgattgtcaagatcgacaatccttataaaaacgcggatgatttctcgtgggaactgtataattatttgggattcggttacagcgtatactcatggaaggaacttctgcgctctcagtacagttcttatgaatccacccgccagatgcttttattcatcatggcgctgatagtgattgtagcggcggttaacgtttcttcttccacaagcatgcttgcccttgaaaggaacagggacatcgccatcttaaaagtttccggcgcggacataaaaggcattacgaatatttttttattcggcagctttctaaccggcgttacaggcgccgtcatcggcatttcgattggtttgataatgggtgttaacatcaattcactgttccgcggcttggaaaaagttttaagctttatttcaaacctgttccggggaggcgacgtaaaaatactcgatccgggtttttaccttgaaacaatccccatcatagtagataagaccgctgtcctattaatcggccttttcgccgtcctctgctctgttgccgcgtcatggatccccgcccgccgcgccggaaaattaaaacccatggatttgttaagaaaacattga

SEQ ID NO: 51724 - protein, 255 aa, Unknown
  Obtained from environmental sample
  DOMAIN (52)...(248): Predicted permease
  misc_feature (1)..(255): Xaa is any amino acid
MTIKYINGRQLPATTPFTVRGIVSCGYNELDALWCIISYEGGKRALSXEQSSSSLIVKIDNPYKNADDFSWELYNYLGFGYSVYSWKELLRSQYSSYESTRQMLLFIMALIVIVAAVNVSSSTSMLALERNRDIAILKVSGADIKGITNIFLFGSFLTGVTGAVIGISIGLIMGVNINSLFRGLEKVLSFISNLFRGGDVKILDPGFYLETIPIIVDKTAVLLIGLFAVLCSVAASWIPARRAGKLKPMDLLRKH

SEQ ID NO: 51725 - DNA, 765 bp, Unknown
  Obtained from environmental sample
  misc_feature (1)..(765): n is a, c, g, or t
gtggttaaattctttctgaaattgtataataaaaaccctatgaaacgaaaggcgttgattctctgcggcggatgggaagggcacgaacctcaagcagtcgccggacggtttaagggattccttgaaagcgaaaattttgaagtttcaatcgcggataatatttctgtcctggaagacaaagatcggttaatgaaactggacctgtttattccgatgtggaccaactatggcgatgtacctcaattcttttttgagccattgcttgaagcggcgggttcaggcatgggggtagccggctgtcacggaggaatgtgcgacactttcagaaacaatgtcgcgtggcagtttctgaccggggcaaactgggtgtgccatcccggctgcgacggggttccctaccggattaatatcaaaagcaagtccaaccccatcactgaagggttaactgattttgacgttgtatcggaacagtactaccttcatgtagaccccgccaatgaagttctggcgaccacccgcttccctgtggtcaaatggtatcattccgccaacggcgaggttgatatgccgcaggtgtggacgaaaaaatgggggcatggccgcgtgttttataacgcgctgggccaccgtaacgatatttttgatattccaccggtctgggaaatcatgaagcggggaatgttatgggcggcggacggcaagcgtgtcgccgtggaaaacggcctttccgcggatgagttcaaaagcaataagggaatgtattag

SEQ ID NO: 51726 - protein, 254 aa, Unknown
  Obtained from environmental sample
  misc_feature (1)..(254): Xaa is any amino acid
MVKFFLKLYNKNPMKRKALILCGGWEGHEPQAVAGRFKGFLESENFEVSIADNISVLEDKDRLMKLDLFIPMWTNYGDVPQFFFEPLLEAAGSGMGVAGCHGGMCDTFRNNVAWQFLTGANWVCHPGCDGVPYRINIKSKSNPITEGLTDFDVVSEQYYLHVDPANEVLATTRFPVVKWYHSANGEVDMPQVWTKKWGHGRVFYNALGHRNDIFDIPPVWEIMKRGMLWAADGKRVAVENGLSADEFKSNKGMY

SEQ ID NO: 51727 - DNA, 876 bp, Unknown
  Obtained from environmental sample
  misc_feature (1)..(876): n is a, c, g, or t
ttggatgcggggaaaaatcgagcaggaaccgccgtacagtcnnttatcttccgaagaaacattttaccggataccgatgaaagaaccgcgcaaggcgccgcgcaaggcgctcaggatgaactttcggcggaagccgaagtctccgatacgcaggacaatgccggtaaaataataaccggtgttcaggtatcgcattccctgagcgaactcagcgcccttatgccggcattgggggtaagcattggcgagattaacccggttaattatcaaaaagccgatcctgcggttttgcggcagatgggcatggaaccgtaccttatatcttttatcatggcggaaagacagtaccgcgagggtaattaccgggaggctcttgccgaatacaaccgctcaatcgccctgaagcccgataatgccgatgtgctggaaggccggggcaacgcatggctgaaaaccggcgatacgggccgcgccattgaagattacacccgcgccattaatctaaaaaccaacaaagctgaactgtacaattaccggggatttgtttacgccggacgcggcgagacagaaaaagccattgcggattttactcaggcgctgcgccttaagcccggctacgccgacgctctggcaaaccgttcccgcgcgtattatcagtcaggcgattacagtaaggccatagatgactgtactcagcttatcgcccttgaaccggaaaatttcgcggcatggaacaggcggggcagttcatggtacgcgcagcgggatgacaaccgcgccatcgcggatttttccaaagcaattaccattaaacccgattttgccctcgccctgcataaccgtgataccgtcctgcaatcgcttggcaacaactaa

SEQ ID NO: 51728 - protein, 291 aa, Unknown
  Obtained from environmental sample
  DOMAIN (139)...(172): Tetratricopeptide repeat
  misc_feature (1)..(291): Xaa is any amino acid
MDAGKNRAGTAVQSXIFRRNILPDTDERTAQGAAQGAQDELSAEAEVSDTQDNAGKIITGVQVSHSLSELSALMPALGVSIGEINPVNYQKADPAVLRQMGMEPYLISFIMAERQYREGNYREALAEYNRSIALKPDNADVLEGRGNAWLKTGDTGRAIEDYTRAINLKTNKAELYNYRGFVYAGRGETEKAIADFTQALRLKPGYADALANRSRAYYQSGDYSKAIDDCTQLIALEPENFAAWNRRGSSWYAQRDDNRAIADFSKAITIKPDFALALHNRDTVLQSLGNN

SEQ ID NO: 51729 - DNA, 984 bp, Unknown
  Obtained from environmental sample
  misc_feature (1)..(984): n is a, c, g, or t
atgttcagaattaccgtttcccgctaccctcagcggccctgctttaccatttacgagcctgaccgtatcagcctgaattacaccgaagccctgcggcgcgttgaagcccttgcccgctggctgcacagcaaaggcatacgcaaaggcgaccgccttgcggtaaccggaaaaaacagtcccgaatgggcggtggcctatttgggaattcttttcgcgggggccatcgttgtccccattgattaccagcttaaaacggaagaaattgatctcctgataaaaaccgccgaagcgaaaatactttttgtcgatgaggaaaaacacgaccgctacgcgcaatcacccggcgcattaaccgcggttatctccctcaaaaaaggaataggaacatatatttacgatttagacgggccgcaggcggatattgagcaagccgccgaaacagacattgcggcaattttgtttacatcgggaaccatggggcatcccaagggggttgtgctcacccaccggaatatcgtctctgactgctatctggcccagggaactcccctccttatttattatactgatgtgttttacgcaatccttcccctccaccattcctacaccatgctggcggtttttattgagactattggagtcggggcggaagtggtttttggcaaacgcatggtaaccagtcagatgctcaaggaaatgaaagaggggaaagttaccatgctgctgggcgtgcccatgttgttcaacaaagttttaaccggaatccttcggggagtaaaagaaaaaggccccgtcgtctacggactgatttcatttttaatgggcatttcagggctcataaaaaaagtattcaggataaatcccggcaagaaaatgttcggcttcattttgaaaaaagccagcttaaaatcaaacagaatctgcatttgcggcggcggcccgctcgctcccagcgttttcgaaagtacaaccagcttggaatag

SEQ ID NO: 51730 - protein, 327 aa, Unknown
  Obtained from environmental sample
  DOMAIN (26)...(324): AMP-binding enzyme
  misc_feature (1)..(327): Xaa is any amino acid
MFRITVSRYPQRPCFTIYEPDRISLNYTEALRRVEALARWLHSKGIRKGDRLAVTGKNSPEWAVAYLGILFAGAIVVPIDYQLKTEEIDLLIKTAEAKILFVDEEKHDRYAQSPGALTAVISLKKGIGTYIYDLDGPQADIEQAAETDIAAILFTSGTMGHPKGVVLTHRNIVSDCYLAQGTPLLIYYTDVFYAILPLHHSYTMLAVFIETIGVGAEVVFGKRMVTSQMLKEMKEGKVTMLLGVPMLFNKVLTGILRGVKEKGPVVYGLISFLMGISGLIKKVFRINPGKKMFGFILKKASLKSNRICICGGGPLAPSVFESTTSLE

SEQ ID NO: 51731 - DNA, 696 bp, Unknown
  Obtained from environmental sample
  misc_feature (1)..(696): n is a, c, g, or t
ttgcggcggcggcccgctcgctcccagcgttttcgaaagtacaaccagcttggaatagactttgtgcaggggtacgggcttacggaaacttccccgattataacgattaatcccgttgaacagtacaaggaaaccagcgtaggccgcacctgcccgcgtgtagacatgaaaatactcgacgcggacgaacgcggaataggagaggttatcgtaaggggccctatggtaatgaaaggttattacaatctgccggaagagacagccgcggcgtttacgtccgacggatacctgaaaaccggcgatttggggtacatggacagcgaaaattatctttaccttacagggcgcgccaagaacatgattgttaccgaaggcggaaagaacgtatatccggaagaaatcgaaaacgaattccagcttttcgacgagattgaacaggtattaattcgaggttatgtgcttgacgctaaaatgaagagcgaaggcatagaagcccttatatatccaaacccggaatttaaaaatgaagccggtaataagccgtccgcggaagaaactaaaaacaggatcaacgcgataattgccgaagtaaatttaaggctattgccttatcaaaaaatcggcagaattgaaattctggaaaatcctttggagatgacgacgacaaagaagataaaacgcggagaaaacaggtaa

SEQ ID NO: 51732 - protein, 231 aa, Unknown
  Obtained from environmental sample
  misc_feature (1)..(231): Xaa is any amino acid
MRRRPARSQRFRKYNQLGIDFVQGYGLTETSPIITINPVEQYKETSVGRTCPRVDMKILDADERGIGEVIVRGPMVMKGYYNLPEETAAAFTSDGYLKTGDLGYMDSENYLYLTGRAKNMIVTEGGKNVYPEEIENEFQLFDEIEQVLIRGYVLDAKMKSEGIEALIYPNPEFKNEAGNKPSAEETKNRINAIIAEVNLRLLPYQKIGRIEILENPLEMTTTKKIKRGENR

SEQ ID NO: 51733 - DNA, 618 bp, Unknown
  Obtained from environmental sample
  misc_feature (1)..(618): n is a, c, g, or t
gtgatcagatcggccgagtgtttccagtcttggagacccattcaaatatccagaaaccgcgttatccgcgacatgatacagaccgacgcctcaataaaccccggcaattcaggcggccctcttcttgacacgcagggcaggatgataggcattaacacgatgatcatttccccgtccggcggctctgtcggagtgggctttgccattcccgtaaataccgccatgcgcgtcgttcgtgaactaatccaatacggcaaagtccgccgcggctggatagacgcgacagtagtgcaaatttttccaagcctggtccgttatgcgaaactgcctgtagaatcgggcctgattgtttcccgtacagtgcgcggaggtcttagcgaaaaagcgggattaaggcagggcaacgacgccgtgcaatacggacgcagtataatttatataggcggcgacattatcacagccgtaaacggaataaagataaacacctttgccgacctttacacgtcgcttgaagcctccaagcccggcgatgtagttaaagtggaaattatccgcggcgggcagacaagcacgttgaatattaccctggcggacagagaagaggtaatgagggaatag

SEQ ID NO: 51734 - protein, 205 aa, Unknown
  Obtained from environmental sample
  misc_feature (1)..(205): Xaa is any amino acid
MIRSAECFQSWRPIQISRNRVIRDMIQTDASINPGNSGGPLLDTQGRMIGINTMIISPSGGSVGVGFAIPVNTAMRVVRELIQYGKVRRGWIDATVVQIFPSLVRYAKLPVESGLIVSRTVRGGLSEKAGLRQGNDAVQYGRSIIYIGGDIITAVNGIKINTFADLYTSLEASKPGDVVKVEIIRGGQTSTLNITLADREEVMRE

SEQ ID NO: 51735 - DNA, 1329 bp, Unknown
  Obtained from environmental sample
  misc_feature (1)..(1329): n is a, c, g, or t
ttgacaatgaaaattatttttagcaaagaattcgattcctattggaagaacgagacaaaacgctccgaagataccaagactgaaaaagcggtcaaaaagataatcgcggaagtacgcgcaaaaggagacgttgctgtcagaaaattcgcgtccaaattcgataaatcttcgccgcagcggcttgaagttcctctttctgaagcgcagcgcgcccttgaacagttacgcgcaaacgacgccgctcttgtggatgcgcttgagcttgcggcaaggcacataaaacgctttgcggaaaaacagagagagcaattcgccgattttgaatttgcaatggaaccggggctgttaaccggccagcgggtaattcctgttaccaaggcggcaatttacgttcccggcggacgtttcccattgttttcctctgttcttatgtgcatgattcccgctttgtgcgccggtgtggaagaagtgatactgtcatctccgccaacacaggacggtctgcccgaccggaaaattcttgccgccgccatgatagcgtctaaaattgcgaataacaacaatatccgtattttttccattggcggcgctcaggcaatcgccgcccttgcgctggggacggaatcagttccccgtgttgatgttatcgcgggacccggcaataaatttgtcgccgctgccaaacggcaactgttcggcgaagtggggatagattttatcgctggtcccaccgatgtgctggtaatcgctgacggacagacagatggcaatattgaaaaaacagccgatcttgtcgccgcggatatgctggggcaggcggagcatgacccggatgcccgttcacggacgctggttcccaacagggaacttgccgaaaaaattcttattgctattgaacggcgtataaaattattgccaacggaaaaaaccgcccgtgcttctttggatgcaggcggtcttattatcatctatgagacaccggaagaggcgatccgtatcgccaacgtcatcgcgccggaacatcttgagcttcaaaccgccgatgcggataactggattccccggttaaaaaattacggctcgctttttatcggcagtctttgcgccgaagttcttggcgattattcggcgggaataaaccacaccttgcccacgtcaaccagcgcccgttttaccggcggtctgtctgtccgccactttcttaaaacagttaccaccctgcgctgcgcctcaggcgaaggttttgaaaaagcgcgtaatgcggcggaaatacttgcccgcgccgaagggctggaaggccacgctcagagcgcggcggcgcgaaaatag

SEQ ID NO: 51736 - protein, 442 aa, Unknown
  Obtained from environmental sample
  DOMAIN (15)...(442): Histidinol dehydrogenase
  misc_feature (1)..(442): Xaa is any amino acid
MTMKIIFSKEFDSYWKNETKRSEDTKTEKAVKKIIAEVRAKGDVAVRKFASKFDKSSPQRLEVPLSEAQRALEQLRANDAALVDALELAARHIKRFAEKQREQFADFEFAMEPGLLTGQRVIPVTKAAIYVPGGRFPLFSSVLMCMIPALCAGVEEVILSSPPTQDGLPDRKILAAAMIASKIANNNNIRIFSIGGAQAIAALALGTESVPRVDVIAGPGNKFVAAAKRQLFGEVGIDFIAGPTDVLVIADGQTDGNIEKTADLVAADMLGQAEHDPDARSRTLVPNRELAEKILIAIERRIKLLPTEKTARASLDAGGLIIIYETPEEAIRIANVIAPEHLELQTADADNWIPRLKNYGSLFIGSLCAEVLGDYSAGINHTLPTSTSARFTGGLSVRHFLKTVTTLRCASGEGFEKARNAAEILARAEGLEGHAQSAAARK

SEQ ID NO: 51737 - DNA, 519 bp, Unknown
  Obtained from environmental sample
  misc_feature (1)..(519): n is a, c, g, or t
atgcagacagaacttaaattgagcggttcaggcggccaggggcttatactggcgggcgtaattctggccgaatccgccttgctcgacggcaagcaggtgattcagtcccagtcctacggcccggaagcaaggggcggttcaagcaaagccgaggtcataataagcgacggcgagattgatttcataaaggttcagaaatgcgatatgctcctgtgcctgacccaggacgcctacgacaagtacggcaaggattatacccgagtccttattctggatgaaagaataaccatgaagtacccagagccggaaaaagtgttaaggctccccatcctggacactgcctcggaaaaaatgcgcaagcccatggttgccaacataattgcccttggtgcgattaacggctatctcaaccttgtcagcaaagagtcacttacaaagtcagttctggacagcgtgcccagagggaccgaggagctgaacaagcaggcgcttgagtcggggtatggactggttgggtag

SEQ ID NO: 51738 - protein, 172 aa, Unknown
  Obtained from environmental sample
  DOMAIN (11)...(169): Pyruvate ferredoxin/flavodoxin oxidoreductase
  misc_feature (1)..(172): Xaa is any amino acid
MQTELKLSGSGGQGLILAGVILAESALLDGKQVIQSQSYGPEARGGSSKAEVIISDGEIDFIKVQKCDMLLCLTQDAYDKYGKDYTRVLILDERITMKYPEPEKVLRLPILDTASEKMRKPMVANIIALGAINGYLNLVSKESLTKSVLDSVPRGTEELNKQALESGYGLVG

SEQ ID NO: 51739 - DNA, 837 bp, Unknown
  Obtained from environmental sample
  misc_feature (1)..(837): n is a, c, g, or t
atggctgatcaaattctggcaagtgaccttataaagaagaaccttcgcgttgacaagctgccgcatatctggtgcccaggctgcggccacggaatcctgatgcgctctgtggcgcaggcaatcgaaaacacggtggcggacaaaaacaaggtctgcattgtttccggtatcggctgttcctcaagggcggcggggtacatgaactttaacaccctgcacacaacccacgggcgcgcccttgccttcgcgacggggattaagctggcaaatcctgagcttacggttatcgtaataaccggcgacggagacgcgaccgcgatcgggggaaaccattttatccacgccgcccgaagaaacataggcataacaacgattgtattcaacaacagtatatacggcatgacaggcgggcagtattctccgctgacgccgacaaatgaccttgcgactaccgccccttacggcaacatggaacgccccttcgatctcgtcaaactggcggatgccgccggcgctacttatgtggcgaggataaccacctaccatgtgaaagaggcggtaaagctgattgaaaggggactggcaaacaaaggcttctcgctcatcgagggtatcagcgcgtgtcccacctattacggcagaaaaaacaaaaaaggcggcgcggtggagattatgaagtgggccaaagaacacgcggttgacgtgaaaaaagtaagggcggaaaatatgacagccgaatatcttcgtggaaagcttatcatcggcgaatttaagaacaccgtcgaaagcgaatacaccgaggagtaccagaaaattgtggacaggatcagaggttaa

SEQ ID NO: 51740 - protein, 278 aa, Unknown
  Obtained from environmental sample
  DOMAIN (56)...(204): Thiamine pyrophosphate enzyme, C-terminal TPP binding domain
  misc_feature (1)..(278): Xaa is any amino acid
MADQILASDLIKKNLRVDKLPHIWCPGCGHGILMRSVAQAIENTVADKNKVCIVSGIGCSSRAAGYMNFNTLHTTHGRALAFATGIKLANPELTVIVITGDGDATAIGGNHFIHAARRNIGITTIVFNNSIYGMTGGQYSPLTPTNDLATTAPYGNMERPFDLVKLADAAGATYVARITTYHVKEAVKLIERGLANKGFSLIEGISACPTYYGRKNKKGGAVEIMKWAKEHAVDVKKVRAENMTAEYLRGKLIIGEFKNTVESEYTEEYQKIVDRIRG

SEQ ID NO: 51741 - DNA, 393 bp, Unknown
  Obtained from environmental sample
  misc_feature (1)..(393): n is a, c, g, or t
atgccgtatatactgttgttgaatacaatcgttgttatgcctatgtttcttcgggcggcgtggataaaatggtttcccccgatcgcggtcgcgtctccgtcgccggttattacgataaccgtaagctcaggatttgccagcttaatccccgtcgcgaaggcaagggcgcgcccgtgggttgtgtgcagggtgttaaagttcatgtaccccgccgcccttgaggaacagccgataccggaaacaatgcagaccttgtttttgtccgccaccgtgttttcgattgcctgcgccacagagcgcatcaggattccgtggccgcagcctgggcaccagatatgcggcagcttgtcaacgcgaaggttcttctttataaggtcacttgccagaatttga

SEQ ID NO: 51742 - protein, 130 aa, Unknown
  Obtained from environmental sample
  misc_feature (1)..(130): Xaa is any amino acid
MPYILLLNTIVVMPMFLRAAWIKWFPPIAVASPSPVITITVSSGFASLIPVAKARARPWVVCRVLKFMYPAALEEQPIPETMQTLFLSATVFSIACATERIRIPWPQPGHQICGSLSTRRFFFIRSLARI

SEQ ID NO: 51743 - DNA, 405 bp, Unknown
  Obtained from environmental sample
  misc_feature (1)..(405): n is a, c, g, or t
atgatgccgcggctgatgaaaaagatcgaggacaatctcaatgatattatccggtatgaagagagcggggtttccggctgcgatattctgctccttgcgtacggtggaaccattcgtaccgtaaaagcggcggtaaagcttgccgccgaggccggcattaaagcgggcatttttaggccgatcacaatctggcctttccctgaaaaagctttcagggactgtgtcacagacaataacattaaaaaagtacttgtcgccgagcttaactacggtcaaatttcgcttgaagcggaaagaatcctaaagagcgacgcggcagtattacacattggcaaaattgacggtgatattttgtatcccaacgaagttctaaaaaagatctgcgaggtggtaaaacatggctga

SEQ ID NO: 51744 - protein, 134 aa, Unknown
  Obtained from environmental sample
  misc_feature (1)..(134): Xaa is any amino acid
MMPRLMKKIEDNLNDIIRYEESGVSGCDILLLAYGGTIRTVKAAVKLAAEAGIKAGIFRPITIWPFPEKAFRDCVTDNNIKKVLVAELNYGQISLEAERILKSDAAVLHIGKIDGDILYPNEVLKKICEVVKHG

SEQ ID NO: 51745 - DNA, 756 bp, Unknown
  Obtained from environmental sample
  misc_feature (1)..(756): n is a, c, g, or t
atgagtaacagatcatactacatagcgggaaactggaagatgcacaaaacccgcgccgaagccgcggagcttgccaaggcgctggtcgcgcagttaaaagacgggaaacacaaataccttgtcgcgccgtcttttaccagccttgaaactgtgggcgccattgtcaaaggcaccaatataaggcttggggcgcaggactgcgcgtttgaggagcagggcgctcatacaggcgaagtttctgtcctgcagttgaaagaccttggcgtgcagaccataatcctgggccacagcgaaaggcggcatgtctacaaggaagacgacgcgctgatcaacaaaaaggtgaagctggccctgaaacacggttttgaagtaattctctgcattggggaactgctggaagaacgcgaagccggcaaggtcgaactagtctgtgaatcccagaccgtgaaggggcttgaaggtgtcaccggctccgatctggccaatatcgtcattgcttacgagccggtctgggccattggcaccggaaagaccgccacaccggaagacgcggaggcggttcacgcttttgttcgcaaggtgattgcgcggctctacggtcaggctgccgcagataaaatcattatacagtacggcggctcggtaaaaccggataacgccgcccagttgatggccaaagagaacattgacggcgccctggtcggcggcgcggctcttaaaccggatacctttgtacctattgcgaaatttgcttaa

SEQ ID NO: 51746 - protein, 251 aa, Unknown
  Obtained from environmental sample
  DOMAIN (6)...(248): Triosephosphate isomerase
  misc_feature (1)..(251): Xaa is any amino acid
MSNRSYYIAGNWKMHKTRAEAAELAKALVAQLKDGKHKYLVAPSFTSLETVGAIVKGTNIRLGAQDCAFEEQGAHTGEVSVLQLKDLGVQTIILGHSERRHVYKEDDALINKKVKLALKHGFEVILCIGELLEEREAGKVELVCESQTVKGLEGVTGSDLANIVIAYEPVWAIGTGKTATPEDAEAVHAFVRKVIARLYGQAAADKIIIQYGGSVKPDNAAQLMAKENIDGALVGGAALKPDTFVPIAKFA

SEQ ID NO: 51747 - DNA, 417 bp, Unknown
  Obtained from environmental sample
  misc_feature (1)..(417): n is a, c, g, or t
gtggaaatagtcctgccagtggatcatgtcggagctaccagctttgacgcgacggctgtcccggtcccggttgacggtcttgatcttccggacgctctcttgggccttgatgtggggccaaagacccttgccaaatacaaagacgtaatcgccaaagccaaaaccattgtatggaacggcccggtaggcgtttttgaatttgacgcttttgccaaaggcactgaagcggttgcgaaactcgtggcggaagccaccggcaagggtgtcatcaccgtggtaggcggcggcgactcagtggcggcggtgaacaagttccaccttgccgataaaatgagccatgtctcaacaggcggcggcgcgtctctggaactgctggaaggcaagaaactgcccggcatcgaagtgtgtagagggtaa

SEQ ID NO: 51748 - protein, 138 aa, Unknown
  Obtained from environmental sample
  DOMAIN (1)...(136): Phosphoglycerate kinase
  misc_feature (1)..(138): Xaa is any amino acid
MEIVLPVDHVGATSFDATAVPVPVDGLDLPDALLGLDVGPKTLAKYKDVIAKAKTIVWNGPVGVFEFDAFAKGTEAVAKLVAEATGKGVITVVGGGDSVAAVNKFHLADKMSHVSTGGGASLELLEGKKLPGIEVCRG

SEQ ID NO: 51749 - DNA, 375 bp, Unknown
  Obtained from environmental sample
  misc_feature (1)..(375): n is a, c, g, or t
atgccgggcagtttcttgccttccagcagttccagagacgcgccgccgcctgttgagacatggctcattttatcggcaaggtggaacttgttcaccgccgccactgagtcgccgccgcctaccacggtgatgacacccttgccggtggcttccgccacgagtttcgcaaccgcttcagtgcctttggcaaaagcgtcaaattcaaaaacgcctaccgggccgttccatacaatggttttggctttggcgattacgtctttgtatttggcaagggtctttggccccacatcaaggcccaagagagcgtccggaagatcaagaccgtcaaccgggaccgggacagccgtcgcgtcaaagctggtagctccgacatga

SEQ ID NO: 51750 - protein, 124 aa, Unknown
  Obtained from environmental sample
  misc_feature (1)..(124): Xaa is any amino acid
MPGSFLPSSSSRDAPPPVETWLILSARWNLFTAATESPPPTTVMTPLPVASATSFATASVPLAKASNSKTPTGPFHTMVLALAITSLYLARVFGPTSRPKRASGRSRPSTGTGTAVASKLVAPT

SEQ ID NO: 51751 - DNA, 855 bp, Unknown
  Obtained from environmental sample
  misc_feature (1)..(855): n is a, c, g, or t
atgattaaaaccgtaaagaccgttgacctgaagggcaaacgcgtcattatgcgcgtggattttaacgtgccgatgaaagacggcgttgtgcaggatgatacccgcattgtggcggccctgccaactattaaatatatccttgatcagggggttaagaccctgacgcttatgtcccacctgggcgatccttccaaggatgccaagaaagcgaaggaaaaggccgaaaaagacggcaagactttcgatgaagccgcgtacataaagggcaaacaccgcatggcgccggttgccgcctaccttgagaaaaagctgggcaagccggtgatttttgccggggaagacggctgttacggcaaaaaagcgtttatcgacgggcagcccgccggatcggtcatcatgctggaaaacacccgtttccacaaggaagagaccgccaaggatgccgccgaccttgacaagttggcgaaagagcttgccacttacggcgacgtgtttgtaaacgacgctttcggcacagcccacagggatcacgcctctacagcgtccatcgctaaattcgcgccggttgccgtggcgggtttcctcatggaaaaagaggtcaactacctggagcccattgtcaccagcccccaaaagccgctggtagcgattatcggcggggcgaaagtttcctccaaaatagcggtgctggaaagccctttgaaaaactctgccgctctggtcatcggcggcggcatggcctataccttcctcaagcacagggacacaagattggaaaatcccttgttgaggatgatcagattgacacggcgaaaaagatccttgacgcggcaaaggccgcgaacgtggaaatag

SEQ ID NO: 51752 - protein, 284 aa, Unknown
  Obtained from environmental sample
  DOMAIN (1)...(284): Phosphoglycerate kinase
  misc_feature (1)..(284): Xaa is any amino acid
MIKTVKTVDLKGKRVIMRVDFNVPMKDGVVQDDTRIVAALPTIKYILDQGVKTLTLMSHLGDPSKDAKKAKEKAEKDGKTFDEAAYIKGKHRMAPVAAYLEKKLGKPVIFAGEDGCYGKKAFIDGQPAGSVIMLENTRFHKEETAKDAADLDKLAKELATYGDVFVNDAFGTAHRDHASTASIAKFAPVAVAGFLMEKEVNYLEPIVTSPQKPLVAIIGGAKVSSKIAVLESPLKNSAALVIGGGMAYTFLKHRDTRLENPLLRMIRLTRRKRSLTRQRPRTWK

SEQ ID NO: 51753 - DNA, 687 bp, Unknown
  Obtained from environmental sample
  misc_feature (1)..(687): n is a, c, g, or t
atgactaaacattttttctcttttatttttttcttttttcttttttattctatccttcccgcccaggaagcccttaaatccattgaggaagaatattacgactttctcgccttgcagggattaacagaacgccctgctcttaattatcgtacactttctgattcggtctggaaaattgataaagatgcggctcatccatggcaggacaataatcttggaactattcatccccttttcggtgatttccgtatgcgcgtatacggacctgaactatttatgtcttataacaccgccgccccttacggtcagaatgacggtttactgtggcagggacgcggttttaactcgcttttcaagggcggcgtacgttttgaaggatacggcgttgagttaacgctgctgccgcattttgcgttttcgcagaacgcggaatttgacataatgccatccgcttatgaaagtgaatacggatatttttggggatatgcacataatatcggcgcagacgctccacagcgctttggagacaagcctttctttgactgggatttaggcgattcggaaattcgctatacatggaagacgcttactgtgggattcggaactcaggcaatttggttaggcccatcatatctcaattcaatgcttcattctaataatgctccggcgtatcccaagttgatatag

SEQ ID NO: 51754 - protein, 228 aa, Unknown
  Obtained from environmental sample
  SIGNAL (1)...(23)
  misc_feature (1)..(228): Xaa is any amino acid
MTKHFFSFIFFFFLFYSILPAQEALKSIEEEYYDFLALQGLTERPALNYRTLSDSVWKIDKDAAHPWQDNNLGTIHPLFGDFRMRVYGPELFMSYNTAAPYGQNDGLLWQGRGFNSLFKGGVRFEGYGVELTLLPHFAFSQNAEFDIMPSAYESEYGYFWGYAHNIGADAPQRFGDKPFFDWDLGDSEIRYTWKTLTVGFGTQAIWLGPSYLNSMLHSNNAPAYPKLI

SEQ ID NO: 51755 - DNA, 1017 bp, Unknown
  Obtained from environmental sample
  misc_feature (1)..(1017): n is a, c, g, or t
atgtcatatttggcaaaggtaaattcaatacagggtaagataaaatttacctccggcagaaatatgaaccgcgcgttaaaagaaacccttggtaatttaaaatatgttaaattaaaaggcaacgaagatgaaattctaaaaacatatagcagcgcgctggagaaaaacaataaatccgagcttgtaacccatgtcctgggcgttatgccaaagagtattcttgaaagcctgggattttctttccttatcggcgttgtggtttttattgtctggctgtacaaagacgcttccatggttattcccataatatcaatgtacgcgcttgccctgtaccgtattcttccttccatacacagaatgctgcaggaaataaacggcatattattttccgaagagacaataaaaaatgtttatgaaagcttgtcccagccggttgaggacgaaggctccgatcctcttgattttaagagcgccatccgccttgaaaatataagttttcaatatatgacaggcggtgaggtaataaacagcgtttcgctggaaatcaggaaaggggaaaaaattgccattaccggtgaaagcggcggcggcaagtcaacgctggttgacattattaccggcattcacaaaccggctgccggtaaagtttatattgacaatacggtaatcgccgataacaatatccgttcatggcggaaaaaaatcgggtacattccccaaagcatttatctttttgacggcactgtcgcggaaaatgtttcctttggctcaacgcctgatgatgaaaagacaataaccgcccttaaaaaggcgaatatctgggattttttatcgcaaaaagacggtatacaaacaagagtcggggacggcggcattcagctaagcggcggacagcagcagcgcataggaattgcccgcgccctgtacgatgatcccgaggtgctgttcttgacgaagctacctcctctcttgataacgaaaccgaaaaaaaaatcatggatgagatttacagtgtaa

SEQ ID NO: 51756 - protein, 338 aa, Unknown
  Obtained from environmental sample
  DOMAIN (185)...(330): ABC transporter
  misc_feature (1)..(338): Xaa is any amino acid
MSYLAKVNSIQGKIKFTSGRNMNRALKETLGNLKYVKLKGNEDEILKTYSSALEKNNKSELVTHVLGVMPKSILESLGFSFLIGVVVFIVWLYKDASMVIPIISMYALALYRILPSIHRMLQEINGILFSEETIKNVYESLSQPVEDEGSDPLDFKSAIRLENISFQYMTGGEVINSVSLEIRKGEKIAITGESGGGKSTLVDIITGIHKPAAGKVYIDNTVIADNNIRSWRKKIGYIPQSIYLFDGTVAENVSFGSTPDDEKTITALKKANIWDFLSQKDGIQTRVGDGGIQLSGGQQQRIGIARALYDDPEVLFLTKLPPLLITKPKKKSWMRFTV

SEQ ID NO: 51757 - DNA, 1377 bp, Unknown
  Obtained from environmental sample
  misc_feature (1)..(1377): n is a, c, g, or t
ttggccgagattctgcgcaaatataactgttttaaagggctggaggcagttcgcaagcgtcctggtatgtacatagggacgacgggcattgacggccttcatcatctggtttttgaggttgtagacaactctgtagacgaggctatgcagggcttctgtaccaatattcttgttgttctggaaggcaatgatatagtcagggttgaggacaatggtcgcggtatacctgtggatattcatcccaccgagcatgtcagcgcactggaactggtaatgacaaaactgcacgcaggcggtaaattcgataaaaaatcatacaaggtttcgggcggtttgcacggagtcggcgtttccgttgtgaacgccctttccgagtggtgcgaagcttatgttcatcttgacgggaaagtctacacgcagcgttataaaattggggtagcggaaagtcccgccaaggaaattcaacccaatgggcttccctattcatattcgccaagccgtaaaggtactgtcatccgttggaaagccgattcctctgtttttgaaaccactacccataattttgacgctctttccaaccgtcttcgggaactggcgtttttaaacaaaggcctaaaaatcactatccgcgacgagcggctaaccacgccaaaagttcacgattttatgtttgaaggcggcgtaaaaagttttgttgagtacctgaacgaaaataaaaccgtactttacaaagagccggtttatcttaacggcgtccgcgatgacggcttgtgcggtcaggttgaagtggaaacggctatccagtacaacgacggctttaacgaaataatgttttcgtttgtgaatgatattaacacccgcgaaggcggtactcatcttgtcgggtttaagtccgcgcttacccgtactttgaatgaattccttaaaaagtccaaacacgccaaaaagttagatgaaaccctctcaggagacgacgtgcgcgaaggactgactgcggtattgtcggttaaagtgccgaatccgcagtttgaagggcagacaaagggaaagcttggcaactcggaagtgaagggtatagtggagtccgttgtaaacgaacagcttgagcttttctttgacaagcacccggaagttataaataacatactcgaaaaatcagtattagccgcaaaagcgcgtattgccgcccgtcaggcaagagacgctacccgcagaaagaacgcgatggacagcgcgggattgccgggaaaacttgccgactgctccgagaaagaccctgcaaagtgcgaactttttatcgtagagggcgactccgctggcggttccgccaaaggaggcagagaccgccgcactcaggcgatntctcggccgatctga

SEQ ID NO: 51758 - protein, 458 aa, Unknown
  Obtained from environmental sample
  DOMAIN (28)...(179): Histidine kinase-, DNA gyrase B-, and HSP90-like ATPase
  misc_feature (1)..(458): Xaa is any amino acid
MAEILRKYNCFKGLEAVRKRPGMYIGTTGIDGLHHLVFEVVDNSVDEAMQGFCTNILVVLEGNDIVRVEDNGRGIPVDIHPTEHVSALELVMTKLHAGGKFDKKSYKVSGGLHGVGVSVVNALSEWCEAYVHLDGKVYTQRYKIGVAESPAKEIQPNGLPYSYSPSRKGTVIRWKADSSVFETTTHNFDALSNRLRELAFLNKGLKITIRDERLTTPKVHDFMFEGGVKSFVEYLNENKTVLYKEPVYLNGVRDDGLCGQVEVETAIQYNDGFNEIMFSFVNDINTREGGTHLVGFKSALTRTLNEFLKKSKHAKKLDETLSGDDVREGLTAVLSVKVPNPQFEGQTKGKLGNSEVKGIVESVVNEQLELFFDKHPEVINNILEKSVLAAKARIAARQARDATRRKNAMDSAGLPGKLADCSEKDPAKCELFIVEGDSAGGSAKGGRDRRTQAXSRPI

SEQ ID NO: 51759 - DNA, 828 bp, Unknown
  Obtained from environmental sample
  misc_feature (1)..(828): n is a, c, g, or t
ttgagaaggaggtgccgggttgtgagtgattatctatcccaggatgaaattgacagtctgctgaacggtttgggcgatggcgcggagggcggcgcgtcggatgagcgctacaaggccatagcaccgatattcgagcttttctgcaagcaggcctcgtctgtgctggggaccgccgcggccaggacggtggacgtcgtctccgagtcgtgcgccaaggcggatttaaacgccgccaagggaaaattgccggggaatttgctttccctgacgctctcgcttgtctccggtttagagggcgatatgtacctgatcatagacaaaaaggtcgtaggtatattaacggatctgatgatgatgggcgacggttcggcgccctactcggaagactcgaaagacgcggcgtcggagctattcaaccaagttatgggcgcgttcagcacggcgctgggcggggagctcggcgaatccgtctccgccggaaacgtctccgtgtccgagttcaacttcgcctccccgcccttcgacgccgcctcggcggatatgggcgctcgcgtttttgtgcgttcccgccttcttctcctcctntgtggccctggggnttccggcttctttcctcggctntctcgtcgcttctctggtctcncttcctcgcccccgggcgcgggtttgctggtcggctccncctcttcggctggccggctttgtcgttcgtgtcgttgtcgggcctctgccncggttgcggcggnggctcnttcgttctnccgcagttnncncnnnntnnnccgccgccgaggcagagcacctacgacggcccgaaagaaaatatag

SEQ ID NO: 51760 - protein, 275 aa, Unknown
  Obtained from environmental sample
  misc_feature (1)..(275): Xaa is any amino acid
MRRRCRVVSDYLSQDEIDSLLNGLGDGAEGGASDERYKAIAPIFELFCKQASSVLGTAAARTVDVVSESCAKADLNAAKGKLPGNLLSLTLSLVSGLEGDMYLIIDKKVVGILTDLMMMGDGSAPYSEDSKDAASELFNQVMGAFSTALGGELGESVSAGNVSVSEFNFASPPFDAASADMGARVFVRSRLLLLLCGPGXSGFFPRLSRRFSGLXSSPPGAGLLVGSXSSAGRLCRSCRCRASAXVAAXAXSFXRSXXXXXRRRGRAPTTARKKI

SEQ ID NO: 51761 - DNA, 501 bp, Unknown
  Obtained from environmental sample
  misc_feature (1)..(501): n is a, c, g, or t
gtgcacggtatgggagcatatcggttcgtttacatccaagatcgaggcttacgagacgaacccgcagtttgtgcagatcgcgccgcccagcgagacggtgatcctgataagttggaagttcgtatgcagaacgcctcggggcttatgagtttgtgtttcccctacatggtgcttgagagcgtcatcaacaacctgacggtggagaactggatgtcgcttcaggggcaggcgacgccggagacgcgcgagcttatggagcgggagctcagcgacgtgacgctctggatttccacggtgatagggaagacgacgcttacgatgagggacttgctgcagctgcagcgcggcgacgtgatatgtttggataagcggcatgacagcgatctgatggtgcaaataggcggcaagacgaagcttgcgggccgcccggggcttatagggcgcaagaaagcggtgaagatcacaagtattattgagaaggaggtgccgggttgtgagtga

SEQ ID NO: 51762 - protein, 166 aa, Unknown
  Obtained from environmental sample
  DOMAIN (85)...(161): Surface presentation of antigens (SPOA) protein
  misc_feature (1)..(166): Xaa is any amino acid
MHGMGAYRFVYIQDRGLRDEPAVCADRAAQRDGDPDKLEVRMQNASGLMSLCFPYMVLESVINNLTVENWMSLQGQATPETRELMERELSDVTLWISTVIGKTTLTMRDLLQLQRGDVICLDKRHDSDLMVQIGGKTKLAGRPGLIGRKKAVKITSIIEKEVPGCE

SEQ ID NO: 51763 - DNA, 657 bp, Unknown
  Obtained from environmental sample
  misc_feature (1)..(657): n is a, c, g, or t
gtgagcgacatactgtcacaagaagaggtcgatgcactgctcaacgcggttaatgagggcgggcttgccgaccaatcgttcgacgaggttaagcctgacatccccgttgaagacgagataccgttgtcgctctacgactttaaaaggcccgaccgcgtctccaaagatcagatgcgcacgttgcagaacctgcacgagggctacgcccgccagttttccaccacgctcacaaacttcctgcgcacttttatagaaacggagttggtaagcgtagaccagttgacatactcggagtttgtgatgtccatatcgaacccgagctgcatctacgtgttccgtatggagccgctagagggattggcgatcatagaaataaacccttcgctcgttttttacataatagacaggttgtttggcgggcaggggcgcccatttgagggtaaccgcgagttgacaatgatagaacagaacgtgataaaccgcatagtgcagcgcggccttggggatttgtgcacggtatgggagcatatcggttcgtttacatccaagatcgaggcttacgagacgaacccgcagtttgtgcagatcgcgccgcccagcgagacggtgatcctgataagttggaagttcgtatgcagaacgcctcggggcttatga

SEQ ID NO: 51764 - protein, 218 aa, Unknown
  Obtained from environmental sample
  DOMAIN (45)...(218): Flagellar motor switch protein FliM
  misc_feature (1)..(218): Xaa is any amino acid
MSDILSQEEVDALLNAVNEGGLADQSFDEVKPDIPVEDEIPLSLYDFKRPDRVSKDQMRTLQNLHEGYARQFSTTLTNFLRTFIETELVSVDQLTYSEFVMSISNPSCIYVFRMEPLEGLAIIEINPSLVFYIIDRLFGGQGRPFEGNRELTMIEQNVINRIVQRGLGDLCTVWEHIGSFTSKIEAYETNPQFVQIAPPSETVILISWKFVCRTPRGL

SEQ ID NO: 51765 - DNA, 459 bp, Unknown
  Obtained from environmental sample
  misc_feature (1)..(459): n is a, c, g, or t
gtgaaacatctcctcgcctctcttttagacagctactcaaaattgggaaattccattccagttaatccgcactctttgccaaataaagatgaggtcgttgaacttgtgaacaaactacactgcttgctattcccaggctactttggcaatcacaaaacagactcactcttaaaaaaagctcaccacctgctgaacaagcagttggagttgctccattgcaaaaaagaattgggaactgaatttttgaacaaactcccaaagataagggcaagcctcgcaacagatgtggaagctgccgccgatggagaccctgccgcctcggataaacaggagataataatttcttatccggggatttatgcaatttccgtttacaggctggctcacgagcttgagttgcttaaagtcccaaaactgccacggataatgacagaacacgctccctcctctcggccataa

SEQ ID NO: 51766 - protein, 152 aa, Unknown
  Obtained from environmental sample
  misc_feature (1)..(152): Xaa is any amino acid
MKHLLASLLDSYSKLGNSIPVNPHSLPNKDEVVELVNKLHCLLFPGYFGNHKTDSLLKKAHHLLNKQLELLHCKKELGTEFLNKLPKIRASLATDVEAAADGDPAASDKQEIIISYPGIYAISVYRLAHELELLKVPKLPRIMTEHAPSSRP

SEQ ID NO: 51767 - DNA, 771 bp, Unknown
  Obtained from environmental sample
  misc_feature (1)..(771): n is a, c, g, or t
atgctttttccggcggatttctccgatacccaaattgtcgaaggtataggagttccttttgaatttgccggagattttaagaatcctgatatatttgaaattccttcaatagaaattgattctgtctcttcggcaataaatgtagtttctgtttcaaaggaagaacttccggaaaacagtaaaggcattccctttcgccagattcttgcgatgttgagtacaaccggaaagtcttcccgtgccggagctatgatccgcgcctgccatattgcgcagtggcggcaggaatcccgtttttgcggaagctgcggcgcggaaaatgtcaataatccggcggagactgaacgtcattgccccagatgcgggagaattgaattccccagaatttgccccgctgttattgtcattattacagatgatgacaacagaatccttcttgcacataacaaaaaattcaaggcgggcgtatacagtcttatttcaggatttaatgaagcgggagaatctttggaagcgacagcggcgcgggaaatttacgaagaagtaaatatcagggtaagggatgtttcttatgtaaaatcacagccgtggccgtttcccaattcgcttatgcttggctttaaagcgcgctattcatcgggaacagtacgccctgacggcattgaaatcgaagatgcggcatggttcacaaaagacaatttgccgtctcttccgggggaaggctcacttgcccgctttttaataagtctctggcttaataattctttataa

SEQ ID NO: 51768 - protein, 256 aa, Unknown
  Obtained from environmental sample
  DOMAIN (129)...(255): NUDIX domain
  misc_feature (1)..(256): Xaa is any amino acid
MLFPADFSDTQIVEGIGVPFEFAGDFKNPDIFEIPSIEIDSVSSAINVVSVSKEELPENSKGIPFRQILAMLSTTGKSSRAGAMIRACHIAQWRQESRFCGSCGAENVNNPAETERHCPRCGRIEFPRICPAVIVIITDDDNRILLAHNKKFKAGVYSLISGFNEAGESLEATAAREIYEEVNIRVRDVSYVKSQPWPFPNSLMLGFKARYSSGTVRPDGIEIEDAAWFTKDNLPSLPGEGSLARFLISLWLNNSL

SEQ ID NO: 51769 - DNA, 1146 bp, Unknown
  Obtained from environmental sample
  misc_feature (1)..(1146): n is a, c, g, or t
ttgataaatgtatcgcctgcggtaactgttacgaagtttgtcccgatgtctgcatcgaagtttacgaagaggaagtttaaaatgagcgaaaaagttttaatgaaaggaaacgaagctatcgccgaatcagcgataagagcgggctgcggcgcttactttgggtatcctatcactccgcagaacgagattcccgcctatatggcaaagcacatgcttaatcgcggacgaatatttattcaagcggagagcgaaacggcggcaattatcatggtttatggcgcggcgtgcgcgggcgtaagggcgatgaccagttcttcaagccccggcatcagtcttaaacaggaaggtttgtcttatgccgcgggcgcggatgttccgctggtagtcgccaatgttgtccgaggcggtccggggcttggttccatacagcccgcgcagagtgattattttcaggctactcgcggcggtgggcatggtgattaccggtgcattgtgcttgccccaaaaagcgttcaggaatgtgccgatctcacctatctggcgtttgatcttgccgacaaataccggatgcctgtaattgttcttgcagacggaatgatagggcaaatgatggaagggtgcgtactgcccccggaaaaaacagttccaaaatacgaatggtcagccggaggaatggcaaagataaaaagagacgcggttcacataacgtctattgagcttgatcccgtaaaacttgaagctcaaacaaaaaaacgatttacccgttacgagacggtaaaagccgcagaaatccgctacgaagacaacggttgcgccgatgccgatttaattttggtagcctatggtacttgcgcccgcgtatgccttggaacgcagatgattgccaaaaaagaaggtattaagcttggcattttaagaccaatcaccttgtggcctttcccctacgacgctcttggaaaagttgcagctaacggaaggccgatactaaccgtagaaatgtcagagggccagttggttgaagacgtgaaagtatcggcttactatgccggttcaaaatccgccattcatcttttagcgcattcaggcgggatgattcccgcagaagaagaagtatttaccaaagtaaaggaaattttaaaaaaatga

SEQ ID NO: 51770 - protein, 381 aa, Unknown
  Obtained from environmental sample
  DOMAIN (42)...(268): Pyruvate flavodoxin/ferredoxin oxidoreductase, thiamine diP-binding domain
  misc_feature (1)..(381): Xaa is any amino acid
MINVSPAVTVTKFVPMSASKFTKRKFKMSEKVLMKGNEAIAESAIRAGCGAYFGYPITPQNEIPAYMAKHMLNRGRIFIQAESETAAIIMVYGAACAGVRAMTSSSSPGISLKQEGLSYAAGADVPLVVANVVRGGPGLGSIQPAQSDYFQATRGGGHGDYRCIVLAPKSVQECADLTYLAFDLADKYRMPVIVLADGMIGQMMEGCVLPPEKTVPKYEWSAGGMAKIKRDAVHITSIELDPVKLEAQTKKRFTRYETVKAAEIRYEDNGCADADLILVAYGTCARVCLGTQMIAKKEGIKLGILRPITLWPFPYDALGKVAANGRPILTVEMSEGQLVEDVKVSAYYAGSKSAIHLLAHSGGMIPAEEEVFTKVKEILKK

SEQ ID NO: 51771 - DNA, 759 bp, Unknown
  Obtained from environmental sample
  misc_feature (1)..(759): n is a, c, g, or t
atgaaaaagttatacggacatccggaaagtttaaaaaaggtgcagaccaaatactgtggcggctgcggacacggaataattcacagaattataaccaatttaatagatgagatgggtttaagggaaaaggcaattatcactcatcccgtgggttgcgctatttgggctgatttgtactttgattttgactcagtgcagccgccgcacggacgcactcccgccgccgcaaccggcgtaaaacgcgttcatcccgatcaccttgttatatgctatcagggagacggtgacttggcggctatcggaacggcggaaatgatccatgcggcgaatcgcggcgaaaaatttaccacgatctttgtcaacaacgcgatttacggcatgactggcggccagatggctcccaccacattgttaggccaaaaagcgacaaccgccccttacggccgcgacgcggacgccgccggaatgggttacccgctcagggtttgcgaacttctcgccacattgtccggaacgcgctacatcgccagaggctctgtgcacaatgcggtgaacgtccgcaaaaccaggcagtacataaaaaaagcatttgaagcgcaaatggccggtattggcagtacgatggtagaaattctttctccctgtcctacaaattggacaatggacgccgtgcaggcggttgaatggttggagaaggaaatgattcctgtgtatccgttgggtgaggtgaagaatacgttggggacttcaagtgtttag

SEQ ID NO: 51772 - protein, 252 aa, Unknown
  Obtained from environmental sample
  DOMAIN (49)...(211): Thiamine pyrophosphate enzyme, C-terminal TPP binding domain
  misc_feature (1)..(252): Xaa is any amino acid
MKKLYGHPESLKKVQTKYCGGCGHGIIHRIITNLIDEMGLREKAIITHPVGCAIWADLYFDFDSVQPPHGRTPAAATGVKRVHPDHLVICYQGDGDLAAIGTAEMIHAANRGEKFTTIFVNNAIYGMTGGQMAPTTLLGQKATTAPYGRDADAAGMGYPLRVCELLATLSGTRYIARGSVHNAVNVRKTRQYIKKAFEAQMAGIGSTMVEILSPCPTNWTMDAVQAVEWLEKEMIPVYPLGEVKNTLGTSSV

SEQ ID NO: 51773 - DNA, 1002 bp, Unknown
  Obtained from environmental sample
  misc_feature (1)..(1002): n is a, c, g, or t
atgaaggttcataacgattttacgctgtattggagggtgtttccttcggggaaaaaggttgtgtattactatgcttatgacgaaaacggcaagcgactgatggggcgttccactggggaaaccaatttgacatcggcaagggtgaagtgcaacaaacttttgaaagaaggcgagctggttcccaataataaccatgtgccgactttcgccgaatatgccgagggctggtgggagtgggaaacttgcgcctacttaaagaaacggcgcaagcggtacagcctgacacaaacctatgccgacaataacaaaaagaatttgaaaaaccatctgctgccgttctttggcaatatgcccatgaacaaaatcacaaaaatcgaagtcgaggactttttcgatgcgcttatcgaaaaagaatatcaaaacacatccatcaacggcttttacggcacgctgaaaaccatgctcattgaagcggtagagcgaaacataataccaaaagacccgacagacaaaatggggcgtttggtaaatgacaggcgggccattaaaattataacgccggaagaatttaagaaactgtttgtcggcgattggcggcgggtgtgggaaagcgacaggctttcgtacacggctaacaagctggcggctttgacgggcatgagggcatccgaggtggtagggctaaaaggaagttttgtatatgacgagcatatttatctgtgcatgcagtatgacgattacggataccgccctacaaaaacaaaagacaagcacaacatacccctgacttccgacatgataaacgagctaaaagagctcaagcgcatgaatggggacgggtttgtgttttcgcttgacggcggtgctacgcccatttgccggaacaccgtgtacaagcatttccatcgggcattgcggaatatagggattacagaggacgagatttccgagcgccatctgcatctgcacgcatggaggcatttctttatacggagatgttaa

SEQ ID NO: 51774 - protein, 333 aa, Unknown
  Obtained from environmental sample
  misc_feature (1)..(333): Xaa is any amino acid
MKVHNDFTLYWRVFPSGKKVVYYYAYDENGKRLMGRSTGETNLTSARVKCNKLLKEGELVPNNNHVPTFAEYAEGWWEWETCAYLKKRRKRYSLTQTYADNNKKNLKNHLLPFFGNMPMNKITKIEVEDFFDALIEKEYQNTSINGFYGTLKTMLIEAVERNIIPKDPTDKMGRLVNDRRAIKIITPEEFKKLFVGDWRRVWESDRLSYTANKLAALTGMRASEVVGLKGSFVYDEHIYLCMQYDDYGYRPTKTKDKHNIPLTSDMINELKELKRMNGDGFVFSLDGGATPICRNTVYKHFHRALRNIGITEDEISERHLHLHAWRHFFIRRC

SEQ ID NO: 51775 - DNA, 1074 bp, Unknown
  Obtained from environmental sample
  misc_feature (1)..(1074): n is a, c, g, or t
atgcccctctggataacgcggcaaaaatcaaaaaccctttttgacgccgttaggcgctatcgcgatttccccgtcactgccgaagcctggagaacctgccttaacgaccagttcgacatgaagggctttgctacgcttcttgaagacataggctcaggcgcgctttccgttgattttttcacaacccgccaggcaagcccattctcaaaagaattaacctgggccgaaaccaacgcccttatgtacgagtacgacgagcggccggaccttaccgacagcgggccttccctctcggacaaggttatcgccgaagcattgggaaacgccgccgctcgaccccccctcaaagccgatttggtcgaggacttctgctcaaggctcaggcgggaaatagcgggctgggcaccggatgacgagctaaccctttgcgagtgggtgaaggagcgaatcgcaatccctgccgatgaatgggaaaggcttttacaatgcgtcaccgccgaattgttagacgcaatacacaacgataaaagccttggaggaaaactcgaatactttgggcaaggcaattccgaaaatgccgtcgtagtccaccgcgaatgggcaaagaaatggaaagaaaatgacaggaaaaaactagccgaagattgccttgggcaatggctccgctatcaggggcccgttccgctttcaaaaatcgccggagtctacggcctttcgattgccgaagcgaaagaagtgattctgcttttttcagattcggagcaggaaacccttgtgtccgacgttacagtagaggacgctggaaaagacctggtctgtgatcgggaaaacctggaactgcttctcaggctaagcagaagaaagcgaaggccggaaataaaggaaaaacccgctgcgcttctcgttcctttcctggcaaagcgtcaggggcttatacgcaccgcgctggaggcggactcaggcaggccgtgggaacgccttgccggaatcgccgcgcaggcaaaactttgggaggccgaattcttcccatgtcggctttcaaattattcaggcgaattgttgacagggagataa

SEQ ID NO: 51776 - protein, 357 aa, Unknown
  Obtained from environmental sample
  misc_feature (1)..(357): Xaa is any amino acid
MPLWITRQKSKTLFDAVRRYRDFPVTAEAWRTCLNDQFDMKGFATLLEDIGSGALSVDFFTTRQASPFSKELTWAETNALMYEYDERPDLTDSGPSLSDKVIAEALGNAAARPPLKADLVEDFCSRLRREIAGWAPDDELTLCEWVKERIAIPADEWERLLQCVTAELLDAIHNDKSLGGKLEYFGQGNSENAVVVHREWAKKWKENDRKKLAEDCLGQWLRYQGPVPLSKIAGVYGLSIAEAKEVILLFSDSEQETLVSDVTVEDAGKDLVCDRENLELLLRLSRRKRRPEIKEKPAALLVPFLAKRQGLIRTALEADSGRPWERLAGIAAQAKLWEAEFFPCRLSNYSGELLTGR

SEQ ID NO: 51777 - DNA, 849 bp, Unknown
  Obtained from environmental sample
  misc_feature (1)..(849): n is a, c, g, or t
ttgcttgcccagatcatcctttcattctgcgccgaaaatgatcaaaacgaagatgaactattcaaaactatccgtgggttttatgtgtaccgtaatctttcaagggaaaacttcgacggagttgtgcgtatgctttcaggaagctacgaggatacgcggctaagggaactcaagcggcgtttgttccgcgatgaggagacaaagactttgagcgccgccccgggaacacttccactcttgtacacatccagtggtgttattacaagccggggtctttactctttacggcttgctcccggtgttgagggagcgggaaccaaaatcggcgaattggacgaggagtttgtctgggagcgccgcctgggggatatttttgattttggaaaccggtcctggaggatcaccgctattggaaacgaggcagtcgaggcaattccaatttcaacgggagcggactatgctcccttctggacaggcgagggcttttaccgcagcccggttatttccaggcgaattctggaaatactggaagggtattaccctaagggctggacttccttaaaagccgaaagaatgttggacaatttcagcgatgaggcaaaaaaagagctggaagattttcttttttctcaatggtcgcttcaaaaaggaattcctttccccgggccgtctttcattcccatagaaataatcgacgaccctgatcgcggcgacgcttaccttatcatctttcatagctttaagggcggggcgataaactttcccctctcattggctttggcaagagaccttgaagcgcaattcatatgcgcgttgacggcgctgcgaatgacaacgccgtctttataa

SEQ ID NO: 51778 - protein, 282 aa, Unknown
  Obtained from environmental sample
  misc_feature (1)..(282): Xaa is any amino acid
MLAQIILSFCAENDQNEDELFKTIRGFYVYRNLSRENFDGVVRMLSGSYEDTRLRELKRRLFRDEETKTLSAAPGTLPLLYTSSGVITSRGLYSLRLAPGVEGAGTKIGELDEEFVWERRLGDIFDFGNRSWRITAIGNEAVEAIPISTGADYAPFWTGEGFYRSPVISRRILEILEGYYPKGWTSLKAERMLDNFSDEAKKELEDFLFSQWSLQKGIPFPGPSFIPIEIIDDPDRGDAYLIIFHSFKGGAINFPLSLALARDLEAQFICALTALRMTTPSL

SEQ ID NO: 51779 - DNA, 573 bp, Unknown
  Obtained from environmental sample
  misc_feature (1)..(573): n is a, c, g, or t
gtgcgggactgtacagtcgaaagcgggcacgggggaatcgttatcggaagcgaaaccgctggtggcattagtgaggtattggccgagaactgcctgttcaggggaacggatcgggggattaggataaaaacccgccgtggacggggcggtacagtccaggatttggaattcagaaaactcaccatggaaaataacctctgcccccttgcaattaatatgtactaccgctgtggcgcgagccttgaggacggttatttcagcacggaagcccttccggtaagtgcgactaccccggcgatcaggaatatccgcatcgccgatattaaagccactggctgtcgggcttcagcggggtttatcgcgggcctgcccgaatcgccgatagaaaaaatcagcgttacgcgctgtgaattttccaccaacgagcgtagcggtgtcagtcccgatgagtcggatatgtttttggggctcccgcaagtttcagaaaaaagtatacgcctgcttaatgtcaaagatgtgcaattttccgaggtaaaagtcagcggcccggcggaagcttttatttaccgctaa

SEQ ID NO: 51780 - protein, 190 aa, Unknown
  Obtained from environmental sample
  misc_feature (1)..(190): Xaa is any amino acid
MRDCTVESGHGGIVIGSETAGGISEVLAENCLFRGTDRGIRIKTRRGRGGTVQDLEFRKLTMENNLCPLAINMYYRCGASLEDGYFSTEALPVSATTPAIRNIRIADIKATGCRASAGFIAGLPESPIEKISVTRCEFSTNERSGVSPDESDMFLGLPQVSEKSIRLLNVKDVQFSEVKVSGPAEAFIYR

SEQ ID NO: 51781 - DNA, 1746 bp, Unknown
  Obtained from environmental sample
  misc_feature (1)..(1746): n is a, c, g, or t
ttgaatgacggcatagaatccggccttgtaaaaacgccccgaatggcagtccgtgatgacaacacacccgatgccaaaactttccgttcaaaattaaaccatatctatgccgatgaaaccgtgagagacaatatcaatcaacctgccgaatccaccgttccgcttcccgatctggttatccaagcgtacaatcttttaggttccgactggcttgaaacgtataaggcatggaaagaaaacggcacagatgttccacctgttatgataactgtcaccaaccgtaccgaaacctcaagccgtattgaatatgcgtttaagtctcaaaaaatatttataaaagaactatgcgatcctgaatatttacggcgtattgactcgaaaataatggagcaggcggaagcggaaaatatttccgttgacgatatttcaacaggcgatgacgatgataccgaaggaaaacgcaaattaaccaaaaaacaggaagccgccctattgcgtgataccataaatacggtaggtcaaaaaggcgaattaggcgaacaaattcgcaacctcatttccgtaggaatgcttaccgaaggctgggacgcaaaaaccgttacgcatataatgggtcttcgcgccttttccagtcagctattgtgtgaacaagtagtaggccgcggcctgcgccgtacttcctatgaaatcgaagaaggcggcttatacaaacccgaatacgttaatatattcggcatacctttttcattcctgccccatgaaggcgacggcggcggaggcgagcctcctcaacccaagtatgcaatacaggtaaaccacaacgccgcccaatatgaaatttcatggccaaacattattcgcatagaccatgaacctgaccctcgccttcacgttgatctctcaaagattgaaccgctaacccttgacgcaagccagacacgcctaagcgctgaagtagctcccttccttgacggcaaacctgacctgacaaaatgctcaccgattgaacttatagaccttgaaaaacatttacgtatgcaggaaataattttcaaaacttccgctcaagtctatgaaacaatcccagctaactggaaagacaaaggaactccctatgccatgctcggtcaagttttccgctgggtggaacgttatcttgaatcaagaaaaataatattggaaccggctctttttatacaggatgatccgcttaaaagaaaaataatgtatatgctgaacatgaataaaatcgtccaacatctctggaaattccttgaatgtcaaatggccaaacgtattgtgcctttctttaatcccaacagtaaaatccgttccacaggcgatatgcccacatggtggactgtaaaacaccgtgaaccattaaaaaaatctcatataagccatattgtttatgacagcacatgggaagccaccgaagcctacaagctggaaaaaaatcctcatgtaaccgcttttgccaaaaatgaccatcttggctttgttattcaatatacttttaatggcgtgtcccgcagttattaccccgatttccttataaaactggacaacggtaaaactctggtactggaaacaaaaggacaggacaatccgcaagtacaggcaaaaaaagccgcccttgccgaatgggtagaagccgtaaattcattaaaagagtacggcgaatggtgcagtgatatttctttcaatgtcgccgatgttgacgggattattgagaagtatcggtga

SEQ ID NO: 51782 - protein, 581 aa, Unknown
  Obtained from environmental sample
  misc_feature (1)..(581): Xaa is any amino acid
MNDGIESGLVKTPRMAVRDDNTPDAKTFRSKLNHIYADETVRDNINQPAESTVPLPDLVIQAYNLLGSDWLETYKAWKENGTDVPPVMITVTNRTETSSRIEYAFKSQKIFIKELCDPEYLRRIDSKIMEQAEAENISVDDISTGDDDDTEGKRKLTKKQEAALLRDTINTVGQKGELGEQIRNLISVGMLTEGWDAKTVTHIMGLRAFSSQLLCEQVVGRGLRRTSYEIEEGGLYKPEYVNIFGIPFSFLPHEGDGGGGEPPQPKYAIQVNHNAAQYEISWPNIIRIDHEPDPRLHVDLSKIEPLTLDASQTRLSAEVAPFLDGKPDLTKCSPIELIDLEKHLRMQEIIFKTSAQVYETIPANWKDKGTPYAMLGQVFRWVERYLESRKIILEPALFIQDDPLKRKIMYMLNMNKIVQHLWKFLECQMAKRIVPFFNPNSKIRSTGDMPTWWTVKHREPLKKSHISHIVYDSTWEATEAYKLEKNPHVTAFAKNDHLGFVIQYTFNGVSRSYYPDFLIKLDNGKTLVLETKGQDNPQVQAKKAALAEWVEAVNSLKEYGEWCSDISFNVADVDGIIEKYR

SEQ ID NO: 51783 - DNA, 1701 bp, Unknown
  Obtained from environmental sample
  misc_feature (1)..(1701): n is a, c, g, or t
atgcctcttgagggagcggtaattgttttgcgcggcgggcggcagtttacctgtaacagcaaaggtatcgcgcttgtcaccctgccagacgacagaccttcggtgatttcaattacttatccgggttacgagacattcaggctctcaattccgggcgcagacccggcaaagagctctcaagtcgaaaaattcaaagtagctctgcgccttggcggcattatgcagggacaggaacttgtgctggaagccgcccgccccgaaaccagcgagacaaagagcggacgcagtgtggcgatttccgaccgcgagcttacgcgcaccgccgagattggaattatcgaggacgtgatgaattcggtaaagctgcttcccggtgtgggatacacgggaatgtttagcgcaacgccgtcgatacgcgggggcgatcccggcgatttaatggcggttcttgacggcttttatgtcgagcgtccgtaccactggatgggcagcatttcaatttttgatccgaagatggtttctagcgcccggctttcccacggcgttttttcggcgcgttacggtcatacaatttccggcttgctggaaataacgtcaaaatccccttcgcagacggaaacggaaattgaggcggcaatcggaacaagcgcggcaagttttaatctttccgttcctctttccggcaagggcggcgtgctgttcatgggcaaggttacatattgggacactttgatttgggcggctcaagcgttaagccgcgaagtagagaatgaaatacttgacatggtcaacgctgtaaaaacggcgccgtatatcagaagcgcagcgctggcggcggattatcattttactccgaacttgaaatggcgtcttaacgctttcttcggcagcgacggcataggcctggattataaaaccgattataacagcagttccgacgagagcgttaaaggtgaaatggaaatgaaagccgattataataattaccagggctttatcatcacaggtttaagcgcaagcccaacgccgaaagtcgcgctcaggttatcaggcggcttcggatttctggaaacaaaaaccgaagattacatggataacaatattgaagcgacttacaatgatgaatttctggataaattcaagaatcatccgattctgtacaatgaattgaaactaaaaggcacatactcagcgccgaatattaacgcggcagtagacatggaaaacaccatatttaacgcgcaggggcgctttgatacggacattgaacttggcaaagggtttattgccgcggttggcgtacaggaactttattcaatgtggaaattaagagaagatatcagtcttgattttcttgaaatacagattttagacaaagaaggtaatttatttaaagacaaaaacgatgaattatatattgataaaatgaatctgcctcagccaattaaggacgctatttttgctttagtaggtattccgaatttatcgattattcaaaaagaaactaatttcaacggcgatgtaaagaatcaagggtttacttcatcggcttacgggttaatcgaatacaaatcacccaatcagttttttgaggcggagcttggactgcgtgttgatcatctgtttttcataggacggaatttcagtttttatacaatgcccgcgcttaacccgcgcttaaatgttgatttcaacatataa

SEQ ID NO: 51784 - protein, 566 aa, Unknown
  Obtained from environmental sample
  misc_feature (1)..(566): Xaa is any amino acid
MPLEGAVIVLRGGRQFTCNSKGIALVTLPDDRPSVISITYPGYETFRLSIPGADPAKSSQVEKFKVALRLGGIMQGQELVLEAARPETSETKSGRSVAISDRELTRTAEIGIIEDVMNSVKLLPGVGYTGMFSATPSIRGGDPGDLMAVLDGFYVERPYHWMGSISIFDPKMVSSARLSHGVFSARYGHTISGLLEITSKSPSQTETEIEAAIGTSAASFNLSVPLSGKGGVLFMGKVTYWDTLIWAAQALSREVENEILDMVNAVKTAPYIRSAALAADYHFTPNLKWRLNAFFGSDGIGLDYKTDYNSSSDESVKGEMEMKADYNNYQGFIITGLSASPTPKVALRLSGGFGFLETKTEDYMDNNIEATYNDEFLDKFKNHPILYNELKLKGTYSAPNINAAVDMENTIFNAQGRFDTDIELGKGFIAAVGVQELYSMWKLREDISLDFLEIQILDKEGNLFKDKNDELYIDKMNLPQPIKDAIFALVGIPNLSIIQKETNFNGDVKNQGFTSSAYGLIEYKSPNQFFEAELGLRVDHLFFIGRNFSFYTMPALNPRLNVDFNI

SEQ ID NO: 51785 - DNA, 663 bp, Unknown
  Obtained from environmental sample
  misc_feature (1)..(663): n is a, c, g, or t
ttggaagcgttcaaaagaagacttggcaagggcataagcgagacatggctcgacccgaaggatcttcgccgaaaactgcaaacccagcttattcagcagatcaatcttactttgcgcaacggatgggtcaggtcggatcagacattcgcgccgtcggttgccaacgaactgtcgcggctttcgacggagaacgaacagctcaggcaccagataaaaattgacagcaacgacattaccgcaagactgcgcgtacaaattaaaaacacgtttaaggtgcttgcggtaaataaagtcatattgagtttttactatgagccgggagataaatgggaaaacaaccgcagtttccgttatctgcgaatctttaaactgctggttccggagttggcggtcaaaaaaactacggcggaaatttcccatttccttggcgccgtgcttaaccccgagccgggcaaaactgtccgcaaggactaccccaccccgttaaataccgtcaaaaaaatcatgtcggacttgtctttgttaaaacttttcaaatgcaaaaataataacgaaagcgcgaacgataacgatgtatgggaaataaccgaatacggaagagagctttattccgcttaccgtatgaggcaattgaataaagcgctcggaagagccggcagttaa

SEQ ID NO: 51786 - protein, 220 aa, Unknown
  Obtained from environmental sample
  misc_feature (1)..(220): Xaa is any amino acid
MEAFKRRLGKGISETWLDPKDLRRKLQTQLIQQINLTLRNGWVRSDQTFAPSVANELSRLSTENEQLRHQIKIDSNDITARLRVQIKNTFKVLAVNKVILSFYYEPGDKWENNRSFRYLRIFKLLVPELAVKKTTAEISHFLGAVLNPEPGKTVRKDYPTPLNTVKKIMSDLSLLKLFKCKNNNESANDNDVWEITEYGRELYSAYRMRQLNKALGRAGS

SEQ ID NO: 51787 - DNA, 1221 bp, Unknown
  Obtained from environmental sample
  misc_feature (1)..(1221): n is a, c, g, or t
atggtttttcccgtaggaaaaacagaatatgacaatttctttgccgagctttcaaaagcggactcaagaataaaatttacctgtccttccaaaatctacaaaagccttaactcactcagaaaaatttatttccccggcacgtgggcgtcggcgagttttctggccaacgaagccaatccacggcagatcctcgcggattacccggaggctggcggcatttacgccaaaatgattcacgttcatacccttatcaataaccagctccgtggagacaaaacaaggaaaaggacagcgttggaagagctttggaaagcccaggattccggtatttacagcctgaagtcgcctggactctgccatgctcctctgcgtaacgccgcttatcactcacttctggaagcggaaaaaatcatcagggaaaaagagaaattaaccccgtcactttcggtttttgattttgatctggatggggcaggggagtacatttttcaggatgacaaactgaattgttttattaagccttatggagcggggatttttgaactggattatattccatgcgcctggaattaccttgataccatggcccccagaactgaatcaatgaaaagtgaaaagcgttgctcttttgtcgactggctggccccgcctgaaacgcttcctgaagacttgaaggccgaaggcatcaggggagggcgtttttgcggagtcgaggaatatgaggcgagtgatattgaccgtcttcaccgccgggctgttttttcgcttcctcaaaaaacaggtcttccctttggagaaattgaaattgtgaaaacctggcagttaaaaaagaattccctcgcgttggagtatttactaaaaaactcgggaacaaaatttcttaatttcatgttcagtacatcgcttgatctttcttttccgggcgagggtgaaaggtttctcagagttttaagcctcaatgagggagaaaaagaaaacatcccgattaacgaagggcagacaatccgaaacgttaaaaacatggaattccaggatattaaaaatgaaaccctgattagccttgaaccaagccgcggttttgacggacggattttccctgttcgctcaggctttgccggtcaggaagaataccaatccacctgccttatgaccctcctgcccgtttctcttgaagccggcaaaacatggaaggtttcgttttctcttaagattaactcctga

SEQ ID NO: 51788 - protein, 406 aa, Unknown
  Obtained from environmental sample
  misc_feature (1)..(406): Xaa is any amino acid
MVFPVGKTEYDNFFAELSKADSRIKFTCPSKIYKSLNSLRKIYFPGTWASASFLANEANPRQILADYPEAGGIYAKMIHVHTLINNQLRGDKTRKRTALEELWKAQDSGIYSLKSPGLCHAPLRNAAYHSLLEAEKIIREKEKLTPSLSVFDFDLDGAGEYIFQDDKLNCFIKPYGAGIFELDYIPCAWNYLDTMAPRTESMKSEKRCSFVDWLAPPETLPEDLKAEGIRGGRFCGVEEYEASDIDRLHRRAVFSLPQKTGLPFGEIEIVKTWQLKKNSLALEYLLKNSGTKFLNFMFSTSLDLSFPGEGERFLRVLSLNEGEKENIPINEGQTIRNVKNMEFQDIKNETLISLEPSRGFDGRIFPVRSGFAGQEEYQSTCLMTLLPVSLEAGKTWKVSFSLKINS

SEQ ID NO: 51789 - DNA, 684 bp, Unknown
  Obtained from environmental sample
  misc_feature (1)..(684): n is a, c, g, or t
atggaagcggttaaaagtattaaaaaagaatttaacattcccgtaattggcggaaacgtcgcatcaaaagagggaacccgccgcctgattgacgcgggcgctgacgcggtaaaagtcggcatcggtcccggatcaatctgtaccacgcggattgttgcgggcattggcgtgccgcagtttaccgcggtattggactgcgccgaagaagcggcaaagtcgaatattcccgttattgccgacggcggcataaaattttccggtgatattaccaaagccataggcgctggggccagcgtagtgatgattggcaatctttttgccggactcaaagaagcgccgggcagggaaataatttttgacggcagaattttcaaggaataccggggcatgggcagcatgggagccattgccgatggagcgggcgatcgttaccaaatgggcaaagatgaagagccggttcccgaaggtatagagggccgcgttccctacaagggcgagttgtctacctacatgaaccagcttgtttctggtttgcgcaagggaatgggctactgcggttgtcacaatattgaggaattaaaaaagcaccgcaaatttgtaaaaattaccgccgccggactgcgggaaagccacgctcacgatattaccattactcaggaagcgccaaattattcgcgggtttaa

SEQ ID NO: 51790 - protein, 227 aa, Unknown
  Obtained from environmental sample
  DOMAIN (1)...(213): IMP dehydrogenase / GMP reductase domain
  misc_feature (1)..(227): Xaa is any amino acid
MEAVKSIKKEFNIPVIGGNVASKEGTRRLIDAGADAVKVGIGPGSICTTRIVAGIGVPQFTAVLDCAEEAAKSNIPVIADGGIKFSGDITKAIGAGASVVMIGNLFAGLKEAPGREIIFDGRIFKEYRGMGSMGAIADGAGDRYQMGKDEEPVPEGIEGRVPYKGELSTYMNQLVSGLRKGMGYCGCHNIEELKKHRKFVKITAAGLRESHAHDITITQEAPNYSRV

SEQ ID NO: 51791 - DNA, 624 bp, Unknown
  Obtained from environmental sample
  misc_feature (1)..(624): n is a, c, g, or t
atggttgatataaaacattatacaaaattatttttcaatgaggaaacaggcaaggaaagatatggattgatacaaaaagaagctgaaattttctgtaaaaataattccattgaaaattgttgggaagccgcaattgaatgttataattgtgaattatattatatccaatcatttggagtatatattatggggattattgcctataaacaaaaaaaggcatataattttttgaaaaataaagtaagtataaatccttcatggcaagttcaggaatttctggcaatggcatttgataattattgtaaaagcattggttatgaacaatcattggaaacaataaacgaatggttaaacagtaaaaataaaaatcacagacgggctgttactgaagggttaagaatctggacaaataggccatattttaaagataatcccaaagaggcaataagaatattatcagagcataaaattgacgaaagtgaatatgtaagaaaatccgcaggaaatgcgttgagggatataagtaaaaaatatcccgaattaataaaaaatgaactgaagaaatggaaattagatacaaaagaaataaatcaagtatataaattggcaagtaaatttgtttaa

SEQ ID NO: 51792 - protein, 207 aa, Unknown
  Obtained from environmental sample
  misc_feature (1)..(207): Xaa is any amino acid
MVDIKHYTKLFFNEETGKERYGLIQKEAEIFCKNNSIENCWEAAIECYNCELYYIQSFGVYIMGIIAYKQKKAYNFLKNKVSINPSWQVQEFLAMAFDNYCKSIGYEQSLETINEWLNSKNKNHRRAVTEGLRIWTNRPYFKDNPKEAIRILSEHKIDESEYVRKSAGNALRDISKKYPELIKNELKKWKLDTKEINQVYKLASKFV

SEQ ID NO: 51793 - DNA, 465 bp, Unknown
  Obtained from environmental sample
  misc_feature (1)..(465): n is a, c, g, or t
gtggcttatgaggaatgtcagcttctggctgtaaaccgggacaactttcagaaaatgatctccacacagccccagctcatcgcaaggcttaccacccttttggcggaccgtatttggttaatttacaagcaccttgcaaattccctcatcaccgataccctgggccgaatgtacgacgcccttttaattcagcttgaaaaaaaccgcgttacatttaacccctacgcttcgtataccttcgactttggccccagggaactggccaatatggtaggcatacccccaaaggacgctaatttgctgcttaggaaaatgcttgagaacggaaaaatagtaattgaaaatgacaagattcacgcaaacaagataggtgaaataatcaagcaggccgaattctataaaaaaatgcaaaaaatagaaaacgcccgtaaaggggcaaagtcccagcttaatccggtcgggtaa

SEQ ID NO: 51794 - protein, 154 aa, Unknown
  Obtained from environmental sample
  misc_feature (1)..(154): Xaa is any amino acid
MAYEECQLLAVNRDNFQKMISTQPQLIARLTTLLADRIWLIYKHLANSLITDTLGRMYDALLIQLEKNRVTFNPYASYTFDFGPRELANMVGIPPKDANLLLRKMLENGKIVIENDKIHANKIGEIIKQAEFYKKMQKIENARKGAKSQLNPVG

SEQ ID NO: 51795 - DNA, 1362 bp, Unknown
  Obtained from environmental sample
  misc_feature (1)..(1362): n is a, c, g, or t
atgctttttacgccgtttgagataaaagaaacagtggatatgtttctccgctacaagcttgatatcagggccattaccctgggagtatcccttttggactgcgtctgcgaaaccggagcggaaacccgcaggaagatacgggaaaaactaattcgcgtcgcaagccggctggtaaaaaccgggcgcgatattgagaccgagtacggaattcccatcatcaacaagcgtctttcggtaactccgatcgctctgaccgcggcttcctgcgaggaggaggatctgacacccttcgcggtaactatggacgaagtcgccagggagctggaaattgattttatcggcggattttcggcgctggttcagaaaggatttacatcgggcgacgaacggttgattaattcactgccgcaggcgctggcgcaaactgaacgagtctgcgcttcggttaatgtggcggcaaccaaaagcggtattaatatggacgctgtgcgccgcatgggagagatcataaaggaaacggcggcaaaaaccgcgagccacgacggtataggatgcgcgaagctggttgtgttctgcaacgcgccggaagacaatccatttatggcaggcgcttttcacggagtaggggaggcggagacctgtctgaatgtcggcgtttccgggcctggcgtgctaaaagccgcgatggaaaaccacagagacgctggttttgacgagttggccgatatcataaagaaaaccgctttcaagataacccgcatgggtcagctagtcggcatggaagcggcaaatcgcatgggggttcctttcggcatacttgacctttcacttgcgccgactccggcggttggcgattcggtggcgcgtatccttgaggagatggggctcgaagccgccggaacccatggaacgacggcggctctggcaatgctgaccgacatggtaaaaaaaggcggcgttatggcctccacccacgtgggcggtttttccggcgctttcattcctgtttgcgaagacgaaggcatggccgaagctgtgaaaagcggcgcgattagtctggacaaactggaggccatgacctccgtctgctccgtgggcatggacatgatcgccctgcccggcgacaccagcgccgccacgatttcggcgattatcgccgacgagatggcgattggcatggtcaacaacaaaactaccgccgtgcgtgtaattccggttccgggcaagaaagccggggactgggccgagttcggcggcattttgggcggtgctcccgtcatggccgttaacgccgcgaagagcgacgtgttcatcaaccgaggcggaaggatacccgcgcccattcacagctttaggaattag

SEQ ID NO: 51796 - protein, 453 aa, Unknown
  Obtained from environmental sample
  DOMAIN (1)...(453): Uncharacterized ACR (DUF711)
  misc_feature (1)..(453): Xaa is any amino acid
MLFTPFEIKETVDMFLRYKLDIRAITLGVSLLDCVCETGAETRRKIREKLIRVASRLVKTGRDIETEYGIPIINKRLSVTPIALTAASCEEEDLTPFAVTMDEVARELEIDFIGGFSALVQKGFTSGDERLINSLPQALAQTERVCASVNVAATKSGINMDAVRRMGEIIKETAAKTASHDGIGCAKLVVFCNAPEDNPFMAGAFHGVGEAETCLNVGVSGPGVLKAAMENHRDAGFDELADIIKKTAFKITRMGQLVGMEAANRMGVPFGILDLSLAPTPAVGDSVARILEEMGLEAAGTHGTTAALAMLTDMVKKGGVMASTHVGGFSGAFIPVCEDEGMAEAVKSGAISLDKLEAMTSVCSVGMDMIALPGDTSAATISAIIADEMAIGMVNNKTTAVRVIPVPGKKAGDWAEFGGILGGAPVMAVNAAKSDVFINRGGRIPAPIHSFRN

SEQ ID NO: 51797 - DNA, 579 bp, Unknown
  Obtained from environmental sample
  misc_feature (1)..(579): n is a, c, g, or t
atgggcgcgggtatccttccgcctcggttgatgaacacgtcgctcttcgcggcgttaacggccatgacgggagcaccgcccaaaatgccgccgaactcggcccagtccccggctttcttgcccggaaccggaattacacgcacggcggtagttttgttgttgaccatgccaatcgccatctcgtcggcgataatcgccgaaatcgtggcggcgctggtgtcgccgggcagggcgatcatgtccatgcccacggagcagacggaggtcatggcctccagtttgtccagactaatcgcgccgcttttcacagcttcggccatgccttcgtcttcgcaaacaggaatgaaagcgccggaaaaaccgcccacgtgggtggaggccataacgccgcctttttttaccatgtcggtcagcattgccagagccgccgtcgttccatgggttccggcggcttcgagccccatctcctcaaggatacgcgccaccgaatcgccaaccgccggagtcggcgcaagtgaaaggtcaagtatgccgaaaggaacccccatgcgatttgccgcttccatgccgactagctga

SEQ ID NO: 51798 - protein, 192 aa, Unknown
  Obtained from environmental sample
  misc_feature (1)..(192): Xaa is any amino acid
MGAGILPPRLMNTSLFAALTAMTGAPPKMPPNSAQSPAFLPGTGITRTAVVLLLTMPIAISSAIIAEIVAALVSPGRAIMSMPTEQTEVMASSLSRLIAPLFTASAMPSSSQTGMKAPEKPPTWVEAITPPFFTMSVSIARAAVVPWVPAASSPISSRIRATESPTAGVGASERSSMPKGTPMRFAASMPTS

SEQ ID NO: 51799 - DNA, 387 bp, Unknown
  Obtained from environmental sample
  misc_feature (1)..(387): n is a, c, g, or t
ttgatgggttatctccttcattatttttttaagcgttcctcaaattctccgcggtactttgttcctgccacgattgagcccatatcaagagaaaggatgcgtctgcctgccagggctgcgggaacagcttcacccgcaaaaagctgcgcaaggccttccacgatggcggtttttcccacccccggctcgcctaccaaaaccggattgttctttgtccgccgggcaagaatgcgaagcgcgcgctcaatttcttttttacggcctactaccggatccagtttccccgcccttgccagcgccgtcagatcccttgaaaactcatttaaagccggcgtcagaaccggatacgaagccggtttgattctgggcccaagatttattccatag

SEQ ID NO: 51800 - protein, 128 aa, Unknown
  Obtained from environmental sample
  misc_feature (1)..(128): Xaa is any amino acid
MMGYLLHYFFKRSSNSPRYFVPATIEPISRERMRLPARAAGTASPAKSCARPSTMAVFPTPGSPTKTGLFFVRRARMRSARSISFLRPTTGSSFPALASAVRSLENSFKAGVRTGYEAGLILGPRFIP

SEQ ID NO: 51801 - DNA, 861 bp, Unknown
  Obtained from environmental sample
  misc_feature (1)..(861): n is a, c, g, or t
atggtaaaaggttatacccaattaactcagcgtatacttaatcacgacgcccaggaggaagcgcggcgctttaatgcagatcagcttttgcctgaacacgttattatagccatgctcaaagactggggaggaacggcttgcaaggcactgatgtacctgcgtattgatttgggtgaattccggcgcagccttgaaaacagccttccccgcgcgtcgactcttctattgaaaggggatgcgcccatatccgagcggacgaaaaggatgcttgagaacgccatagaagaagcaagaactctgggaaacgaatatcttggtacggagcatctcctggcggcggccttcaaggaagataattcggcggttcaggtttatcttagtcaggctgaggtaaaccttgaaatgttccgggcattggtaaagagttcttttaaccgcaagggccagacggaagcggggttttcggttggtttaaagttctcgccgggtcagagctatggaataaatcttgggcccagaatcaaaccggcttcgtatccggttctgacgccggctttaaatgagttttcaagggatctgacggcgctggcaagggcggggaaactggatccggtagtaggccgtaaaaaagaaattgagcgcgcgcttcgcattcttgcccggcggacaaagaacaatccggttttggtaggcgagccgggggtgggaaaaaccgccatcgtggaaggccttgcgcagctttttgcgggtgaagctgttcccgcagccctggcaggcagacgcatcctttctcttgatatgggctcaatcgtggcaggaacaaagtaccgcggagaatttgaggaacgcttaaaaaaataa

SEQ ID NO: 51802 - protein, 286 aa, Unknown
  Obtained from environmental sample
  DOMAIN (17)...(69): Clp amino terminal domain
  misc_feature (1)..(286): Xaa is any amino acid
MVKGYTQLTQRILNHDAQEEARRFNADQLLPEHVIIAMLKDWGGTACKALMYLRIDLGEFRRSLENSLPRASTLLLKGDAPISERTKRMLENAIEEARTLGNEYLGTEHLLAAAFKEDNSAVQVYLSQAEVNLEMFRALVKSSFNRKGQTEAGFSVGLKFSPGQSYGINLGPRIKPASYPVLTPALNEFSRDLTALARAGKLDPVVGRKKEIERALRILARRTKNNPVLVGEPGVGKTAIVEGLAQLFAGEAVPAALAGRRILSLDMGSIVAGTKYRGEFEERLKK

SEQ ID NO: 51803 - DNA, 552 bp, Unknown
  Obtained from environmental sample
  misc_feature (1)..(552): n is a, c, g, or t
ttgataagacaatctttaaccgcctgctcgaagagtcaaaggcccttgacagccaggaagttttacgcagggagaattttcttgcagacttttaattgccatttcaggcatccgataaaacttttgcttttattcgtttttacccttggctctctttcttcatgtagttcccttgaaaagttcgagaaacgggaacttgtaatcgaaggcaaagagggaagggtagttgtaaaagcggaaattgccgtcacacaagctcaacttgaacagggactaatgtaccgcaagaagattaaagacggcgagggtatgctttttatttttcagaacgatcagcttctttctttctggatgaaaaatacccttgttccgctttccattgcctatatttcgtatgacggcagaattcttgagatttacgatatgcagcccggaaacctcgatcctgtaaggtcaagccgttcggtgcgctatgctctggaggttccgcagggatggttcaagcgagcggggcttggagttggggacagactggatactcagggcctgtaa

SEQ ID NO: 51804 - protein, 183 aa, Unknown
  Obtained from environmental sample
  DOMAIN (65)...(182): Uncharacterized ACR, COG1430
  misc_feature (1)..(183): Xaa is any amino acid
MIRQSLTACSKSQRPLTARKFYAGRIFLQTFNCHFRHPIKLLLLFVFTLGSLSSCSSLEKFEKRELVIEGKEGRVVVKAEIAVTQAQLEQGLMYRKKIKDGEGMLFIFQNDQLLSFWMKNTLVPLSIAYISYDGRILEIYDMQPGNLDPVRSSRSVRYALEVPQGWFKRAGLGVGDRLDTQGL

SEQ ID NO: 51805 - DNA, 777 bp, Unknown
  Obtained from environmental sample
  misc_feature (1)..(777): n is a, c, g, or t
atgaccaaagtgaattttaattttaccaatgatgtatgttataaaggagcttttgaacttaaacgctcgatagaggaaaggaaacctatggggcttgaagttttcggccgcgaagggaaaactatttacgaggttctttcgactctgccggaaaatgtaaaggagagctggtttggctttgatcatttttattccgatatagtttttgaagaagccatccccattgttttttcccataatcctaaaaaaatcatcgatataggcgggaataccgccaaatgggcaatttgctgttgccgccatgatccccatgtggaggtaaccattttagatcttcccgggcagactcaggcagcggagcagaaaagcatgcaagccggtttttcagccagaatcaaaacccaggcttgtaatgttttaaaaaaagaaacggctatcccttcgggcgcggacgcgatttggatgagccagtttctggattgcttttctcttgacgaagttacaatgattatggaaaaagtacgttctgcggcggggccttctacgaatgtctatatcattgaacccttttgggacaaacagcgttttgaagcagcatctttctcgcttcaggctacatccctttattttacatgtatggcaaacggaaacagtaaaatgtaccgttgcgaggaacttacgcaggccgttgaaaaggccggttttgatgttgtcgatacgcggcataatcttggttccaatgattattcgcttctctgctgccggagaaaaccgtga

SEQ ID NO: 51806 - protein, 258 aa, Unknown
  Obtained from environmental sample
  misc_feature (1)..(258): Xaa is any amino acid
MTKVNFNFTNDVCYKGAFELKRSIEERKPMGLEVFGREGKTIYEVLSTLPENVKESWFGFDHFYSDIVFEEAIPIVFSHNPKKIIDIGGNTAKWAICCCRHDPHVEVTILDLPGQTQAAEQKSMQAGFSARIKTQACNVLKKETAIPSGADAIWMSQFLDCFSLDEVTMIMEKVRSAAGPSTNVYIIEPFWDKQRFEAASFSLQATSLYFTCMANGNSKMYRCEELTQAVEKAGFDVVDTRHNLGSNDYSLLCCRRKP

SEQ ID NO: 51807 - DNA, 540 bp, Unknown
  Obtained from environmental sample
  misc_feature (1)..(540): n is a, c, g, or t
gtgctggatctggccgcccgcgccggggcatggtacgtgtatcaagctatttatgacacttctgattacattaaagaacgcgttaagcgctaccacgatcacggcatcggcgttgagggcacgattctgctgggtttggacaaccagaccgaagacgacatcaaacggctcattgatttcctgctgcagataaagcttgatttggccgagtttacggtgatgacaccctttccccataccaaggcatgggatgaccttgcgcggcaggggcgcatttttgaccgcgactgggatcattttaacgcggggcaggtggtttttaccccaaaacacatgagcgccgaacgcctgcaggaactatacgatgacgcgtggaaaattttttatcaggatgagtctcaggaagaaaaaatgttccacctattttcaacggttgtcagccgtgaaatggacgacggaacctaccacccccgcaaccagcggctgattcataaatcattcggaaaagacattgtacgaaacactggggcgggcacctag

SEQ ID NO: 51808 - protein, 179 aa, Unknown
  Obtained from environmental sample
  misc_feature (1)..(179): Xaa is any amino acid
MLDLAARAGAWYVYQAIYDTSDYIKERVKRYHDHGIGVEGTILLGLDNQTEDDIKRLIDFLLQIKLDLAEFTVMTPFPHTKAWDDLARQGRIFDRDWDHFNAGQVVFTPKHMSAERLQELYDDAWKIFYQDESQEEKMFHLFSTVVSREMDDGTYHPRNQRLIHKSFGKDIVRNTGAGT

SEQ ID NO: 51809 - DNA, 387 bp, Unknown
  Obtained from environmental sample
  misc_feature (1)..(387): n is a, c, g, or t
atgttatcgccgactggaaagaaggccgtctgcaacaggtgtacaactttatgccgcagcagccgcctggttgaatcaataggtgttgccaggcgcgnatctgtaccgcgcggtgaattgtacaaccacaaaggcgttcagatggtggatctgttccacgcctcgcgcggctgccgtttcagctgttacccctgcgcggtttcctatcttggcgggcgatcattccgtccgcgcccgctggacaaagtaattgaagagctttccgctattgaaaataaccggctgtttatcgtggacaactctctggcgcaagacaaaaaatgggaaatggatctgttccgcgaaatgataccgctgaaaaagaaatggataagccacaccatataa

SEQ ID NO: 51810 - protein, 128 aa, Unknown
  Obtained from environmental sample
  misc_feature (1)..(128): Xaa is any amino acid
MLSPTGKKAVCNRCTTLCRSSRLVESIGVARRXSVPRGELYNHKGVQMVDLFHASRGCRFSCYPCAVSYLGGRSFRPRPLDKVIEELSAIENNRLFIVDNSLAQDKKWEMDLFREMIPLKKKWISHTI

SEQ ID NO: 51811 - DNA, 1176 bp, Unknown
  Obtained from environmental sample
  misc_feature (1)..(1176): n is a, c, g, or t
atgcagaagtggcgcaatgattcatcatcatattattatcagtcgtatttacagtcgtatatgctgtatgtccagtccctgctcggcgaaaagatagatccgtcccggttagctgaaattttaagccgcgataacgtggacccgtcggtgcttgccttcgtgggtatgacttaccgcgctttgaaccagaacaccgacgccgcgaataccgcgcagcgcctgcgcaactttgtccgcatgagcgcaaggggcgcggacattaccgatcctctggacaaataccgcaacagttattacggcggcatggttgaacagcttgccctgactttgcaattctttgtggatcagtatccgggcgacgatattaacacgcggctgctcttttcactgctggaaagcaaacgttccggcagtggatattgggaaagtacggcggtaacaatacgggttctttcggctgttgacgctttaatccgggcggagaaccttaccaaccttgacgtaaatggatcagttacgctggcgggaacggaactcctcaagggcgcgttcaaggggcttggtgcaaaacccgttacggaaacacttgattttaccgggcctgttttgtccggccttccgagggacagccagcaatccctgaactttacccgcagaggcaggggcaatatatattacaccgtttccctgcgttacgcgattccgtttgagcttcaaaccttccgcgacgagggcatcggtgtttttatgagcatctatgatataaataccaacgaagagatcaagggaacagccctgcaaaacggaaaaacctaccgcgccagggtaagggtgtcctcaaaccgggacaggacataccttgccctgcgggttcccgttccttccggcgcggagattctggacgcgacgtttgttaccaccgcttcctacggagacaggggcggtacaagcgggaatgaacagatacggtcaagctcatggttgagccaccagtatattatggacaacgagattcagtatttctgggatcggtttaacaagggagaatcaacggtcagtttccttttccgaacggcaaggaggggagtgtaccccacgccgccggttcaggcggagtgtatgtatgaagcggaaattttcggacgcagttcggggcttctttatactattgaatag

SEQ ID NO: 51812 - protein, 391 aa, Unknown
  Obtained from environmental sample
  misc_feature (1)..(391): Xaa is any amino acid
MQKWRNDSSSYYYQSYLQSYMLYVQSLLGEKIDPSRLAEILSRDNVDPSVLAFVGMTYRALNQNTDAANTAQRLRNFVRMSARGADITDPLDKYRNSYYGGMVEQLALTLQFFVDQYPGDDINTRLLFSLLESKRSGSGYWESTAVTIRVLSAVDALIRAENLTNLDVNGSVTLAGTELLKGAFKGLGAKPVTETLDFTGPVLSGLPRDSQQSLNFTRRGRGNIYYTVSLRYAIPFELQTFRDEGIGVFMSIYDINTNEEIKGTALQNGKTYRARVRVSSNRDRTYLALRVPVPSGAEILDATFVTTASYGDRGGTSGNEQIRSSSWLSHQYIMDNEIQYFWDRFNKGESTVSFLFRTARRGVYPTPPVQAECMYEAEIFGRSSGLLYTIE

SEQ ID NO: 51813 - DNA, 930 bp, Unknown
  Obtained from environmental sample
  misc_feature (1)..(930): n is a, c, g, or t
ttggaaacccttttgggatattcaggcattccgcagcggacatggcgcgaatggggccagcggcggggcattgagacaaagcataacaacaacatccccaaggcatattacttgacgccggaagaaatcaaggcgatagtcgcttattgcaccagcaatcctctgaaaggctaccggatgcagtgttgggagatggtggaccaaaatgtggcgtttgtatcctgtagcagcgtctataacgtcataaaacgccacaatttggacaaaaaatgggcagaattggctgaagaggcgaagaaaggctttgaccagccgcgggcggttcacgagcaatggcacatagatttttcatacatcaagatacaaaactcgttttattatttcatcggcatccttgacggctacagccggaagatgcttaactggaggctttgtaaaaacatggagggccttaatgccgagatactggttgccgaaaccaaagaaatgtacccacaggcggtctgcccgcggctgataagcgacaacggaagccagttcatatcaaaagattttcaagagcttcttgcgcttctggaattctcccacacgtttacatccgcgaaccatccgcagagcaacggcaaactggagcggttccaccgcactttgaaaactgaacacgtaaggagggcatcgtatctggaataccaagacgcctgcataaggatggcggaatggattgcgtattacaacagcgggaggcttcacagcgcgatctggtatttaacgccgaatgacgttttttacggcagggcggctagacggcttgcagaacgcanagaaaagtgcatgctgcatttatcaagagacaggaatattggcggacacaaaagtctgcatcctgacacaccttatatgcttgccttaaaaacggcaagttcagcataa

SEQ ID NO: 51814 - protein, 309 aa, Unknown
  Obtained from environmental sample
  DOMAIN (104)...(263): Integrase core domain
  misc_feature (1)..(309): Xaa is any amino acid
METLLGYSGIPQRTWREWGQRRGIETKHNNNIPKAYYLTPEEIKAIVAYCTSNPLKGYRMQCWEMVDQNVAFVSCSSVYNVIKRHNLDKKWAELAEEAKKGFDQPRAVHEQWHIDFSYIKIQNSFYYFIGILDGYSRKMLNWRLCKNMEGLNAEILVAETKEMYPQAVCPRLISDNGSQFISKDFQELLALLEFSHTFTSANHPQSNGKLERFHRTLKTEHVRRASYLEYQDACIRMAEWIAYYNSGRLHSAIWYLTPNDVFYGRAARRLAERXEKCMLHLSRDRNIGGHKSLHPDTPYMLALKTASSA

SEQ ID NO: 51815 - DNA, 1602 bp, Unknown
  Obtained from environmental sample
  misc_feature (1)..(1602): n is a, c, g, or t
gtggatggcatcgtaaccgaagggcaaagcgcggttgacgaatccatgcttaccggggagagcatgccggttgacaagaaatcaggcgatcgaatttacgcggctacgattaacagtaacggcgttatgcgctttaaagcggaaaaggtcgggggcgaaaccgcgctggcccagatcatcaagctggtagaagacgcccagagctcaaaagcgccgatagcgcaaatggcggatgttgtagccggttacttcgttccggttgtctgcgccatcgcgctcgttgccggtatagcctggtttaccgcggcatctattggtgttgtaaatttgcctcacgggaaaactgtaaccgaattcgccctgacgatttttatttccgtgctggtcattgcctgcccctgcgccctcggactcgctacaccaacggcaattatggtgggaacgggtaaaggcgcggaaaacggcattttaattaaaggcggcgaagccctggaaacagccggaaaaattcaaacgattgtgtttgacaaaaccggaacaattaccgttggaaaacctgaagttacagatattgtgcggaatgggggaacaaagagcatcactaccgatctttttctccaactggttgccgcagccgaaaaaaattccgagcatcccctcgcgtccgccattgtgcgcgaagctgaaaggcgcgagcttgaactgccgcctgtaacggatttcaaagccattccgggtagaggaattgaagctaaaattcttataaccacggagaacacggagtttcacggccaagaaccgaaggtaggaaaaaatgattatcgtactaaaaactctgtgtccctctgtgacctaccttcggttcttagccgtggttcaaattcttttaattctatttccatcctcgtcggaaataaaaaactcatggactggcggggcattccccttacggaacttgagctggtcccggatcggcttgccaacgaagggaaaacgccggtgtatgttgcgctgaacggcaaggccgtggggattgtggcggtggcggatgtgctaaaaccttccagcaaagaggcgattgagcggctccacaagatgggaattgaagtcgccatgatcaccggggacaataaaaaaaccgcaagcgccatcgccaaacaggtgggaattgaccgcgtgcttgcggaagttttgccgcaagacaaatccgccgaagtgaagaaactccagcaagaaggccgcaaagttgccatggtaggggacggcataaacgacgctccggcgctggcccaggcggacataggaatcgccataggaagcgggacggacgtggcgatggaatccgcagacatcgtgctcatgcgttccgacttgcttgatgttcccacggctatcaatttgagcaagcgtacgatccgcaacatcaagcaaaacctgttttgggcttttggctacaacgtgcttggcattcccattgccgccggtgtgctgtatctctttggagggccgctcctcaatcctgtcttcgccgctgcggccatgagtttgagctctgtgtcggtgttgaccaacgcgctgaggttaaaaaggtttaaggcgtag

SEQ ID NO: 51816 - protein, 533 aa, Unknown
  Obtained from environmental sample
  DOMAIN (1)...(166): E1-E2 ATPase
  misc_feature (1)..(533): Xaa is any amino acid
MDGIVTEGQSAVDESMLTGESMPVDKKSGDRIYAATINSNGVMRFKAEKVGGETALAQIIKLVEDAQSSKAPIAQMADVVAGYFVPVVCAIALVAGIAWFTAASIGVVNLPHGKTVTEFALTIFISVLVIACPCALGLATPTAIMVGTGKGAENGILIKGGEALETAGKIQTIVFDKTGTITVGKPEVTDIVRNGGTKSITTDLFLQLVAAAEKNSEHPLASAIVREAERRELELPPVTDFKAIPGRGIEAKILITTENTEFHGQEPKVGKNDYRTKNSVSLCDLPSVLSRGSNSFNSISILVGNKKLMDWRGIPLTELELVPDRLANEGKTPVYVALNGKAVGIVAVADVLKPSSKEAIERLHKMGIEVAMITGDNKKTASAIAKQVGIDRVLAEVLPQDKSAEVKKLQQEGRKVAMVGDGINDAPALAQADIGIAIGSGTDVAMESADIVLMRSDLLDVPTAINLSKRTIRNIKQNLFWAFGYNVLGIPIAAGVLYLFGGPLLNPVFAAAAMSLSSVSVLTNALRLKRFKA

SEQ ID NO: 51817 - DNA, 378 bp, Unknown
  Obtained from environmental sample
  misc_feature (1)..(378): n is a, c, g, or t
ttgcttgatgttgcggatcgtacgcttgctcaaattgatagccgtgggaacatcaagcaagtcggaacgcatgagcacgatgtctgcggattccatcgccacgtccgtcccgcttcctatggcgattcctatgtccgcctgggccagcgccggagcgtcgtttatgccgtcccctaccatggcaactttgcggccttcttgctggagtttcttcacttcggcggatttgtcttgcggcaaaacttccgcaagcacgcggtcaattcccacctgtttggcgatggcgcttgcggtttttttattgtccccggtgatcatggcgacttcaattcccatcttgtggagccgctcaatcgcctctttgctggaaggttttag

SEQ ID NO: 51818 - protein, 125 aa, Unknown
  Obtained from environmental sample
  misc_feature (1)..(125): Xaa is any amino acid
MLDVADRTLAQIDSRGNIKQVGTHEHDVCGFHRHVRPASYGDSYVRLGQRRSVVYAVPYHGNFAAFLLEFLHFGGFVLRQNFRKHAVNSHLFGDGACGFFIVPGDHGDFNSHLVEPLNRLFAGRF

SEQ ID NO: 51819 - DNA, 609 bp, Unknown
  Obtained from environmental sample
  misc_feature (1)..(609): n is a, c, g, or t
ttgatgttgcggatcgtacgcttgctcaaattgatagccgtgggaacatcaagcaagtcggaacgcatgagcacgatgtctgcggattccatcgccacgtccgtcccgcttcctatggcgattcctatgtccgcctgggccagcgccggagcgtcgtttatgccgtcccctaccatggcaactttgcggccttcttgctggagtttcttcacttcggcggatttgtcttgcggcaaaacttccgcaagcacgcggtcaattcccacctgtttggcgatggcgcttgcggtttttttattgtccccggtgatcatggcgacttcaattcccatcttgtggagccgctcaatcgcctctttgctggaaggttttagcacatccgccaccgccacaatccccacggccttgccgttcagcgcaacatacaccggcgttttcccttcgttggcaagccgatccgggaccagctcaagttccgtaaggggaatgccccgccagtccatgagttttttatttccgacgaggatggaaatagaattaaaagaatttgaaccacggctaagaaccgaaggtaggtcacagagggacacagagtttttagtacgataa

SEQ ID NO: 51820 - protein, 202 aa, Unknown
  Obtained from environmental sample
  misc_feature (1)..(202): Xaa is any amino acid
MMLRIVRLLKLIAVGTSSKSERMSTMSADSIATSVPLPMAIPMSAWASAGASFMPSPTMATLRPSCWSFFTSADLSCGKTSASTRSIPTCLAMALAVFLLSPVIMATSIPILWSRSIASLLEGFSTSATATIPTALPFSATYTGVFPSLASRSGTSSSSVRGMPRQSMSFLFPTRMEIELKEFEPRLRTEGRSQRDTEFLVR

SEQ ID NO: 51821 - DNA, 1254 bp, Unknown
  Obtained from environmental sample
  misc_feature (1)..(1254): n is a, c, g, or t
atgtctctgaaaaaaaatccctttgatatgcacgaactttttgccggatgcagaacattggtaatgcctaaagcggtggaaaaaggtctattgcttcacttttacgcggagccgagcgtaggaaaaaaaccggtcggcgatatcgcaaggcttcgtcaggtgtttgtaaatctgcttttcaacgcggtaaaatatacaaattccggtatggttaaacttgtgtctgatattctaagtatcgatgataaatcaataacgatacactttgaggttaaggacagcggcgttggtatgtcgccggaacagatagcgaatgtgtttaaaccgttttcgctggtggaaaaaacttataaaaacggcgctaccggacttagcttgccgattaccaaaagcattatcgaaatgatgggaggcacgctttctgttgacagtacccccggtattggaagcagattcagttttgatcttacatttgacacaattgacatatccatggatgaaatgcttcgggaaagaatttcatataaagacattgataagccgttatttgaaggcgacgttctgatatgcgaagacaattttatgaagcaggaagtcattcgcgaacatcttgcaagcgttggtttaaaaactgaagttgctgaaaatgggctaattggcatagagatggttaagaatcgaataaataaaggcgaaaagttatacgatttaatttttatggatatgcacatgcctgtaatggacggtcttgaggcggcggttgaaatcgtaaaaatgggcattaagatacctattgtcgctcttaccgctaacataatggttgatgatttggatatgtataagacgcatggtatagtagattgcgtaagtaagccgttcacatctcaggaattgtggcgttgtttgctgaaacacatgactccggtaaacaaatccggagcgcagacggagtctgacactgaaattcaggaatcgcttgaaaaatattttgtaaaagcaaatataaacaaatacgatgaaatttgcaaatgtatggaagaaggcgatataaaacaggcgcacaggctggtatatacattaaaaggaaacgcgggacaagtagggaaaaatcgtttgcagtccgccgccgccgctgtggaacatcagcttgccgacggtacaaactcggttactcccgaccagatggctgcgcttaaaaacgaattagattccgcgcttacggaatttcaatcgttaatagacgagactgtttaa

SEQ ID NO: 51822 - protein, 417 aa, Unknown
  Obtained from environmental sample
  DOMAIN (185)...(303): Response regulator receiver domain
  misc_feature (1)..(417): Xaa is any amino acid
MSLKKNPFDMHELFAGCRTLVMPKAVEKGLLLHFYAEPSVGKKPVGDIARLRQVFVNLLFNAVKYTNSGMVKLVSDILSIDDKSITIHFEVKDSGVGMSPEQIANVFKPFSLVEKTYKNGATGLSLPITKSIIEMMGGTLSVDSTPGIGSRFSFDLTFDTIDISMDEMLRERISYKDIDKPLFEGDVLICEDNFMKQEVIREHLASVGLKTEVAENGLIGIEMVKNRINKGEKLYDLIFMDMHMPVMDGLEAAVEIVKMGIKIPIVALTANIMVDDLDMYKTHGIVDCVSKPFTSQELWRCLLKHMTPVNKSGAQTESDTEIQESLEKYFVKANINKYDEICKCMEEGDIKQAHRLVYTLKGNAGQVGKNRLQSAAAAVEHQLADGTNSVTPDQMAALKNELDSALTEFQSLIDETV

SEQ ID NO: 51823 - DNA, 999 bp, Unknown
  Obtained from environmental sample
  misc_feature (1)..(999): n is a, c, g, or t
ttgatcggggtacttgtgggtatttcggctttgatttcttgcgccgttattgccgttcattcaggtatgaataaagaaaacgccgcctcgcaggataatgcggcggggcagccggaaaaagtcgagacggtaaagcagacagttcccgaaaaaccggcgccgcaggttgttgaaactcccgcgcttgaagctgaaaaaaaagagaccgtttcaaccgttaaaaaacaggttacgcctaaaaacgccaaacctgtacaaaaaacgccgcctgttcaaaatgcacctgttgccacaacagtttccgcagatatcaatcccaagactgcggttgaaaataaggggacattggtttttataattgacgatgccggaaataacttaaaagaacttgagccgtttttgcgaattcaatttccgtttacaatagccgttttgccggggcttcctcattcggcggaagcggcgaaacgtatcagggaaagcgggaaagaggtgtttttacatcagccgatggaagctataggcggacaagatccgggtcccggagcgattacttcgggcatgagcgcggaagaaataagagcggtgttgacacgtaacgttaatgaaatcggacccatcgccggaataaacaatcatcaggggtcaaagataacgatggataaagaggcgatgaaaacgatattggctttttgtaaagaaaaaggaatatgttttgtcgattccagaacgaccgccgacactgttgttcccgaggtggcaaaacagatgggcataaaaatcgccgaaagaaatgtttttgtcgataacgagcagaataaagacgctatgttccgctatatttcaacaggacttacaagagcgcagagaaacggcagcgcagtgatgatagggcatacttggtcgcccgatctagcgcctttacttgccgagcaatttcctattttaatcgaacagggttacacactaaagaccgcttctgatataatcaagaaatga

SEQ ID NO: 51824 - protein, 332 aa, Unknown
  Obtained from environmental sample
  SIGNAL (1)...(28)
  DOMAIN (118)...(331): Divergent polysaccharide deacetylase
  misc_feature (1)..(332): Xaa is any amino acid
MIGVLVGISALISCAVIAVHSGMNKENAASQDNAAGQPEKVETVKQTVPEKPAPQVVETPALEAEKKETVSTVKKQVTPKNAKPVQKTPPVQNAPVATTVSADINPKTAVENKGTLVFIIDDAGNNLKELEPFLRIQFPFTIAVLPGLPHSAEAAKRIRESGKEVFLHQPMEAIGGQDPGPGAITSGMSAEEIRAVLTRNVNEIGPIAGINNHQGSKITMDKEAMKTILAFCKEKGICFVDSRTTADTVVPEVAKQMGIKIAERNVFVDNEQNKDAMFRYISTGLTRAQRNGSAVMIGHTWSPDLAPLLAEQFPILIEQGYTLKTASDIIKK

SEQ ID NO: 51825 - DNA, 1020 bp, Unknown
  Obtained from environmental sample
  misc_feature (1)..(1020): n is a, c, g, or t
atgaaagttctcggcattgaaacatcatgcgatgaatgttccgccgcgattgtagaagacggcgaaaaaattatttccaatgttatcgccactcaaataccctttcacgccccgtggagcggagtagtccccgaaatagcaagcagaaaacacaccgagtggatttacgccgtcacaaaagaagcgttggataaagcgggcatgaaagttgaggacatcgacgctgtagccgtaacaaaccgtcccggtcttttaggctcattgttagtcgggctttcttttgcaaaagcgttcgcatggtcacgcagcattccgtttatcgccgtcgatcatatgctggcgcatttgtacgcccctagattaatttcttccgcaaaatgcgaatacccttttttgggactccttgtttccggcggacatacaatcatttgcagagccgataattttgacaatattacagtcctcggcacaacaatagacgatgccgtaggcgaagcgtttgataaagtagcgaaattttacaatttcggctatccgggtgggtccatcattgataaaatggcgcagaatggagacagcaccgtttttaattttcccatgccgtccctgcacaagggcgatcatcgttatgacgtgtcatattcaggtttaaaaaacgccgttataaatcaacttgacatcttcaaaaaaaagcccggcccccacacaaacgaagacattgccgcttcctttcaaaaaaccgccattcaaatcttcttacgcgccatgttaaacgccgccgaagacaccggcattaccacatttgtcgcgggcggcggcgttgccgccaacagttaccttcgctcctgccttgccgaacaaaaaagccttcgctgtattttccccccacaagacttatgcggtgataacgccgccatggtagccggaataggctaccaatatcttgtagggggggggcagtcgccattaaatattaccgcaagtgcaagagtaaccggttttaagaaaaaatacccataa

SEQ ID NO: 51826 - protein, 339 aa, Unknown
  Obtained from environmental sample
  DOMAIN (23)...(309): Glycoprotease family
  misc_feature (1)..(339): Xaa is any amino acid
MKVLGIETSCDECSAAIVEDGEKIISNVIATQIPFHAPWSGVVPEIASRKHTEWIYAVTKEALDKAGMKVEDIDAVAVTNRPGLLGSLLVGLSFAKAFAWSRSIPFIAVDHMLAHLYAPRLISSAKCEYPFLGLLVSGGHTIICRADNFDNITVLGTTIDDAVGEAFDKVAKFYNFGYPGGSIIDKMAQNGDSTVFNFPMPSLHKGDHRYDVSYSGLKNAVINQLDIFKKKPGPHTNEDIAASFQKTAIQIFLRAMLNAAEDTGITTFVAGGGVAANSYLRSCLAEQKSLRCIFPPQDLCGDNAAMVAGIGYQYLVGGGQSPLNITASARVTGFKKKYP

SEQ ID NO: 51827 - DNA, 1542 bp, Unknown
  Obtained from environmental sample
  misc_feature (1)..(1542): n is a, c, g, or t
atgagtttgcagctctggattggctcccttcttgccttgcttaccgggttaatcattggctggattataagatggctgtacgccagatatcaacttacgtcaacggagcagtttgctgaacgtgtaaaacatgatgctattaaggaagctgaggctgaaaagaaggacatccttctagaagcaaaagaacaagtaatccgtgaacggaaccagcaggagagggaaacccgagaacgcagggctgaacttcagcggtacgagcgccgcgttgtacagaaagaagaagctattgataaaaagattgctcaaatcgagaagactgagcagttatttgcagataaagaaaaggcttttcaacaccgggaagagtcactttcacacgaggaacaacgctacaggaaggaactggagcgtatttcggggttaagctcacaagaagcaaagtctcttatcataaagaaccttgaaagcgaggcaaagcacgatgcccagtctttaatcaacaagattgagcaggaagccggagccgccgcggagaaaagagccaaggatattcttgtcacaacgattcaaaggcttgccacggaagtaaccggggatttaaccgtaacgaccgttaccttgccaaatgatgaaatgaaggggcgcattatcggcagggaaggccgcaatatccgcactttggaaacccttacgggcgttgatataataattgacgatacgcccgaagcggtggttatttcctgtttcgatcctgtgcgccgtgaaatagccaaagtcgccatggaacagctaattcttgacgggcgtattcaccctgccaggatagaggaaattgtaatcaaggttagcaaggacatctcccaaaaaatctttgaagaaggagaaaaagtccttttcgatcttggaattcacaacatcaaacaggacgcgattcgcacccttggacggctttatttccgcaccagttacgggcagaacgtcctttaccattcaaaagaagtggcggttattgccggaatgttggcggctgaaatcggcggatgcaaccgggaactggcgaagcgggccgccctgctccacgacataggcaaaggcgtagagtctgactctgaccttaaccacgcggaaatcggcatggacatggcccgcaaattgggggaagaccccagggtcattaacgccatcggcagccatcacaacgacattgaacctacctgcctggaatcggtgcttgttcaggtcgcggacgcaatttccgccgcccggccaggcgcacggcgtgaaaccctggacaactacgtcaagcgcctcgagaaccttgaaagcatcgcgacaggctttatcggcgttgacaaggctttcgcgattcaggccggaagggaactgcggatcatagtgaacaatgaaacgcttaacgatgaaagatccagagagctggccagggaaatagcacagaagatcgaaagcgatctccgctatcccggcagaataaaggtaacgattatccgggaaacgagggttactgaatacgccagataa

SEQ ID NO: 51828 - protein, 513 aa, Unknown
  Obtained from environmental sample
  DOMAIN (203)...(262): KH domain
  misc_feature (1)..(513): Xaa is any amino acid
MSLQLWIGSLLALLTGLIIGWIIRWLYARYQLTSTEQFAERVKHDAIKEAEAEKKDILLEAKEQVIRERNQQERETRERRAELQRYERRVVQKEEAIDKKIAQIEKTEQLFADKEKAFQHREESLSHEEQRYRKELERISGLSSQEAKSLIIKNLESEAKHDAQSLINKIEQEAGAAAEKRAKDILVTTIQRLATEVTGDLTVTTVTLPNDEMKGRIIGREGRNIRTLETLTGVDIIIDDTPEAVVISCFDPVRREIAKVAMEQLILDGRIHPARIEEIVIKVSKDISQKIFEEGEKVLFDLGIHNIKQDAIRTLGRLYFRTSYGQNVLYHSKEVAVIAGMLAAEIGGCNRELAKRAALLHDIGKGVESDSDLNHAEIGMDMARKLGEDPRVINAIGSHHNDIEPTCLESVLVQVADAISAARPGARRETLDNYVKRLENLESIATGFIGVDKAFAIQAGRELRIIVNNETLNDERSRELAREIAQKIESDLRYPGRIKVTIIRETRVTEYAR

SEQ ID NO: 51829 - DNA, 1293 bp, Unknown
  Obtained from environmental sample
  misc_feature (1)..(1293): n is a, c, g, or t
atgaaaaaggtatatagcaagattgaatcaataaccggaagcgttatcaccgtccgggccgaaggtatccgctacggtgaccttgccgaagttgacacggtatttggcacttcgcttgccgaggttaaccgcctctctaacgatctggtttcactccaggtcttcgccggcgggcggggtatttcaaccggcgacacggtgcgctttttggggcatcccatgcaggtgccgttttctgaaaaccttatgggccgggtcttttccggttcgggcaagccgcgggataatggtcccgccctgcacgagaatctgattcccatcggtggcccgtcggtcaatccctcccagcgcattgtcccccgcaacatgatccgcaccggcatccccatgatcgacctctttaacaccctcgtcgtttcccagaaactgccgatcttttcggtttccggcgaaccctacaatgaactgttggcgcgtatcgccatgcaggcggaagttgacgttatcatcctcggcggcatgggtctgaaatacgatgattacctatttttcagggatttcttggaagaacacggtgctcttagtcgcacggtttctnttatgcacacagcctctgaccccattgttgagtgtttgctggttccagatgcagcacttgcggttgcagaacaatttgcaattcagggcaaaaaagtgttggtgcttttgaccgatatgacaaactttgcagatgcaatgaaagaaattgcaatcacaatggaacaagtgccctccaaccgtggctatcctggcgatttatattcccagcttgccagccgctacgaaaaagcagtggattttgaaggttcgggttcaataaccatccttgccgtgaccacaatgccaggcgatgacgttactcaccctgttccagataacacaggctacataaccgaaggtcagttctatttgcgcaaaggcagaattgagccatttggctctcttagccgcttaaaacagcaggttaatggcgacactcgtcaagaccatcgcacaataatgaacactatgattcagctttattccagctacaaagaaacacttgaaaagcaatctatgggtttccgcatgagcaattgggatgcaaagctcttgaaatacggtgttcgctttgaaaaggaaatgatggatttgtctgttaacattcctttggaaacggctttggacctcggttggaaaatccttgcagattgctttaagtccgaagaaacgggtattcccagcaagctgatagagaagttctggccaaagtaa

SEQ ID NO: 51830 - protein, 430 aa, Unknown
  Obtained from environmental sample
  DOMAIN (8)...(71): ATP synthase alpha/beta family, beta-barrel domain
  misc_feature (1)..(430): Xaa is any amino acid
MKKVYSKIESITGSVITVRAEGIRYGDLAEVDTVFGTSLAEVNRLSNDLVSLQVFAGGRGISTGDTVRFLGHPMQVPFSENLMGRVFSGSGKPRDNGPALHENLIPIGGPSVNPSQRIVPRNMIRTGIPMIDLFNTLVVSQKLPIFSVSGEPYNELLARIAMQAEVDVIILGGMGLKYDDYLFFRDFLEEHGALSRTVSXMHTASDPIVECLLVPDAALAVAEQFAIQGKKVLVLLTDMTNFADAMKEIAITMEQVPSNRGYPGDLYSQLASRYEKAVDFEGSGSITILAVTTMPGDDVTHPVPDNTGYITEGQFYLRKGRIEPFGSLSRLKQQVNGDTRQDHRTIMNTMIQLYSSYKETLEKQSMGFRMSNWDAKLLKYGVRFEKEMMDLSVNIPLETALDLGWKILADCFKSEETGIPSKLIEKFWPK

SEQ ID NO: 51831 - DNA, 1650 bp, Unknown
  Obtained from environmental sample
  misc_feature (1)..(1650): n is a, c, g, or t
ttgccttgttttcggcgcaaaccgcagtttattctctgttccgctacaatcggcaacccgaaagagcttgcgcaggcgcttacaggccttcccgtagagttagttgataaaaacggcgcgccgcgcggagaaaagaggataatcctgtacaacccgcctcttgttgacaaagtgcagggtatacgccgttccgtggtaacggaaagccgccgctggatgatagccttactaaaagcgggaataaagactatacttttcgcgcactccagggtaaagactgaagtagccgcctcctatgtaaacgaggacttaaaaaatatctttacagataactcccgcataagggtagaggcgtaccgcggcggatttttgcccaacgagcgccatgagatagagcggggactgcgcgacggcgatattcagggagttgtttctactaacgcgctggaattgggaatagacatcggcggtcttgacgcttcgattgtcgcgggtttccccggctcttttaacagtttctggcagcagtcgggcagggcggggcgcagaggcggcaccgccgtatcggtgtttatcgcgacggtttctcctatcgatcaatttattatgaatgaccccgaatggtttttccgcaaaaacgccgaagaagcccgaatagaccccgataacccatacattttaacagatcatgtcaaatgcgcctgttttgaactgccattccttgacggcgaactggaagagtcaggcggaatttacggagaaaacgcaaaggacgtccttgattaccttgaggaatcgggcattgtgcgccatacggcgggaaaatggcattgggcggatcgttcctatcccgcggaagcggttagtcttcgcagcgcaagcgcggacaatgtggtaattattgatttaacggacggcagaaattccgtgataggggagatggacaggcctagcgccaaagagcttatctttgtaaacgccgtgtatattcaccgcggacggcagtatctggtggaagaacttgatattgaaaaccgcaaatgccttgtccgcgaagcggacgtaaattattttacagacgggcttgttaagacggacattaaagttttatccgaagacgaaaaaataaagtacaatgaagccgagggcgttctgtcagacgttcttgtccgctctcaggtgaccaagttcaaaaaaatacgtttccgtacccatgagaatatcggctacggggatataactcttcccgaggaggaaatgcagacgcgctcgctcgccctgcttttcggccccgaaaccgaatgcggcaaagtgttaaaagaaatggacgaacagcggacaggcgaggccctttacggaacgggcaatcttatccgcaatattgcgccagtttttcttctatgcgacccccgcgaccttggaatcgccgagcgagtgcgcgatccgcacttcggcgttcccgctctttacatttacgataaatatcccggcggaacaggccttaccgaaagccttgcgcggccgcatagagcctctgttagacgctatccgcgaggctgtaagccgctgtccgtgcgggaacggctgtcccctcctggcgtgggagcgggcggtaataaaaaagctgttaagaaatttttaagtgtataa

SEQ ID NO: 51832 - protein, 549 aa, Unknown
  Obtained from environmental sample
  SIGNAL (1)...(24)
  DOMAIN (108)...(184): Helicase conserved C-terminal domain
  misc_feature (1)..(549): Xaa is any amino acid
MPCFRRKPQFILCSATIGNPKELAQALTGLPVELVDKNGAPRGEKRIILYNPPLVDKVQGIRRSVVTESRRWMIALLKAGIKTILFAHSRVKTEVAASYVNEDLKNIFTDNSRIRVEAYRGGFLPNERHEIERGLRDGDIQGVVSTNALELGIDIGGLDASIVAGFPGSFNSFWQQSGRAGRRGGTAVSVFIATVSPIDQFIMNDPEWFFRKNAEEARIDPDNPYILTDHVKCACFELPFLDGELEESGGIYGENAKDVLDYLEESGIVRHTAGKWHWADRSYPAEAVSLRSASADNVVIIDLTDGRNSVIGEMDRPSAKELIFVNAVYIHRGRQYLVEELDIENRKCLVREADVNYFTDGLVKTDIKVLSEDEKIKYNEAEGVLSDVLVRSQVTKFKKIRFRTHENIGYGDITLPEEEMQTRSLALLFGPETECGKVLKEMDEQRTGEALYGTGNLIRNIAPVFLLCDPRDLGIAERVRDPHFGVPALYIYDKYPGGTGLTESLARPHRASVRRYPRGCKPLSVRERLSPPGVGAGGNKKAVKKFLSV

SEQ ID NO: 51833 - DNA, 831 bp, Unknown
  Obtained from environmental sample
  misc_feature (1)..(831): n is a, c, g, or t
ttgatggcgagccggccgctttttgacacgggaatcgccgaagaacatgccgcaaccttttccgccggtcttgccgcaagaggactgcgccccatcgcggcaatttactcgacttttatccaaagatcggtagatcagataatacacgacgccgcccttcaaaaccttcccgtcatttacgctctggacagggccgggtttgtaggcgcagacggcgagactcatcaggggttattcgatatctccctgttccgcagtacgcccaatatgacaatcctttctccggcaagcgagaacgagcttcgccttatgacggactgggcgcttggaaaaaaagacgggcctgtcattatccgctacccaaaagcgtactgccccgccgaatgcgccgctttttcacagcctttagaagaagggcggggggtttttacctctcaggaaaaaaaggggcaggtttgtctttttttcacgggaagcctttacagggaagcgcatgaagccgccgcgattcttaaacaacagaacatagagacggatctttacaatcttcgtttcctgaaacccatagacgaagattataccgccggattaatgaacgaatacaaacttgcggtttttatcgaagaagggataaaagagggaggcataggcgaatatttaacttctcttgccctaacacgtaatgttaaatgcaaaaccgcgatattggcggcgcaaagtaatttttttgagggaaacagggcgttggggacaagagatgaactgcttgcggaaaacggacttgacgggaaaagcatagcgttaaaaacaaaaaattatttatacacttaa

SEQ ID NO: 51834 - protein, 276 aa, Unknown
  Obtained from environmental sample
  DOMAIN (139)...(266): Transketolase, C-terminal domain
  misc_feature (1)..(276): Xaa is any amino acid
MMASRPLFDTGIAEEHAATFSAGLAARGLRPIAAIYSTFIQRSVDQIIHDAALQNLPVIYALDRAGFVGADGETHQGLFDISLFRSTPNMTILSPASENELRLMTDWALGKKDGPVIIRYPKAYCPAECAAFSQPLEEGRGVFTSQEKKGQVCLFFTGSLYREAHEAAAILKQQNIETDLYNLRFLKPIDEDYTAGLMNEYKLAVFIEEGIKEGGIGEYLTSLALTRNVKCKTAILAAQSNFFEGNRALGTRDELLAENGLDGKSIALKTKNYLYT

SEQ ID NO: 51835 - DNA, 735 bp, Unknown
  Obtained from environmental sample
  misc_feature (1)..(735): n is a, c, g, or t
gtggaagtgccgtattatacaacggataccgtaaacgacattattacccgcattaacaattcaggcgcggaagttgtcgcccgtcttaacagagacggtaaaatttcgttaaaaggaacaactgcggaattaattaacgggcagagagttaacccagattttgttatacgtcatgttgaagattcaggtcatttccttgccgggtacgccggtcttcttaatcaatcgggagcggaaggcgcttatgattggggacgcgccgacgcggtaacaagccttaggggcgacacaacagattacgcgctggctcctgttgcgcatccggcaggctggatagaagttaacccgatgctgataagagattcaacaaatgtcgccgcaggtttcggcgagaacggaagagtcgccaacccgggaaacggagaagccgcgctggctatcgctaacatacggaataatcccgtaatggtagggcgttttgccacatttgacgattacttcgcgaactcggtgggaaatatcggggaaatgggcaaagaagcaagatcagcgttggctacggaaaatcagataatgaaatatttacacgattggagacagtcaatttccggcgtaaatatggacgaagaacttaccaatatgctgaagtttcagcatggctacaatgccgtggcaagatatatcacaacagttaattcaatgttggatacattaatcaaccgcatgggcgtttga

SEQ ID NO: 51836 - protein, 244 aa, Unknown
  Obtained from environmental sample
  DOMAIN (203)...(241): Domain of unknown function (DUF1078)
  misc_feature (1)..(244): Xaa is any amino acid
MEVPYYTTDTVNDIITRINNSGAEVVARLNRDGKISLKGTTAELINGQRVNPDFVIRHVEDSGHFLAGYAGLLNQSGAEGAYDWGRADAVTSLRGDTTDYALAPVAHPAGWIEVNPMLIRDSTNVAAGFGENGRVANPGNGEAALAIANIRNNPVMVGRFATFDDYFANSVGNIGEMGKEARSALATENQIMKYLHDWRQSISGVNMDEELTNMLKFQHGYNAVARYITTVNSMLDTLINRMGV

SEQ ID NO: 51837 - DNA, 936 bp, Unknown
  Obtained from environmental sample
  misc_feature (1)..(936): n is a, c, g, or t
atgaggttactgggagtgcgggatcgttatatacacgaaatggaacagatttatcttgagaccggagaaaattccgtaagaagtaaaatggataaattctgggatggatggcaggaattgtcacagcacgcctcggaaaatgaattccgtaatgcggttattcaacgcggaaaaacattaattgacggagtaaaaaatcattatcacggtcttgacagactccaaacccagatcaatgacgatattcaaatgacagttgccagagtaaatgaactttcacgccaaatagcggctcttaacggcgacattaccagaataaaagcgcagggcgataacccgaacgatctcctggacagacgtaattatctgttagacgaactttcatcgataattgacgtaacttttacggaacaagaccccgatgaattcatggttcatacttcaggtcatattcttgtacagggacaggtcggcagacaatttgacatgagaaaagacgttgatgctgaaagttttgcgtacatctattggcaggatacgcaagatgaaatggtttttaccagaggccaactcggcgctcttatggaacttcgcgacgtaacaatccaaaatgaaatccaaactcttgataacatggtaatgaattttacagacctcgtaaatgaaatccaccgtgacggatacggagcgaacggatcaacaggtatcaacttcttttccgaatacccatttgttaccaacgtaaacggaaactatgatcgctcaggcgacggagttttcgattcaagttacatataccgaattaacgggcagaatacccttgagccgaacgcgcagcccggtttgaaggacaatacncctctcaggagccgacagacaggtggaagtgccgtattatacaacggataccgtaaacgacattattacccgcattaa

SEQ ID NO: 51838 - protein, 311 aa, Unknown
  Obtained from environmental sample
  misc_feature (1)..(311): Xaa is any amino acid
MRLLGVRDRYIHEMEQIYLETGENSVRSKMDKFWDGWQELSQHASENEFRNAVIQRGKTLIDGVKNHYHGLDRLQTQINDDIQMTVARVNELSRQIAALNGDITRIKAQGDNPNDLLDRRNYLLDELSSIIDVTFTEQDPDEFMVHTSGHILVQGQVGRQFDMRKDVDAESFAYIYWQDTQDEMVFTRGQLGALMELRDVTIQNEIQTLDNMVMNFTDLVNEIHRDGYGANGSTGINFFSEYPFVTNVNGNYDRSGDGVFDSSYIYRINGQNTLEPNAQPGLKDNTPLRSRQTGGSAVLYNGYRKRHYYPH

SEQ ID NO: 51839 - DNA, 996 bp, Unknown
  Obtained from environmental sample
  misc_feature (1)..(996): n is a, c, g, or t
gtgaacgataggattaaagctctaatcaaagaagtaaacaagaccccttccgggcttcagattgtgctgtcgcgcaccgaccccgattttgtcagggctatttttgagcttgaagttccggagatatacgataaaaccgttgagatacacaagatcgtcagggaggccggttacagaaccaaacttgccgtgtattcaaaccgtgacgacgttgatcctgtcggcgcctgcgtaggcctcaagggcgtgaggatacaagcggttataaaggagcttgagggagagaagatcgacatactaaaatatgatcccgatccgcggcactttattaaaaacgccctttctcccgccgaggtaagagacgtgatcatcctcagcgagaaatcgaaaaaagcccttgccgtagtgaacgattcccttttatcgcttgccataggcaagcagggccttaacgtgcgccttgccaacaaactgaccgactggatgatagacgtgaagacagacgcgcaattcgccgaaatggatattgccgccgaatccaaacgggcggttaaggagctttttggggaaggcgagacagaagagttctccagaatctcggaacttcccggagtggatcccgccgttgctcaggccttgcttgataatggtattgactatatcgttgacttccttgaactgaacaaggaacagcttgacgcgatggaaaatatatcggatgagcaaattacggttttacgcagcctgattgacgactctgttgaaatactggaagaagaggcggaagattcaaccggaagagaatttgccggagaagatgttctcattggcgactcaaggagcgctgatggtgaagaaaacgcggaagagatagaatgtcccgaatgtcatgaaaaattcgttcttgatatggacggtttttcaggaggcaccattaactgccccaactgcggcgcggagctggaattgagctttgagaaagaggaaggggattaa

SEQ ID NO: 51840 - protein, 331 aa, Unknown
  Obtained from environmental sample
  misc_feature (1)..(331): Xaa is any amino acid
MNDRIKALIKEVNKTPSGLQIVLSRTDPDFVRAIFELEVPEIYDKTVEIHKIVREAGYRTKLAVYSNRDDVDPVGACVGLKGVRIQAVIKELEGEKIDILKYDPDPRHFIKNALSPAEVRDVIILSEKSKKALAVVNDSLLSLAIGKQGLNVRLANKLTDWMIDVKTDAQFAEMDIAAESKRAVKELFGEGETEEFSRISELPGVDPAVAQALLDNGIDYIVDFLELNKEQLDAMENISDEQITVLRSLIDDSVEILEEEAEDSTGREFAGEDVLIGDSRSADGEENAEEIECPECHEKFVLDMDGFSGGTINCPNCGAELELSFEKEEGD

SEQ ID NO: 51841 - DNA, 777 bp, Unknown
  Obtained from environmental sample
  misc_feature (1)..(777): n is a, c, g, or t
ttggccttcagatccagaagctccgcttcaagaagtatagtatcaataagtttgtctattccgattttttgcagggccgaaagctcgacaaacatcgtctggccgccccattcctccggcataaggccaagctctgaaagttggctctttacgcggtcgggtcttgcctccggcttgtcaattttgtttactgcgacaatgattggaaccccggcttcctttgcgtggttgatcgcctcaatggtctggggcatgaccccgtcatcagcagcaacaaccagcaccacaatgtccgtaacctgcgcaccccgcgccctcatccgtgtaaatgcctcgtggcccggcgtgtcaaggaaggtgattctaccgtgcggggtttctaccatgtatgcgccgatgtgctgtgttatcccgccaaactcgcccgacaccacgtccgctttacggatcgcgtccagcagtttggttttaccgtggtcaacatgtcccataacggttacgaccggcggcctgggcagcatatccgcgccttcgtccgtgccggtgtcaatgattgtttcgtcgtacaggctgatgatttttacgtcggcgccgaattcggcggccagtatagtcgcggtatcggcgtctatctgctggtttatggtgaccatcatgccaagcttcatcagcttttggattaagtccgacgccttgaggttcatttttctcgccagttcagaaaccgagatattttccatgatctcgattgacttgggaaccgggttggcaacgtag

SEQ ID NO: 51842 - protein, 258 aa, Unknown
  Obtained from environmental sample
  SIGNAL (1)...(26)
  misc_feature (1)..(258): Xaa is any amino acid
MAFRSRSSASRSIVSISLSIPIFCRAESSTNIVWPPHSSGIRPSSESWLFTRSGLASGLSILFTATMIGTPASFAWLIASMVWGMTPSSAATTSTTMSVTCAPRALIRVNASWPGVSRKVILPCGVSTMYAPMCCVIPPNSPDTTSALRIASSSLVLPWSTCPITVTTGGLGSISAPSSVPVSMIVSSYRLMIFTSAPNSAASIVAVSASICWFMVTIMPSFISFWIKSDALRFIFLASSETEIFSMISIDLGTGLAT

SEQ ID NO: 51843 - DNA, 543 bp, Unknown
  Obtained from environmental sample
  misc_feature (1)..(543): n is a, c, g, or t
ttggctctttacgcggtcgggtcttgcctccggcttgtcaattttgtttactgcgacaatgattggaaccccggcttcctttgcgtggttgatcgcctcaatggtctggggcatgaccccgtcatcagcagcaacaaccagcaccacaatgtccgtaacctgcgcaccccgcgccctcatccgtgtaaatgcctcgtggcccggcgtgtcaaggaaggtgattctaccgtgcggggtttctaccatgtatgcgccgatgtgctgtgttatcccgccaaactcgcccgacaccacgtccgctttacggatcgcgtccagcagtttggttttaccgtggtcaacatgtcccataacggttacgaccggcggcctgggcagcatatccgcgccttcgtccgtgccggtgtcaatgattgtttcgtcgtacaggctgatgatttttacgtcggcgccgaattcggcggccagtatagtcgcggtatcggcgtctatctgctggtttatggtgaccatcatgccaagcttcatcagcttttggattaa

SEQ ID NO: 51844 - protein, 180 aa, Unknown
  Obtained from environmental sample
  misc_feature (1)..(180): Xaa is any amino acid
MALYAVGSCLRLVNFVYCDNDWNPGFLCVVDRLNGLGHDPVISSNNQHHNVRNLRTPRPHPCKCLVARRVKEGDSTVRGFYHVCADVLCYPAKLARHHVRFTDRVQQFGFTVVNMSHNGYDRRPGQHIRAFVRAGVNDCFVVQADDFYVGAEFGGQYSRGIGVYLLVYGDHHAKLHQLLD

SEQ ID NO: 51845 - DNA, 1866 bp, Unknown
  Obtained from environmental sample
  misc_feature (1)..(1866): n is a, c, g, or t
atgaaagaaatagaccggttttgcggcttttatggttatattgaaaaaattcaagggggccctgcttttattcacagccttcatatggaatcgccgggcgattatacacccgaagatcgtctctggtacaaggccgctattacagccaacggcggcattaccgaaacaattccatatacagatttaataaccgagactaacattatttcatactcatgctgtatttttgacgatgagggcgcttatttgggggtggttagtattgatgtgcacctggactatatcgggaacagagtcattaattcggcccttaccgaatatggctatggaatgttggtcagccaggacttgaccgtaatcacccattccaaccctgattttatcggattaaaaatgtacgatccggtgattcccgtttcgatttatacggatgaaatattggagaaaggtattatttcagaggccccagtgataaattggaaaggtgaaaaagctctcgcctttacaaggaggctttcgaatggctggtacttaattattttaacgctaaaagatgtttattacaaaagcctgaccgatatggccgcaaccctaagcctatttggcatagtacttgcggcggtactgatcgtcgtcttgattgatgttgacgcggcccgggaagaatctaatctggaaagtaggcataagagcgcgtttctggccaacatgagtcacgaaatgcgcactccgatgaacgcaataatcggcatgacaaccattggaaagacagctctcgatgtcgaacgcaaggattattgctttgaaaaaatagatgaggcctcaaaccatttactcggggtaataaacgatgttctggacatatccaaaatagaagccgataaatttgaactctcatcggaggagtttaattttgagaatatgctgcagcacgcgctgaatgttatccgttttcgggtggacgaaaagcagcagacattctcggtatatatcgatcaggctatcccgaaagtcatgataggggacgaccagcggctggcccaggtcataaccaatctgctgggaaacgcggtcaagttcactcccgagcagggttgcgtcagccttgcggcgcgttatgtgggagaagaaaacggtctttataccatacagatttccgtaaccgataccgggatcggtataagtcccgaacagcaaacaattctgtttcaacctttccagcaggccgaatccggtactacgcgcaagtacggaggtacaggtctgggccttgcgatttgcaaaaggattgttgaaatgatgggcggcaggatatggattgaatcggagcttggaaagggctctacttttgcctttacaatccaggcgcataagagcttgcttgcgaactcttcgaacagccaagcgtgctcttcgggtacgggtaatcaaccggcagaaaaagagcagactgatattgagggcatttttgctggccggcacattcttttggccgaagatgtggaaattaaccgtgagatcgtcagagccctgcttgaaccaacgcagttggaaatagactgcgcggtaaacggcaaagaagctctagacatgttcaggcagtcacccgataaatacgatatgattttcatggatatgcaaatgcctgaaatggacggctacgaggcgacgcggcacatcagagcgcttgatctgccaagagctaaaaccataccgataatcgccatgaccgcaaatgtgttccgcgaagatgttgaaaagtgcctcgaggccggcatgaactgccacatcggaaaaccgctggattttaacgatgttatggaaaagctgtacagttatttgcctttccggaagaaggcgtcgtag

SEQ ID NO: 51846 - protein, 621 aa, Unknown
  Obtained from environmental sample
  DOMAIN (53)...(135): Cache domain
  misc_feature (1)..(621): Xaa is any amino acid
MKEIDRFCGFYGYIEKIQGGPAFIHSLHMESPGDYTPEDRLWYKAAITANGGITETIPYTDLITETNIISYSCCIFDDEGAYLGVVSIDVHLDYIGNRVINSALTEYGYGMLVSQDLTVITHSNPDFIGLKMYDPVIPVSIYTDEILEKGIISEAPVINWKGEKALAFTRRLSNGWYLIILTLKDVYYKSLTDMAATLSLFGIVLAAVLIVVLIDVDAAREESNLESRHKSAFLANMSHEMRTPMNAIIGMTTIGKTALDVERKDYCFEKIDEASNHLLGVINDVLDISKIEADKFELSSEEFNFENMLQHALNVIRFRVDEKQQTFSVYIDQAIPKVMIGDDQRLAQVITNLLGNAVKFTPEQGCVSLAARYVGEENGLYTIQISVTDTGIGISPEQQTILFQPFQQAESGTTRKYGGTGLGLAICKRIVEMMGGRIWIESELGKGSTFAFTIQAHKSLLANSSNSQACSSGTGNQPAEKEQTDIEGIFAGRHILLAEDVEINREIVRALLEPTQLEIDCAVNGKEALDMFRQSPDKYDMIFMDMQMPEMDGYEATRHIRALDLPRAKTIPIIAMTANVFREDVEKCLEAGMNCHIGKPLDFNDVMEKLYSYLPFRKKAS

SEQ ID NO: 51847 - DNA, 618 bp, Unknown
  Obtained from environmental sample
  misc_feature (1)..(618): n is a, c, g, or t
atgaatcaaaagattattttcaaacaatttttggagcaaacctttccggaacgcgcggaggcgtttttgggagcgtttgagcggtaccacgcttggcttgtgtccgaaaacagcaaaatcaacctgttttcgcggcaaatgaactcggacgatatatggacggtgcacttcttggattcgcttttgtcaaccaaatacgtggatttcggcgggcgcggcgtgttggacttcgggacgggcggggggctgccggggattccgctggccattgtctttccggacgctaaggttacgctgctcgattcaaagaaaaagaaaatcgcggcggtcatggaggcggctgacacgttggggcttgagaattgcgaattttcggatcaacggatagaggatattgccgggcggggggggtttgacataatcgtttcccgttctgtcaagattgagccggcctataaaccgatattattgcggttactcaaacccggggggaagattgtcctttataaaagtaagatttttgatgatgtgtatcaatttaacaatgtggagatatttaacgctgaggcggctgagttggggctgggggagcgtaggattgcggtgatacggggatga

SEQ ID NO: 51848 - protein, 205 aa, Unknown
  Obtained from environmental sample
  DOMAIN (75)...(166): Methyltransferase domain
  misc_feature (1)..(205): Xaa is any amino acid
MNQKIIFKQFLEQTFPERAEAFLGAFERYHAWLVSENSKINLFSRQMNSDDIWTVHFLDSLLSTKYVDFGGRGVLDFGTGGGLPGIPLAIVFPDAKVTLLDSKKKKIAAVMEAADTLGLENCEFSDQRIEDIAGRGGFDIIVSRSVKIEPAYKPILLRLLKPGGKIVLYKSKIFDDVYQFNNVEIFNAEAAELGLGERRIAVIRG

SEQ ID NO: 51849 - DNA, 696 bp, Unknown
  Obtained from environmental sample
  misc_feature (1)..(696): n is a, c, g, or t
atgaatagtacagtatattctatcgatggcaaagaattaaggaacatcgagcttgcggacagcgttttcggcctcccaataaatgaagatgtgatttggtatgccattaataatgaacttgctaataaaaggcagggaaatgcctgcacaaaggaccgcggcgaggttcacggttccaatgccaagccatataagcaaaagggtacgggccgtgcccgtcgtggggacaaaaagagcccgatattggtaggcggaggaacaatgttcgggccaaaacccagggattattcctattcgatgcccaaaaaggcaaagcgccttgcgataaagacgattcttagccttaaagcccagagcgatacccttaagattatcgaggatttttcggtagattccggaaagaccaaagatttattcggaattttaaaaaatttcaatcagggtaaagaactggaacagcggacagttatggtgcttcggggcgaagaagtggatataaaaaatggaaaggatgatcgcgcagaaattcttcccggcgtaagaaagataaagcaggcggggagaagtataccttggctgagttttctttcacattgcagactgagggcccatgacctcttttacgggcggagcattatcatgacagaaagcgccgcgaaaaaactaaacgaattttacggaggaaccgggaaatga

SEQ ID NO: 51850 - protein, 231 aa, Unknown
  Obtained from environmental sample
  DOMAIN (15)...(225): Ribosomal protein L4/L1 family
  misc_feature (1)..(231): Xaa is any amino acid
MNSTVYSIDGKELRNIELADSVFGLPINEDVIWYAINNELANKRQGNACTKDRGEVHGSNAKPYKQKGTGRARRGDKKSPILVGGGTMFGPKPRDYSYSMPKKAKRLAIKTILSLKAQSDTLKIIEDFSVDSGKTKDLFGILKNFNQGKELEQRTVMVLRGEEVDIKNGKDDRAEILPGVRKIKQAGRSIPWLSFLSHCRLRAHDLFYGRSIIMTESAAKKLNEFYGGTGK

SEQ ID NO: 51851 - DNA, 627 bp, Unknown
  Obtained from environmental sample
  misc_feature (1)..(627): n is a, c, g, or t
ttgatgatgttgggtctaatggccagaaaagtggggatgactcaggtgtttgatgaaaccggaagcctggttccggtaacagtaattcggatagaaccgaatgttgttattgctcaaaaatccatggaaaaggacggctacaaggcggttgttctcggtgttggtgagcagaagaaaaacagggcttccaggccttatgcgggccaatttcccgaaaatatccccccacaaaaaaccatgcgcgaatttcgggactttgaaaaagaagtaaatcccggtgacaaactcggagcggaagttttcgagggaatccgttatgtggacgttacaggcgtctcaaagggaaaaggctttcagggagttgtgagacgctacggtttcggcggtggacgcgctactcacggttcaaaattccaccgcgagccaggttcgaccggacagagtacatatccgcataaaacttttaaaaacgtaaaattgcctggccggatgggcagggaacaggttacggttttgagccagcgggttgtgaaggtggatacggaaaagcagcttgtgcttatcaagggcgctgttcccggagtgaacaagggcctgatagtaataaggtctgcggtaaaaaggtaa

SEQ ID NO: 51852 - protein, 208 aa, Unknown
  Obtained from environmental sample
  DOMAIN (10)...(203): Ribosomal protein L3
  misc_feature (1)..(208): Xaa is any amino acid
MMMLGLMARKVGMTQVFDETGSLVPVTVIRIEPNVVIAQKSMEKDGYKAVVLGVGEQKKNRASRPYAGQFPENIPPQKTMREFRDFEKEVNPGDKLGAEVFEGIRYVDVTGVSKGKGFQGVVRRYGFGGGRATHGSKFHREPGSTGQSTYPHKTFKNVKLPGRMGREQVTVLSQRVVKVDTEKQLVLIKGAVPGVNKGLIVIRSAVKR

SEQ ID NO: 51853 - DNA, 1596 bp, Unknown
  Obtained from environmental sample
  misc_feature (1)..(1596): n is a, c, g, or t
ttgtctcaaaaaatatttggggaatataacgtgaaagagaaaattgcagaagcgttatcaatactgctgaaagagcatctctcagaatccgaggttgaaaagaatatcgccgtccccccgtccgacgatcttggcgattacgcgtttccttgcttcgcgctctccaaactcctcaaaaagaatcccgccgctatcgcggcggatcttaaagataggatagggcctattgacggcgggcgcgttcgggcggagtcttccggggggtacctcaacttttttattgacaagagggaattggcggcctccgttattgagacctacgcgaacgcagtcccggcgagtctggcggattgcggcgccgcgccgataggcgtggccggcgacggtcgtccgctgcgcgtggtggtggagttcgcctcgcccaacaccaataaacccctgcacttggggcacctgcgcaatatgtccataggcgacagcgtttcccgcatattctcattttgcggatgcgaggtgtttagggcaagcataaacaacgaccgcggggtgcatatctgcaagtctatgcttgcctacaagcgctgcgggaacggggacacgccggagagcgcgggggtcaagccggatcactttgtgggggactactacgtgatgttcaacgataaatcctccgccgaccccacctggggcgacgacgctcagaggatgctcaaggagtgggaggagggcgagataggcacggtggagttgtggaagcggatgaacgcttgggcgctctccgggttcagggagacctacaggctgttcggtgtatcgtttgacaaggagtattacgagagcgatatctacaagagcggcaaggagatagtcgcggagggccttgagaggggaattttttacaggcgggaagacggcgcggtggtgattgaccttgaggaggagaaactcggcgacaaggtgctgctgcgccccgacggcacgagcgtctacattgtccaagacctctatttggcgctgcttaaggataaagagttccgctacgacaggtcgtactacgtggtgggcaacgagcaggattaccacttcgcggttctgatagcgattttcaagaggttgggctacgacgtggccggtaagatgaagcatctctcgtacggcatggtggagttgccggaggggaagatgaagtcgcgcgaggggactgtggtggacgcggacgacctgatactggagacgaaggagcttgcgaagcgggaggtgatagagcggtacgacgtggcggaggcggaggcggagggccggagtttgcggatagcgctggcggcggtcaagtatcagttgttgaagatagacatcgcgaagaatatggtctttgacccgaagaaggcgataagttttgagggcgacacggggccgtatttgctgtacagctacgcgagggcgtcgtcaatactccgtaaggccggcggcaggggaggcgttagcggcgatgttcatattgacaatgttgagaatccaggtatcaagcggcgtgttgacaggtcgctgctgccggagggttttgaggcggcggaggttcggctcttgaagagatag

SEQ ID NO: 51854 - protein, 531 aa, Unknown
  Obtained from environmental sample
  DOMAIN (9)...(94): Arginyl tRNA synthetase N terminal domain
  misc_feature (1)..(531): Xaa is any amino acid
MSQKIFGEYNVKEKIAEALSILLKEHLSESEVEKNIAVPPSDDLGDYAFPCFALSKLLKKNPAAIAADLKDRIGPIDGGRVRAESSGGYLNFFIDKRELAASVIETYANAVPASLADCGAAPIGVAGDGRPLRVVVEFASPNTNKPLHLGHLRNMSIGDSVSRIFSFCGCEVFRASINNDRGVHICKSMLAYKRCGNGDTPESAGVKPDHFVGDYYVMFNDKSSADPTWGDDAQRMLKEWEEGEIGTVELWKRMNAWALSGFRETYRLFGVSFDKEYYESDIYKSGKEIVAEGLERGIFYRREDGAVVIDLEEEKLGDKVLLRPDGTSVYIVQDLYLALLKDKEFRYDRSYYVVGNEQDYHFAVLIAIFKRLGYDVAGKMKHLSYGMVELPEGKMKSREGTVVDADDLILETKELAKREVIERYDVAEAEAEGRSLRIALAAVKYQLLKIDIAKNMVFDPKKAISFEGDTGPYLLYSYARASSILRKAGGRGGVSGDVHIDNVENPGIKRRVDRSLLPEGFEAAEVRLLKR

SEQ ID NO: 51855 - DNA, 1635 bp, Unknown
  Obtained from environmental sample
  misc_feature (1)..(1635): n is a, c, g, or t
gtgcgcagtatgattttattaggtaacgatgccgctacggtatcccgctatataagaagcatcaccgattatatactgcttgacagggaaaggcaattatcaggctttagcgacatttacggcttttttgacgtacttaaaagtgatgagggagggggtacattcattgacggcattgatcgcaaactgcctgaaacccttgttttccggaaatgtccctggtacagcgaagctgtagcggcgggcggcgagataatattattgcagccctgtgtcgatatggcaaataattttgtcgttattacctatgcgtgcggtttatttgacaatgcaggacagcctctgggcgtgattgcgctggacttgaagtttgaaaggatcagaaactatatcgttgatgcgaatttagggaaaacagggtacggatttttgttaaacgggcaatacgaatttctcatccatcgcgatctcaatttacagggtacaaaacttgagaatgtgaacagcagtacggccaaactggtggacgagcttaaactggggcatgatgtttccgaattcaggatgattaatcatgaaggtgactcgtcaatcgcttttctccgaaaaattgaaaacggttggtatatttgtgttataacgcccgaaggcgaatattaccgcgagcttaacaaaataaggcttatcctcatcgctttgggaatagcgctggcatttgtcctgagcgccattctgctcaatattatcgcggccagggaaaaatcggatgaacttatgcggattatgtttgacgcaatgcctttgggcgcgaatattcacaacaaagattttggatattttgactgtaatgcgagcgcaatcaatctgtttggactatcaagcaagcaggaatatcatgataattttcaccgactttcgccggagtatcagccggacgggaggctgtcaaaagagaagtcggccgagtttattaacaaggcttttaccgacggctattgccgttttgaatggatgcaccagaaactgaacggcgagccgataccgtgcgaagtttcgctcgtgcgggtaaagcatgataacgaatttgttttagccgcctatatacgcgatttacgcgaattaaaagccacgattgagcaagtggaagaatcagagcaagcgctcagtattctgacaaatatgttgaacgggcttgatgcgatgatctatgttaccgttcctgaaaccggcgagattctttttataaatgataccatgagaaaagcatttaacattaaagaagattacatcgggcagttttgttataaagtatttgtgaataatgatgtggaaggaaaatgtgatttttgcccttgtcacaagcttgacaaagccccggacagtactgtcgtatgggaaaagatgaaccccataactaagcgtatacaccatcacacagaccgctatatagaatggcataatggcaggattgttcatatccagcactccgtcgatgtaaccgatttggttatggcaaaagaacagggccgagcagagcagccgttacaaaagccaattcctgtcgcgcatgagccacgaggtgcgcacgccgatgaacgcgatcctgggcattaccgaaattcagcttcaggatga

SEQ ID NO: 51856 - protein, 544 aa, Unknown
  Obtained from environmental sample
  DOMAIN (87)...(167): Cache domain
  misc_feature (1)..(544): Xaa is any amino acid
MRSMILLGNDAATVSRYIRSITDYILLDRERQLSGFSDIYGFFDVLKSDEGGGTFIDGIDRKLPETLVFRKCPWYSEAVAAGGEIILLQPCVDMANNFVVITYACGLFDNAGQPLGVIALDLKFERIRNYIVDANLGKTGYGFLLNGQYEFLIHRDLNLQGTKLENVNSSTAKLVDELKLGHDVSEFRMINHEGDSSIAFLRKIENGWYICVITPEGEYYRELNKIRLILIALGIALAFVLSAILLNIIAAREKSDELMRIMFDAMPLGANIHNKDFGYFDCNASAINLFGLSSKQEYHDNFHRLSPEYQPDGRLSKEKSAEFINKAFTDGYCRFEWMHQKLNGEPIPCEVSLVRVKHDNEFVLAAYIRDLRELKATIEQVEESEQALSILTNMLNGLDAMIYVTVPETGEILFINDTMRKAFNIKEDYIGQFCYKVFVNNDVEGKCDFCPCHKLDKAPDSTVVWEKMNPITKRIHHHTDRYIEWHNGRIVHIQHSVDVTDLVMAKEQGRAEQPLQKPIPVAHEPRGAHADERDPGHYRNSASG

SEQ ID NO: 51857 - DNA, 1599 bp, Unknown
  Obtained from environmental sample
  misc_feature (1)..(1599): n is a, c, g, or t
ttggccaacatgagccacgagatacgcacgcccatgaacgcgataatcggcatgaccacgattggaaagaccgcttccgatatcgaacgcaaggattattgctttacgaaaatacatgacgcctcgaaccacctcctgggcgtaatcaacgatattctggacatgtccaaaattgaagccaacaagcttgaactttcgctggtggagtttgacttggagaagttattgcagcgggttgtgaacgtcgtcagtttccgcgtagaagaaaaacggcaaaaattttcggtacatatcgatcaggctattccacaaaccctgataggcgataacctgcgcatcgcgcagatcattaccaatctcttgggaaacgcgaacaaattcacgccggaaggcggttccatcagtttatgcgcgcgtttattggaaaaagataatgatctctgcaccctacaaatatcggtaaccgacacggggatcggcataagtgaagaacagcaggtaaaactgttcaagtctttcgagcaggccgaatcaggcacgacgcgcaaatacggaggaacgggtcttggcctttcgatttccaaaaatcttgtggaaatgatgggcggtagtatctgggtcaaaactgaagcgggaaaaggctcaacttttgccttttcgatgcagctaaagcggagcacagaaaaaagacaggcgtacctctcggagaatataaactggacgaatgtccatattattgtggtagatgatgatccggatatattactgtatttccatgatataacgcagatgtacggcataacatgcgaaaccgccacaagcggggaaaaagcgcttgaactcatagacaaaaaaggcggctaccatatctattttatagactggaaaatgcccgttatggacggaataaaactaacccgtgaaataaagaagcgtaatcctgaagattccgtcgtgataatggtttcctcggtagaatggagtacgatttcagaagaggcgaaagctgcgggcgttgataaattcctgtccaagccattgttcccttccgccattgaagaaacaatcaatgaatgtctcggcgttgacaaacaaaagattgaaaaaacgcaggaagaaggcattgacggcatctttgagggacggcgcatactgttggttgaagacgtggaaattaaccgtgaaatagtaatggcattgtttgaaccgacaaagctggagatagactgcgctgaaaacggcgtagaagccgtccgtatttttaccgaaacccctgacaaatacgaattgatttttatggacatacaaatgcccgaaatggacggctacgaagcgacacggcgtatccgcgcgttagaagcggagcgtaataaaaacgcttctgcaagaaacggtacgagtttcaccgaaagtgaaactcgaagctataataggaatttacgtaagcaaattcctattatagcaatgaccgctaacgtatttaaggaagacattgaaaaatgtctcgccgccggtatggacgggcacattggcaagccgctggattttgatgaagcgataaacatccttcgctcatatttgggagttgaaaaaagatga

SEQ ID NO: 51858 - protein, 532 aa, Unknown
  Obtained from environmental sample
  DOMAIN (1)...(61): His Kinase A (phosphoacceptor) domain
  misc_feature (1)..(532): Xaa is any amino acid
MANMSHEIRTPMNAIIGMTTIGKTASDIERKDYCFTKIHDASNHLLGVINDILDMSKIEANKLELSLVEFDLEKLLQRVVNVVSFRVEEKRQKFSVHIDQAIPQTLIGDNLRIAQIITNLLGNANKFTPEGGSISLCARLLEKDNDLCTLQISVTDTGIGISEEQQVKLFKSFEQAESGTTRKYGGTGLGLSISKNLVEMMGGSIWVKTEAGKGSTFAFSMQLKRSTEKRQAYLSENINWTNVHIIVVDDDPDILLYFHDITQMYGITCETATSGEKALELIDKKGGYHIYFIDWKMPVMDGIKLTREIKKRNPEDSVVIMVSSVEWSTISEEAKAAGVDKFLSKPLFPSAIEETINECLGVDKQKIEKTQEEGIDGIFEGRRILLVEDVEINREIVMALFEPTKLEIDCAENGVEAVRIFTETPDKYELIFMDIQMPEMDGYEATRRIRALEAERNKNASARNGTSFTESETRSYNRNLRKQIPIIAMTANVFKEDIEKCLAAGMDGHIGKPLDFDEAINILRSYLGVEKR

SEQ ID NO: 51859 - DNA, 456 bp, Unknown
  Obtained from environmental sample
  misc_feature (1)..(456): n is a, c, g, or t
atggctttagaagctgttatgagcagccaggaaaaagcggctaccgcccagtgggtggacgcggcaaataaaaaactcagccttgagctcaataaaagcaatatcacgacaggtcagaaccttgggaaagatgattttttgaagctccttttggcccagctggcccatcaggatccgtctgcgccaatggaggataaggaatttatcgcccagatggcccagttttcaagccttgagcagatgacaaacatggcggcggatttcgcaaaaatggcgcaaatgctgaagatttccgaagcttcgggcgctttgggcaaagctgtcgagattaacctgggggatgataccgtccagggagttgtccgggccgtaaccagagaagaagcgcccaggatacttgtgaacagtagcttctacgattgggaacaggtaatcgcggtttatgacgagtattaa

SEQ ID NO: 51860 - protein, 151 aa, Unknown
  Obtained from environmental sample
  DOMAIN (17)...(151): Flagellar hook capping protein
  misc_feature (1)..(151): Xaa is any amino acid
MALEAVMSSQEKAATAQWVDAANKKLSLELNKSNITTGQNLGKDDFLKLLLAQLAHQDPSAPMEDKEFIAQMAQFSSLEQMTNMAADFAKMAQMLKISEASGALGKAVEINLGDDTVQGVVRAVTREEAPRILVNSSFYDWEQVIAVYDEY

SEQ ID NO: 51861 - DNA, 1359 bp, Unknown
  Obtained from environmental sample
  misc_feature (1)..(1359): n is a, c, g, or t
atggccgagatttttagggagcgcaaagaaaataagctgggagctttcgcaaaactcctgcaaggtttatcagttaagctaacgaaaggacaggcggcggaagattcttcagaagcagaagaattgtctcaggatagcccgggaaaaaccggtaaaaaatccataggatctaaggtcaatggatcgaaggtaacggcgttctctaaaaacgcaaaaaattcgccctttgggatggaaatttcagacggtgaaaacctggatattggtttctttgacatttctgtgagggaaaccggtcttgaatcggtggaatccaggcttggaaaccttcgttttaatgaattgccacaaaaaagcaacaattttactattcaaaacgcgctgctttcggttgaaacagaatcggaagaaagcaagccggctttggaaacccttgaaaaggcggtttcgcaaggcgggcgggagcagtctgggaataaaaccaaaaatggacgcaacgcgggttttcttaacgcttcttttcgggaaactgaaactggatcttccaacgatcagaaaattaatcaggccttgtcaggaaaatccggcgcgaattttgctttccatggagcagagaacgcggcgagccaggaaatgcgcggaagaagaagcagagaaaggctcaacatcgaagtaagggattttagaaccgccgaggagaggggaacttccgcttcgccggagaacagcgtaagccttaaagaagcgattgagtcaaacttcaggccgcttgcaagaacggaaattgaaattccggtggaactggatctgcataagggaagcgtagacgggaaagcaggcgattcctcggccctaggcgaaggcaagacttttgaagacgccttggccgcggaactgcgcggcgatctttcaagcgatattgtccgcgatgcggcggtaattatccgtaacggcggggagggaacaatacgcctttcacttcggcccgcctccctgggggatgtaaagatacgcctggaaatgaccgaaaacaagatcaccgggcatatcattctaaaaagcagtgaggcgcttcgggcttttgaacgggaacttcctgttttggaaaaggcttttaaagattcgggcttcagcgagaccaatcttgaaatgtcccttgcctcggatgattccgcaaacggaggggcttttgcccgtcaggaagagaggcgggaaagggatttcctgattcgctcgctggctgtgtccagctacgaggctgaatctgagcaatcggcaataagccggttagacgcgcccgttcgtgacgaaatgttttttacttcaccgggaagaattccggtaaatttgtttgtttag

SEQ ID NO: 51862 - protein, 452 aa, Unknown
  Obtained from environmental sample
  DOMAIN (244)...(388): Flagellar hook-length control protein
  misc_feature (1)..(452): Xaa is any amino acid
MAEIFRERKENKLGAFAKLLQGLSVKLTKGQAAEDSSEAEELSQDSPGKTGKKSIGSKVNGSKVTAFSKNAKNSPFGMEISDGENLDIGFFDISVRETGLESVESRLGNLRFNELPQKSNNFTIQNALLSVETESEESKPALETLEKAVSQGGREQSGNKTKNGRNAGFLNASFRETETGSSNDQKINQALSGKSGANFAFHGAENAASQEMRGRRSRERLNIEVRDFRTAEERGTSASPENSVSLKEAIESNFRPLARTEIEIPVELDLHKGSVDGKAGDSSALGEGKTFEDALAAELRGDLSSDIVRDAAVIIRNGGEGTIRLSLRPASLGDVKIRLEMTENKITGHIILKSSEALRAFERELPVLEKAFKDSGFSETNLEMSLASDDSANGGAFARQEERRERDFLIRSLAVSSYEAESEQSAISRLDAPVRDEMFFTSPGRIPVNLFV

SEQ ID NO: 51863 - DNA, 507 bp, Unknown
  Obtained from environmental sample
  misc_feature (1)..(507): n is a, c, g, or t
atggaaaggctcatttttaagcataaagaaaaaaattattatctgatagccgacgcttacgagggaaaatatatcaaagagtgtacgcttgattttcttaacagcggaagcggaaataaaaaagaaactttgaaaattaacggcaaaactcttggaacaggaggcagtgcctctcttttggcatacatcggccatgacggcttaatggattttcaactttctgaaacttttgtgaacacagataacataaagcgcgatatgataatattggcgtgttacagcaagaaatattttactcccgtcctggaacgggcaaacgtaaatatattggtttggacaaccaatttaatggctcccgaggcatataccctgcatgacgccttaaccggctatgttatcggggaaaccaacgaggaaatccgggaaagagcggcggcggcatacgccaagtatcaaaaatgtagtataaatgcggcaaaaggattgctggtaacggaaaagaggtaa

SEQ ID NO: 51864 - protein, 168 aa, Unknown
  Obtained from environmental sample
  misc_feature (1)..(168): Xaa is any amino acid
MERLIFKHKEKNYYLIADAYEGKYIKECTLDFLNSGSGNKKETLKINGKTLGTGGSASLLAYIGHDGLMDFQLSETFVNTDNIKRDMIILACYSKKYFTPVLERANVNILVWTTNLMAPEAYTLHDALTGYVIGETNEEIRERAAAAYAKYQKCSINAAKGLLVTEKR

SEQ ID NO: 51865 - DNA, 549 bp, Unknown
  Obtained from environmental sample
  misc_feature (1)..(549): n is a, c, g, or t
atgtatgatagcactttctttacctcttcttttatttcagatgagaggccattttccttttcgttaactttttccgctttagctgcaagggactcttccttatccgaatcatcaagcgagatgtcctcatcggtaaaagcctccagatcatcatcaaaaggaatatttgcttcagcgccggtacctgtttcaaaagcctccggaattaccttggcaaggttgtcttcctggcttattccggaatccattttgaaatcatccatgtcgagagtcgtatcttcatcaagcgcggcgtcttcgtcgggcgcggcgtcttcgttgaggccaaaatcatccaaaacaagttctttttcttcaccgccggtttcttcttcggcggataaattggtctcgtcagtttcagactcgggaagaggttccaaagacagcatatcatccagggataacgagtcatccaaagacagcgcttcttccatggacgaatcgtcatcaagggatgctgtgtcatccagagatgatatgtcatccaaagaaagcagtcatccatga

SEQ ID NO: 51866 - protein, 182 aa, Unknown
  Obtained from environmental sample
  misc_feature (1)..(182): Xaa is any amino acid
MYDSTFFTSSFISDERPFSFSLTFSALAARDSSLSESSSEMSSSVKASRSSSKGIFASAPVPVSKASGITLARLSSWLIPESILKSSMSRVVSSSSAASSSGAASSLRPKSSKTSSFSSPPVSSSADKLVSSVSDSGRGSKDSISSRDNESSKDSASSMDESSSRDAVSSRDDMSSKESSHP

SEQ ID NO: 51867 - DNA, 636 bp, Unknown
  Obtained from environmental sample
  misc_feature (1)..(636): n is a, c, g, or t
ttggatgacatatcatctctggatgacacagcatcccttgatgacgattcgtccatggaagaagcgctgtctttggatgactcgttatccctggatgatatgctgtctttggaacctcttcccgagtctgaaactgacgagaccaatttatccgccgaagaagaaaccggcggtgaagaaaaagaacttgttttggatgattttggcctcaacgaagacgccgcgcccgacgaagacgccgcgcttgatgaagatacgactctcgacatggatgatttcaaaatggattccggaataagccaggaagacaaccttgccaaggtaattccggaggcttttgaaacaggtaccggcgctgaagcaaatattccttttgatgatgatctggaggcttttaccgatgaggacatctcgcttgatgattcggataaggaagagtcccttgcagctaaagcggaaaaagttaacgaaaaggaaaatggcctctcatctgaaataaaagaagaggtaaagaaagtgctatcatacatggatcatctgttggaatccctgcccgaagaaaaaattgaagaatttgcaaagtccgaacatttcgatacctacaagaagctgttcaaggaattaggattggtataa

SEQ ID NO: 51868 - protein, 211 aa, Unknown
  Obtained from environmental sample
  misc_feature (1)..(211): Xaa is any amino acid
MDDISSLDDTASLDDDSSMEEALSLDDSLSLDDMLSLEPLPESETDETNLSAEEETGGEEKELVLDDFGLNEDAAPDEDAALDEDTTLDMDDFKMDSGISQEDNLAKVIPEAFETGTGAEANIPFDDDLEAFTDEDISLDDSDKEESLAAKAEKVNEKENGLSSEIKEEVKKVLSYMDHLLESLPEEKIEEFAKSEHFDTYKKLFKELGLV

SEQ ID NO: 51869 - DNA, 876 bp, Unknown
  Obtained from environmental sample
  misc_feature (1)..(876): n is a, c, g, or t
atgagtattcttgacgaaattgccggcaaaacgcggctgcgcgttgcaaaagcaaaagatgccgcgcactttgagcaggtgaaaaaaaaggctgttgcgttagctgtaaaagaagggagtcgggagtcgggagtcgggagtcgggaatggggaggcgataacaaagttggagttgggggtcgggaggaagcggcccggttttcgtttgagcaggcgattgccgcgccagggctttcctttatctgcgaggtaaaaaaagcctccccctcaaaggggattatcgcggaggattttccgtatctgcaaattgcccgtgaatacgaggccgccggagccgccgcaatttccgttctgaccgagccggattattttttgggcggcgatcaatacctgagggaaatcgccgccgaggtcgctatcccgacgctcagaaaggatttcgttattgacccgtaccagatttacgaggcgaaacttttgggcgcaaaggctgtcctgttgatctgctccctgctggacgggcaaacgctggcggaatatatcaaaatcgcctgtgaacttaatttgtcatcgttagtcgaaatccatgacgagtccgaagcggaacaggctgtgcgggcgggcgcgcggattatcggcattaacaaccgggacctcaaaaccttcaaggtggattttggcgttaccgcccgcttacggtctcttattcccgatgacattcttaccgtggctgaaagcggcattaagtctgtcgatgacgtccgcgccataagcggcctcggcgttgacgcggcattggttggcgaaagtttgatgagggcggaagacaagcggcaatttttgtctgaattaaagggagtagggaatggggactag

SEQ ID NO: 51870 - protein, 291 aa, Unknown
  Obtained from environmental sample
  DOMAIN (3)...(284): Indole-3-glycerol phosphate synthase
  misc_feature (1)..(291): Xaa is any amino acid
MSILDEIAGKTRLRVAKAKDAAHFEQVKKKAVALAVKEGSRESGVGSREWGGDNKVGVGGREEAARFSFEQAIAAPGLSFICEVKKASPSKGIIAEDFPYLQIAREYEAAGAAAISVLTEPDYFLGGDQYLREIAAEVAIPTLRKDFVIDPYQIYEAKLLGAKAVLLICSLLDGQTLAEYIKIACELNLSSLVEIHDESEAEQAVRAGARIIGINNRDLKTFKVDFGVTARLRSLIPDDILTVAESGIKSVDDVRAISGLGVDAALVGESLMRAEDKRQFLSELKGVGNGD

SEQ ID NO: 51871 - DNA, 492 bp, Unknown
  Obtained from environmental sample
  misc_feature (1)..(492): n is a, c, g, or t
atgaaaaataataatgttaataaaacgactagtctggtgacaaaaaccccagtccccagtccccagtccccagtccctataaaaattaaaatttgcggcctgttccgtgaacaggacattgattacgtcaacgaagccaagcccgattacgcgggcttcgtgtttgccgaaagcaaacggaaagtttctcccgcttttgcagccggcttgcgccgccgcttgttagatgaaattatccccgtcggagtttttgtcaacgcagttgttgaggatattgttgccctgtaccgagaaaatgtcatctccatagcccagcttcatggcgaggaaaatgatgaatacattaccctgcttaaagaggcaagcgccgcgggcgggaaaaatccgattgcggtgatcaagaccatctcaccactccctgttccctgttccctgttccctagtccctattccccactccccactccccactccccgctcccttctttttaa

SEQ ID NO: 51872 - protein, 163 aa, Unknown
  Obtained from environmental sample
  DOMAIN (29)...(151): N-(5'phosphoribosyl)anthranilate (PRA) isomerase
  misc_feature (1)..(163): Xaa is any amino acid
MKNNNVNKTTSLVTKTPVPSPQSPVPIKIKICGLFREQDIDYVNEAKPDYAGFVFAESKRKVSPAFAAGLRRRLLDEIIPVGVFVNAVVEDIVALYRENVISIAQLHGEENDEYITLLKEASAAGGKNPIAVIKTISPLPVPCSLFPSPYSPLPTPHSPLPSF

SEQ ID NO: 51873 - DNA, 2007 bp, Unknown
  Obtained from environmental sample
  misc_feature (1)..(2007): n is a, c, g, or t
atgttttcctcctttatcgaattctgtttgtggaaccccaatgacgatatgacgaacttccagcgcaacttcagcattggcgaggttgaggtagaagcaaatggagcgcgtatttaccataaaacagagtaccgtgagcgccgaaaccattacgcgctatgggcagtcaatgttcctgtcgccggtttcgataccgaccgtcaaaccttcctgggcttgtacaacggctttgatcatcctgaaaccgtgtttgcaggaaaagcgaataactccatcgcttcaggctggtcgccgattggctctcaccatatcaaggcgcatcttaagccgggcgaatcaaaggcgcttgtgttcgtgttgggttactgcgagaacccggacgatgaaaagtgggcaagcgccggtgtgatcaacaaagcgtcggctaacgcgctgcttgacaaatacggctcgcctgaagcggcggacagggcgtttgccgcgttaaaggattactgggacgcgctcctgggtcgtttcagcgtggaagccgaggacaagcgcatggcgcgtatggctggggtgtggaaccagtaccagtgcatggttacgtttaacatgtcgcgcagcgcgtcttattttgaatccggcatcgggcgcggcatgggtttccgcgattcanatcaggaccttttgggcttcgtgcatcttgtgcctgaacgcgcccgcgcgcgcattctggatatcgcggctacgcagtttcccgatggcagcgcttaccatcagtaccagccgcttacaaagcgcggcaacaatgaggtcggctccggctttaacgacgaccctctttggctaatctgcggagtagcggcgtacatcaaagaaacgggcgattacagtatcctcgaagaaaaagtgccgtttgacaacaacgatgcgttagctgacactctctttattcacttaaaacgctcttttgattacaccgtaacgcacaccgggccgcacggcttgccattaataggacgcgcagattggaacgactgtttaaaccttaattgtttttccaaaacgccgggcgaatcttttcagaccaccgccaattatgaaagcggcgtagctgaatcagtcctgatagctgcgattttcgcgtttaccggccctgattatgttgaaatctgccgccgcactaaccgcgccgaagaagccgagtacgcggagaaagcaatcgctaaaatgattgaagctattgatcagcacggttgggacggagactggttccttcgcgcctatgacgcttatggtaaaaaaatcggcagccgtgaatgtgatgacggaaaaatatttatcgaatctaacggttttgcggtaatggcggatattggcattaaagacggacgcgcaagaaaggcgcttgattccgtaaaagaacatcttgaaacgccatacggtattgtgcttttacagccggcgtacaaggactaccatcttgagttaggtgaagtttcttcctacccgccggggtacaaggaaaacgccggtattttctgccacaacaacccgtgggttatctgcgcgaaagccgaaaccggcaggggggacaaggcgtttgagtattactcaaaaatcgcccccgcctaccgcgaagaaatatccgacctgcaccgcacagaaccgtatgtatacgcccagatgattgccggtaaagacgcggcccgccacggcgaagccaaaaattcatggctgaccggaaccgccgcgtggaactttgtcgcggtatcgcagtacatactcggcatcaagccccagtatgacggcctgaaaatcgacccctccattcccaaagactgggccggctttaaactgacgcgcgtattccgcggcgcaacgtataacattacggtcaaaaaccccaataaagtttccaaaggcgtgaccaagctggtggtagacggcgcggaaacagcgggcaatgttgtccccccgtttgccggcggcacgcatgaggttgaggtggtgttggggtag

SEQ ID NO: 51874 - protein, 668 aa, Unknown
  Obtained from environmental sample
  DOMAIN (40)...(128): Glycosyltransferase 36 associated family
  misc_feature (1)..(668): Xaa is any amino acid
MFSSFIEFCLWNPNDDMTNFQRNFSIGEVEVEANGARIYHKTEYRERRNHYALWAVNVPVAGFDTDRQTFLGLYNGFDHPETVFAGKANNSIASGWSPIGSHHIKAHLKPGESKALVFVLGYCENPDDEKWASAGVINKASANALLDKYGSPEAADRAFAALKDYWDALLGRFSVEAEDKRMARMAGVWNQYQCMVTFNMSRSASYFESGIGRGMGFRDSXQDLLGFVHLVPERARARILDIAATQFPDGSAYHQYQPLTKRGNNEVGSGFNDDPLWLICGVAAYIKETGDYSILEEKVPFDNNDALADTLFIHLKRSFDYTVTHTGPHGLPLIGRADWNDCLNLNCFSKTPGESFQTTANYESGVAESVLIAAIFAFTGPDYVEICRRTNRAEEAEYAEKAIAKMIEAIDQHGWDGDWFLRAYDAYGKKIGSRECDDGKIFIESNGFAVMADIGIKDGRARKALDSVKEHLETPYGIVLLQPAYKDYHLELGEVSSYPPGYKENAGIFCHNNPWVICAKAETGRGDKAFEYYSKIAPAYREEISDLHRTEPYVYAQMIAGKDAARHGEAKNSWLTGTAAWNFVAVSQYILGIKPQYDGLKIDPSIPKDWAGFKLTRVFRGATYNITVKNPNKVSKGVTKLVVDGAETAGNVVPPFAGGTHEVEVVLG

SEQ ID NO: 51875 - DNA, 477 bp, Unknown
  Obtained from environmental sample
  misc_feature (1)..(477): n is a, c, g, or t
atgcagtatggttattttgacgatgatgcccgcgagtatgtaattacccgcccggataccccatatccgtggatcaactatctgggcagtgaagatttttacggccttttttcaaacacgtccggcggttactgtttttaccgggacgcgcgtttactgcgtttgctgcgttaccgatacaacaacgtaccgactgactctggagggcgttatttctacatacgcgacagcggcgatatttggacgccctcctggatgcccatgaagtccgcgctggatcactacgaatgtcggcacgggatgggctattcgcgcatttcttcagcgcgaaacggtctggctttttctcaaacttcgtttgtgcctctgaaagacaactgcgaaattcataaaatcgttttgacaaacgaatccagggcagacaaggacgtagatgttttcctcctttatcgaattctgtttgtggaaccccaatga

SEQ ID NO: 51876 - protein, 158 aa, Unknown
  Obtained from environmental sample
  DOMAIN (66)...(157): Glycosyltransferase family 36
  misc_feature (1)..(158): Xaa is any amino acid
MQYGYFDDDAREYVITRPDTPYPWINYLGSEDFYGLFSNTSGGYCFYRDARLLRLLRYRYNNVPTDSGGRYFYIRDSGDIWTPSWMPMKSALDHYECRHGMGYSRISSARNGLAFSQTSFVPLKDNCEIHKIVLTNESRADKDVDVFLLYRILFVEPQ

SEQ ID NO: 51877 - DNA, 765 bp, Unknown
  Obtained from environmental sample
  misc_feature (1)..(765): n is a, c, g, or t
atgctggccgtgctggcggcgctcgcggcgggggcagtatggggcggcgttgtcggtttcttcaaggcgcggttcaaagtttccgaggtagtcgccacgattatgatgaattacatcgccctttacgcccacaggatcatcacgctgaatataccgggaagcaatacctacaggacgccgaattttccggacagcgccttgctctccagcacaatgctttcaggcctgaccaacggttcgcggctcaattacagcctgtggtttaccctccttgccgttgttttttattttcttgttatcgaaaaaacaaccctgggctattcgcttcgcgccacggggctgaacagggacgccgcttcttacgggggcatcagcgtaaacgccaatatcaccatcgcgatggcgatagccggcgctttcgcgggccttgccggcgcctcggtctcgttaggtgtttttaactacggcaggatattggcgggaatggaaaattacggttttgacggcatcgccgtcgcgctggtgggcaacagcaccgcctggggaaccggccttgccggccttttgttcggaatgttaaaatccgcccagccgctcatgcagagccgccagatacccaaggagatcacctcgataatcatggggctggttgtcgtgtttatctccctccgggccggcgtcaagctgattattgaatggcagatgaaagaaaaagcaaaacgctcgcagggtgagtgcccaccttgtggggaggagaaaagctaa

SEQ ID NO: 51878 - protein, 254 aa, Unknown
  Obtained from environmental sample
  SIGNAL (1)...(15)
  DOMAIN (1)...(222): Branched-chain amino acid transport system / permease component
  misc_feature (1)..(254): Xaa is any amino acid
MLAVLAALAAGAVWGGVVGFFKARFKVSEVVATIMMNYIALYAHRIITLNIPGSNTYRTPNFPDSALLSSTMLSGLTNGSRLNYSLWFTLLAVVFYFLVIEKTTLGYSLRATGLNRDAASYGGISVNANITIAMAIAGAFAGLAGASVSLGVFNYGRILAGMENYGFDGIAVALVGNSTAWGTGLAGLLFGMLKSAQPLMQSRQIPKEITSIIMGLVVVFISLRAGVKLIIEWQMKEKAKRSQGECPPCGEEKS

SEQ ID NO: 51879 - DNA, 942 bp, Unknown
  Obtained from environmental sample
  misc_feature (1)..(942): n is a, c, g, or t
gtgcccaccttgtggggaggagaaaagctaatggctttctttgaggttattgtacaaatgctcccgtcaacctttatgatagtttccccgattcttatcgccgcgataggcgggatgatctgcgaaagggcgggcgtggtgaacatcgcgcttgaggggcttatgtcgatgggcgcgatgaccgccgccgtgtgccatgtccttttggaatcaaaaatcggcttctccataccgctggccctgctcatggcaatggccgtgggcgggctgttctcgcttatacacgcgtttgcctcaatcacccttcgcgccgatcaggttatatccggcaccgggataaacctccttgccaacggcgtaacggtatttgtctgccagcttttatttcagatggaccgcagccaaaactaccggatgggaatgagatccgggttgttcagcatataccctacgatatggcttgccctggggcttctggcgctcagttggtacatgctgtacaagcggccctggggtttgcgccttcgcgccgcgggcgagcatccgcaggcccttgcctcggccggcgtgaacgtaatcaggatacgttacattgccgtgcttatatccggcattctcgccggtcttgccggcggctgcatagtccttacccaggacatccaatacactgtcagcacgataaacgggaagggttttatcgcgctcgcggcggtgtctttcggccgctgggttcccctgggcatactcggctccagcttcctgttcggcatgtcctccgcccttgcggttaacattatcaacatcagcggcctgcaattcctgccctcggaatttttcaacatgatgccctatctgattacgcttgtcaccttggttctgttcagcggcaaggactacgccccaagggctgccgggcagccctacgacaaaagcaagagctga

SEQ ID NO: 51880 - protein, 313 aa, Unknown
  Obtained from environmental sample
  DOMAIN (20)...(291): Branched-chain amino acid transport system / permease component
  misc_feature (1)..(313): Xaa is any amino acid
MPTLWGGEKLMAFFEVIVQMLPSTFMIVSPILIAAIGGMICERAGVVNIALEGLMSMGAMTAAVCHVLLESKIGFSIPLALLMAMAVGGLFSLIHAFASITLRADQVISGTGINLLANGVTVFVCQLLFQMDRSQNYRMGMRSGLFSIYPTIWLALGLLALSWYMLYKRPWGLRLRAAGEHPQALASAGVNVIRIRYIAVLISGILAGLAGGCIVLTQDIQYTVSTINGKGFIALAAVSFGRWVPLGILGSSFLFGMSSALAVNIINISGLQFLPSEFFNMMPYLITLVTLVLFSGKDYAPRAAGQPYDKSKS

SEQ ID NO: 51881 - DNA, 606 bp, Unknown
  Obtained from environmental sample
  misc_feature (1)..(606): n is a, c, g, or t
atgaccatcacaaaaaatttaatcatgatgatgaacggcacattgactgtaaacagccagcacggaaagggcacagaaatgatcgtgcgtattccgcaacgtcttgccggccatgaaacggttggcaaaaagcatattgaaaattttaagggtatgttgcttgaacaaaaagattaccccaacagcaaaaaaattaaaagagaattaatgccttacggaaaagtccttattgtagatgatatgaaagcgaatattgatgtagcaaaattactgctaaagccttatcagcttaatatcgaaacagctgaaagcggtttagaagcgataaatcttgtcagaagcggcaatgaatatgatattatttttatggatcacatgatgccggtaatggacggcatggaagccgtgaaggaattgcgtacgatgggatataaatccccaatcattgcgttaactgcaaacgcagtcgttgggcaacaggatatttttatttcaaacggatttgacggttatatttcaaagcctatagacattcgtcaattaaacgattcgctcaataaatttattcgtgataaaaagaacaatgccgctacagcatcacaatga

SEQ ID NO: 51882 - protein, 201 aa, Unknown
  Obtained from environmental sample
  DOMAIN (73)...(186): Response regulator receiver domain
  misc_feature (1)..(201): Xaa is any amino acid
MTITKNLIMMMNGTLTVNSQHGKGTEMIVRIPQRLAGHETVGKKHIENFKGMLLEQKDYPNSKKIKRELMPYGKVLIVDDMKANIDVAKLLLKPYQLNIETAESGLEAINLVRSGNEYDIIFMDHMMPVMDGMEAVKELRTMGYKSPIIALTANAVVGQQDIFISNGFDGYISKPIDIRQLNDSLNKFIRDKKNNAATASQ

SEQ ID NO: 51883 - DNA, 438 bp, Unknown
  Obtained from environmental sample
  misc_feature (1)..(438): n is a, c, g, or t
atgcttggacctccaacctatcaaccaggtagtctccctggtacctttaggggggttaaacccccagggatggtttatcttgaggggggcttcccgcttagatgccttcagcggttatcccgtccgaacgtagctacccggcgcgtgcccttggcaggacaaccggtacaccagaggttcgtccatttcggtcctctcgtactaaaaacagctcctctcaaccatccaacgcccatggcagatagggaccgaactgtctcgcgacgttctgaacccagctcacgtaccgctttaattggcgaacagccaaacccttgggacctgcttcagccccaggatgcgatgagccgacatcgaggtgccaaaccttcccgtcgatgtggactcttggggaagatcagcctgttatccccggagtaccttttatccgttaagtga

SEQ ID NO: 51884 - protein, 145 aa, Unknown
  Obtained from environmental sample
  misc_feature (1)..(145): Xaa is any amino acid
MLGPPTYQPGSLPGTFRGVKPPGMVYLEGGFPLRCLQRLSRPNVATRRVPLAGQPVHQRFVHFGPLVLKTAPLNHPTPMADRDRTVSRRSEPSSRTALIGEQPNPWDLLQPQDAMSRHRGAKPSRRCGLLGKISLLSPEYLLSVK

SEQ ID NO: 51885 - DNA, 303 bp, Unknown
  Obtained from environmental sample
  misc_feature (1)..(303): n is a, c, g, or t
gtgccaaaccttcccgtcgatgtggactcttggggaagatcagcctgttatccccggagtaccttttatccgttaagtgacggcgcttccactcgctgccgccagatcactaagacctactttcgtacctgctcggcctgtcagcctcgcagtcaagcctccttgtgcctttacactcatgcgccgatttccaaccggcgcgaggagaccttcgcgcacctccgttactctttgggaggcgaccgccccagtcaaaccgcctgcctatcactgtccccggcccggattcacgggtcgggttag

SEQ ID NO: 51886 - protein, 100 aa, Unknown
  Obtained from environmental sample
  misc_feature (1)..(100): Xaa is any amino acid
MPNLPVDVDSWGRSACYPRSTFYPLSDGASTRCRQITKTYFRTCSACQPRSQASLCLYTHAPISNRREETFAHLRYSLGGDRPSQTACLSLSPARIHGSG

SEQ ID NO: 51887 - DNA, 942 bp, Unknown
  Obtained from environmental sample
  misc_feature (1)..(942): n is a, c, g, or t
gtgactgaagacgagtcccttacagcggatgatcttcccgacttgtctgaaggtgatactacaatcgaagacacgtcccttgccgcggatgatttagcggacttgtctgaagtagacacgggaatcaacacaacccttgccgcggatgattttcccgatttatccgaaggtgatacggcaaccgaagacacttctcttgtcacggatgatcttgcgttatccgaaagcgatacggtaaccgaagacacttcccttaccgcggatgatcttcctgacttgtcagatgaagatatgttaattgaagattcccttgttatggatgatcttcccgacttatccgaaggagacgcggcaatcgaagacgcatcccctaccgcagatgatcttcccgacttatccgagggagacgcggtagtcgaagacacttcccttaccacagatgatcttcccgacttgtctgatggagatatggcaattgaagaatcccttgttatggatgatcttcccgacttgtctgagggagacgcggtaaccgaagacacatcccttgccgcagatgattttgccgacattacagacggcgagaatttaactattaatgaagacaccgcaaaaagcgatgaacttgatatactccgcgaagaaggcgctcccatcccgattaccgaaacaccgganaacagctcgtatcttgaagaaggcggtgatattgatctgtcaaacgcggtaattgacgaaccggaattatcaacggaaggcattaacgatgaattgacggaacctaccctggacggtgacgattttaccttgattcacttgatgacctgtcaattgattctgaattggacttggatagcgatctttcttccgccggtgatattgaatcaatggaggaagaaacggcacaacccgagcaagaaccacctgaagcctcagaattag

SEQ ID NO: 51888 - protein, 313 aa, Unknown
  Obtained from environmental sample
  misc_feature (1)..(313): Xaa is any amino acid
MTEDESLTADDLPDLSEGDTTIEDTSLAADDLADLSEVDTGINTTLAADDFPDLSEGDTATEDTSLVTDDLALSESDTVTEDTSLTADDLPDLSDEDMLIEDSLVMDDLPDLSEGDAAIEDASPTADDLPDLSEGDAVVEDTSLTTDDLPDLSDGDMAIEESLVMDDLPDLSEGDAVTEDTSLAADDFADITDGENLTINEDTAKSDELDILREEGAPIPITETPXNSSYLEEGGDIDLSNAVIDEPELSTEGINDELTEPTLDGDDFTLIHLMTCQLILNWTWIAIFLPPVILNQWRKKRHNPSKNHLKPQN

SEQ ID NO: 51889 - DNA, 552 bp, Unknown
  Obtained from environmental sample
  misc_feature (1)..(552): n is a, c, g, or t
ttggacttggatagcgatctttcttccgccggtgatattgaatcaatggaggaagaaacggcacaacccgagcaagaaccacctgaagcctcagaattagacgctgaaagcttggatgaagaggttgataatgttatttccgaaagtaattttgaagacgaacttgaagaacctgtcgtttttgacgattttcaagatttttcagcagacaattttgacagtgtaatagaagaacccccagcaaaagttgcgcccgtaaaacaacctgccgctccaaaggctccagccgctcctcctgttcaacaacaagcggctaccgctccgcaaccgattatcatgcaagcgccggcgcaaccacaaccgcaggcacagcctggcggcggtggaaatcaattttctattccttcgggcttgcgctctgaacttaggaacatcctcagttatatggatcaacttcttgaatcgttaccggaagaaaaaatcgaagagtttgcgaaatccgaatacttcgattcctacaaaaaactatttaaggatttggggctggtataa

SEQ ID NO: 51890 - protein, 183 aa, Unknown
  Obtained from environmental sample
  misc_feature (1)..(183): Xaa is any amino acid
MDLDSDLSSAGDIESMEEETAQPEQEPPEASELDAESLDEEVDNVISESNFEDELEEPVVFDDFQDFSADNFDSVIEEPPAKVAPVKQPAAPKAPAAPPVQQQAATAPQPIIMQAPAQPQPQAQPGGGGNQFSIPSGLRSELRNILSYMDQLLESLPEEKIEEFAKSEYFDSYKKLFKDLGLV

SEQ ID NO: 51891 - DNA, 1293 bp, Unknown
  Obtained from environmental sample
  misc_feature (1)..(1293): n is a, c, g, or t
ttgagccgggtcttggttacattattccggtattacaggaaaggtttaaaanaagcaaatactggttcttccgtggagagctttccgcaagacccttcttttccgcaggtacataccctaaccggcgttgataccgcggaaattcaggagttcttggaaactcatattcgggaaattaacatcgaccgtattcgcgttattgaatggcgtccctctttaaactactacaaagaagcttatgtaaaacttctctcttcgatcgccacatttttaaaaaggacggacgcggaaaaaagaacgacagctacttttggaaaaagatgggtaaggaatttttttaaaaacatcgggaacattaaacatacccttttatacaggcaaatggaaattcccgttattattacaggttcaggtccaagccttgaacaggctctgcccatcattcaaaaagcgcaaaacaactgcctaatcatcgccgcctcttcttcggttctcgcgctatcatctgccggcataacggcggatatggtcatcgccactgacggcggcagttgggcgttaaaacacatctaccctttttacagaaattacaaaaataaaaactcaagcgctcttgccgtaaatttatgcgccgcccttccctcccaatgcgccgataccgctcatttgataataaacgacggcagtttttggcaaagcatcgttcttcatgaacttaatttaccgtccgtgattattccgcanaggggaacggtaacggcaaccgccgtggaacttgcgatgcttctttcaagcggaaatatctacctcgccggtttggatttttccgttaacgacataagaacgcacgcaagaccgtatagttttgacagcctgttttacagccgcgctaaccgttttgttccttnttattcggaaagttattcgcgttcaagactgcttcatcagggcggaagtatggacatatacgcgtcatggtttaaagagcagttaaacaagtggtcaaaacgaatttattccataggcggcaataaaatttttgaacacggtgagccttcgccgcgcaacggtttaaaaaagactgatgatttttttaagagggtcgaagttgaaaattcaaatgtcttttgcgagaaaggaatacaagccctgcttaacgcattaaaaaaatccgaatactcacaaaatataaaacgggaacttaattccctgcttttttcaggcgaaaatgaagtaacggagcgggaattggaaaccgcaataaaagaaacctgtataaaggcgcttacatga

SEQ ID NO: 51892 - protein, 430 aa, Unknown
  Obtained from environmental sample
  DOMAIN (111)...(275): Protein of unknown function DUF115
  misc_feature (1)..(430): Xaa is any amino acid
MSRVLVTLFRYYRKGLKXANTGSSVESFPQDPSFPQVHTLTGVDTAEIQEFLETHIREINIDRIRVIEWRPSLNYYKEAYVKLLSSIATFLKRTDAEKRTTATFGKRWVRNFFKNIGNIKHTLLYRQMEIPVIITGSGPSLEQALPIIQKAQNNCLIIAASSSVLALSSAGITADMVIATDGGSWALKHIYPFYRNYKNKNSSALAVNLCAALPSQCADTAHLIINDGSFWQSIVLHELNLPSVIIPXRGTVTATAVELAMLLSSGNIYLAGLDFSVNDIRTHARPYSFDSLFYSRANRFVPXYSESYSRSRLLHQGGSMDIYASWFKEQLNKWSKRIYSIGGNKIFEHGEPSPRNGLKKTDDFFKRVEVENSNVFCEKGIQALLNALKKSEYSQNIKRELNSLLFSGENEVTERELETAIKETCIKALT

SEQ ID NO: 51893 - DNA, 840 bp, Unknown
  Obtained from environmental sample
  misc_feature (1)..(840): n is a, c, g, or t
ttggccgagtggatcggtaaaacaatggacaggatagcgtgcgttattgaacaatcggatgagttccgtttccgcatgagaaatttacacaatgaatgtcatgccgaagcgcataatccgaaagataaccttggcatcatcatgtcgcgcgccggtgtagaaatagccgcggaggtaaacgcgaaagccattgtaacgcctacgcgcagcggcaacacggcgcgaatcttaagcgtattcaggccggaagagcctatttttgctgtaacaacagacgagcgctccgagcgcattatgcagttatactggggcgttactacctgcatcaggcctaaagttgacgattcggaaaccatgataaacgacaccatgaaaattgtttccgataccggggtagcgggtatatccgataaagtagtgcttattgccggccttccgcttgaaagcccgaacatgataaacaatatccgcgtcgtaattatagggacagttctcgcgcgttcaaacgccggcggtttcgcgaatccgaacattacacgcgcacatggcaagataatccacgcagatactccggatgaagcccgcaagaaaatcatgtcctcaggaggcggcgatataattatttgcaaggaacttaccgaggaatacggttccgttatcagcatggtaagcggaatcatttgcgagggagtttcggtaatcgtcgaacagaagttacgcattttcaatcccaatcttgtctggcttacccacataagggacgcgtcgaagaaactcgaaaacgggttaacggttacgatagacgggaaggaactgcttgtgtatgaaggggcgatataa

SEQ ID NO: 51894 - protein, 279 aa, Unknown
  Obtained from environmental sample
  DOMAIN (48)...(160): Pyruvate kinase, alpha/beta domain
  misc_feature (1)..(279): Xaa is any amino acid
MAEWIGKTMDRIACVIEQSDEFRFRMRNLHNECHAEAHNPKDNLGIIMSRAGVEIAAEVNAKAIVTPTRSGNTARILSVFRPEEPIFAVTTDERSERIMQLYWGVTTCIRPKVDDSETMINDTMKIVSDTGVAGISDKVVLIAGLPLESPNMINNIRVVIIGTVLARSNAGGFANPNITRAHGKIIHADTPDEARKKIMSSGGGDIIICKELTEEYGSVISMVSGIICEGVSVIVEQKLRIFNPNLVWLTHIRDASKKLENGLTVTIDGKELLVYEGAI

SEQ ID NO: 51895 - DNA, 744 bp, Unknown
  Obtained from environmental sample
  misc_feature (1)..(744): n is a, c, g, or t
ttgttacaagctgaattcagtccgtttgacgaacccatgaaacgtaaactggctgctgttaatgcaagtctttctctggctgatattatttttcaggaaattagaagttatcaaagaaaattcagtaaagaaatggataaaagacgcgaaagtttttttcaaaagattgaagaatcaactgatgatctgcttttctctgaagaacaaagtaaaaaaaacaaccctcttaacgtcagtgatgtaaaaaatatttccgtatacaatgaaaacgtttctatcgatgatcttcttgtcaatgcgctatccgcccacaatcagaaccggtttaatgatgcaataaatcaatacagcaaaatacttgaattaaagccaaatagcactatttgttcattaatatataaacaccggggaatggctaactttgcctgttcctgttacaacgaagcaattgacgattttactaatgcttttgctcttgataacaaatcatataaagcagcctattaccgcggagttgtctattctgtattgaaggaatattcatctgcaatagatgattataccctgtctctttcaataaatccatatcaatcattttgtcttttcaggcgggcgcaggcttattatcacataggagattatccccaagctttatccgattgtgaaaattcccttgctcttgaacctcaaaacaaattggcaatcaagttcaagcaattactgcatgacaagttaaaaatgtaa

SEQ ID NO: 51896 - protein, 247 aa, Unknown
  Obtained from environmental sample
  DOMAIN (198)...(231): Tetratricopeptide repeat
  misc_feature (1)..(247): Xaa is any amino acid
MLQAEFSPFDEPMKRKLAAVNASLSLADIIFQEIRSYQRKFSKEMDKRRESFFQKIEESTDDLLFSEEQSKKNNPLNVSDVKNISVYNENVSIDDLLVNALSAHNQNRFNDAINQYSKILELKPNSTICSLIYKHRGMANFACSCYNEAIDDFTNAFALDNKSYKAAYYRGVVYSVLKEYSSAIDDYTLSLSINPYQSFCLFRRAQAYYHIGDYPQALSDCENSLALEPQNKLAIKFKQLLHDKLKM

SEQ ID NO: 51897 - DNA, 804 bp, Unknown
  Obtained from environmental sample
  misc_feature (1)..(804): n is a, c, g, or t
atgaacaaaagctatgattaccgggctaaaatgacggccgcccgccttccctggctggtcggcgtgtcggtattaatctttttgatactaattctggtgttaagccttttaacaagaagccggagtatcggcagagaactggaagatttggtaaaggagaggacaagggaactcacgttcgagacatccaaacttcaggcggtaattgactcaattcccgacatccttttctgcaaggatactgattttaagtacacgcaatgcaatcattcctttgaacggttcgtaggcattaaagaagaacaaataaaaggcatgaccgacaaagaaggcgtatggtttcagccggaagatatgaagaatattcatgaaaaggaaaaaagcgtaattattaataacaaggcgataacctttgaagaaaaaatccactcgccccttacaggaaaagaaaaatattttgaaacagtcaaggctccgataaagcaaaacggagaagtggtggggatagtcgccattaaacgcgacataaccgggcgcaaggaaatggagcaggaacttgcttttaagaccgcaaaattgcagatgataattgatacaatcccggacattctgttctgcaaggatacaagcttaaaatacacgcaatgcaacaagccttttgaaaatttcttcggcatttcggaagcggatatgctgggcaaagcggatgaggacagtccgtggttttctcccgacatgttaaaagacataaccgttaccgaattggccgtaatgggcgaaagaaatcatttacccgtgaattaa

SEQ ID NO: 51898 - protein, 267 aa, Unknown
  Obtained from environmental sample
  DOMAIN (69)...(181): PAS fold
  misc_feature (1)..(267): Xaa is any amino acid
MNKSYDYRAKMTAARLPWLVGVSVLIFLILILVLSLLTRSRSIGRELEDLVKERTRELTFETSKLQAVIDSIPDILFCKDTDFKYTQCNHSFERFVGIKEEQIKGMTDKEGVWFQPEDMKNIHEKEKSVIINNKAITFEEKIHSPLTGKEKYFETVKAPIKQNGEVVGIVAIKRDITGRKEMEQELAFKTAKLQMIIDTIPDILFCKDTSLKYTQCNKPFENFFGISEADMLGKADEDSPWFSPDMLKDITVTELAVMGERNHLPVN

SEQ ID NO: 51899 - DNA, 1707 bp, Unknown
  Obtained from environmental sample
  misc_feature (1)..(1707): n is a, c, g, or t
gtggttttctcccgacatgttaaaagacataaccgttaccgaattggccgtaatgggcgaaagaaatcatttacccgtgaattaaacctctcggcgcccataacagggaaagaagcggtttttgaaatagctctgtctccgctcaagcagaaagacgttgttgtcggaatgatgggtattgcgcgagacataacccagcgcaagtcaatggaggaggaaatccgggccgcttcgcaggccaagtccgctttccttgccaatatgagccatgaaatcagaacgcccctcaacgcggttatcgggcttactgacttactgctggaagatgaccaattgacagattatgttgcggctaatttattaaagataagcaacgcgggcggtacgctactaagcattgtaaacgatattcttgatttttccaaaattgagtcaggcaagcttgaattaatacctgttgaatattatataccaagcctgctgaatgatgttattacccttgttgttatgagcatcggggaaaagcccataacattccgcctaaatatcggcgatgatctgccggatactctttatggtgatgatctgagggtgaaacagatattcaccaacctgctctccaacgctgtcaaatatacccgccagggaagcatagagctaagtgttagctgtacacgcgaaggcaataccgtgtgggtggatgttaccataaaagataccggcatcggtatacgcgaggatgatataaagaaacttttttcagattatttccaggcagatgccaaggccaatcgcaatattgagggcacaggactgggattgtccattaccaaaagacttgtggagatgatggaagggacaatcagtgtagagagcgagtacggcaaaggctcaaagttcagttttcgcgtaaggcagggctttgttgacgatgcggttctcggagcggatgtctcggataaactccgtaacttctgttactccgatgaaaagaaaattgtcggtaaaaaattggtaagggttaatttgagttacgccagggtactggtagtagacgatatggaaaccaatctggatgtggcggcaggtattttaggcaattacaagatgcaggttgactgtttaagcaacggccctgccgcgattgaacgaatacgcggcgggactccggtctacaacgctgtattcatggaccacatgatgccagggatggatggcatagaaacggcggacaggattcgcgcgttaggtacggaatatgcgaagaagataccaataatcgcccttacggccaacgccatacacggaaccgacaagatgttctatgaacacgattttcaggcatttataaccaaaccgatagatgtaatggaaatggatgccgttctcagaaaatgggtacgcgacgataaacatgaagaagtgccggttaccgaggagtcttccgagaccgacaaaaaaattgaaagtctggtaatagagataccgggagtggatactaaaaagggactttccctctacgccggctccaggaaaatttatctgccactgctgcgctcctataccatcaacacgccaaaaatactggacaagctgcgttccgtttcggcggagactttgcctgactatgttattgacgtacacgggttgaaaggcacaagcgccggcataggcgcggaagcggtacgggaggccgcttggaactga

SEQ ID NO: 51900 - protein, 568 aa, Unknown
  Obtained from environmental sample
  DOMAIN (346)...(464): Response regulator receiver domain
  misc_feature (1)..(568): Xaa is any amino acid
MVFSRHVKRHNRYRIGRNGRKKSFTRELNLSAPITGKEAVFEIALSPLKQKDVVVGMMGIARDITQRKSMEEEIRAASQAKSAFLANMSHEIRTPLNAVIGLTDLLLEDDQLTDYVAANLLKISNAGGTLLSIVNDILDFSKIESGKLELIPVEYYIPSLLNDVITLVVMSIGEKPITFRLNIGDDLPDTLYGDDLRVKQIFTNLLSNAVKYTRQGSIELSVSCTREGNTVWVDVTIKDTGIGIREDDIKKLFSDYFQADAKANRNIEGTGLGLSITKRLVEMMEGTISVESEYGKGSKFSFRVRQGFVDDAVLGADVSDKLRNFCYSDEKKIVGKKLVRVNLSYARVLVVDDMETNLDVAAGILGNYKMQVDCLSNGPAAIERIRGGTPVYNAVFMDHMMPGMDGIETADRIRALGTEYAKKIPIIALTANAIHGTDKMFYEHDFQAFITKPIDVMEMDAVLRKWVRDDKHEEVPVTEESSETDKKIESLVIEIPGVDTKKGLSLYAGSRKIYLPLLRSYTINTPKILDKLRSVSAETLPDYVIDVHGLKGTSAGIGAEAVREAAWN

SEQ ID NO: 51901 - DNA, 459 bp, Unknown
  Obtained from environmental sample
  misc_feature (1)..(459): n is a, c, g, or t
ttgtatcgaagcgctgctttccaatcaggaaataagctccccgctcacctgacagacttaatcagtccaagggacgcggatgacattctttcggcagggaagaaccttgcgcagcgttttgcgcggtctccattgggaaacattgccagagaatcgaaaaaactgaaaagcgaattcccctttcgcagtcttttttacacaggtgaaaaagaactctttataaacgggattatcgatcttctgtttgaagacgcggaaacggtttatgtggttgaccttaaaaccgacagccaggaattaccctgggagcatatccctcaaatggcgtgttattacaaggcggcatcggatctttttgccattcccgcgaacaagaaatgcagggcatggctttactacctgcgaaccggccatgcggtagatgtaaccatgaaagcaaaggaattcgaatttagataa

SEQ ID NO: 51902 - protein, 152 aa, Unknown
  Obtained from environmental sample
  misc_feature (1)..(152): Xaa is any amino acid
MYRSAAFQSGNKLPAHLTDLISPRDADDILSAGKNLAQRFARSPLGNIARESKKLKSEFPFRSLFYTGEKELFINGIIDLLFEDAETVYVVDLKTDSQELPWEHIPQMACYYKAASDLFAIPANKKCRAWLYYLRTGHAVDVTMKAKEFEFR

SEQ ID NO: 51903 - DNA, 777 bp, Unknown
  Obtained from environmental sample
  misc_feature (1)..(777): n is a, c, g, or t
atgcagtattttgatactcacgcccatttggggcttattgttgatgaccccattgagcaactcattgttattcaggaagctcgtcaggcttctgtgaaccgaattgtctctatttgcaacagtctgcatgactttagcaaggtctatgagaatctaaaatcaacggcgaatgtttaccatgctgtaggcgtaagcccttctgaagtgcaaaaccccggcaaaaactggctgcagaccatagagcaaagcgtccagttcccgcgggtagtggcaataggcgagatcggcctggactattaccggaaattcggcgacaaaaagtcccaaatcgagctgtttattacacagcttgatctggctgccaagctcaatatgcctgtaatcatccataaccgggacgcgggccacgatgtgctggaaatacttcgcgatcgtctgccgcccagggggggagtgctgcattgctattccgaggatgccgcttatgcaaaggaagcccgaaagctgaacctgtatttttcctttgccggaaaccttacctacaagaacgcccgcaacctccacgagacgattccggaactgcccgttgaccgcatccttatcgaatcggaaagcccgtttatggtgccgaccgggcaaaagggcaagcgcaatatgcccaaatacctgcccgaaacctgcctgtgcctcgctaagatgctggacatggagccggaagcggccgcggcgcagctctgggagaacgccaacaggttttttggccttccgaatgaataa

SEQ ID NO: 51904 - protein, 258 aa, Unknown
  Obtained from environmental sample
  DOMAIN (1)...(254): TatD related DNase
  misc_feature (1)..(258): Xaa is any amino acid
MQYFDTHAHLGLIVDDPIEQLIVIQEARQASVNRIVSICNSLHDFSKVYENLKSTANVYHAVGVSPSEVQNPGKNWLQTIEQSVQFPRVVAIGEIGLDYYRKFGDKKSQIELFITQLDLAAKLNMPVIIHNRDAGHDVLEILRDRLPPRGGVLHCYSEDAAYAKEARKLNLYFSFAGNLTYKNARNLHETIPELPVDRILIESESPFMVPTGQKGKRNMPKYLPETCLCLAKMLDMEPEAAAAQLWENANRFFGLPNE

SEQ ID NO: 51905 - DNA, 819 bp, Unknown
  Obtained from environmental sample
  misc_feature (1)..(819): n is a, c, g, or t
atgtcgctgaactggaaagagataaatctaatactggaagaactctcaattgaaggcgcacagattcaaaacgccgttcaaagcgcttttgatgttattattttacgaattcataaaaagggagaaacaaaaaacattttaatttccctgagttccggtgcttgcagaattcacgaaacattttcatcttttcccaaaagcgataaacctctgcgttttgcccagtttttaaattccagaatagtgaacggctggataaccgaagcggtgcagcttggaaacaaccgtattgtcaggattaccgtaaaacgcggacagtttgtctataaaatgtatatcaggctttggtcaaatgctgcgaattttatcgttacagacgaaaacggcacagtgttagacgcaatgcgccgcctgcctaaacgcggtgaagtaaccggcggcagttatttgcctgaaattcaggatgaaaacaaaaaaacggagcgcaaatacgaaataagggaaatagacggagaagattcttttaataaaaagattgataaatattacgctgcatccggaggcagtctttcgcttgaagcgctgagagagcaggcaaggcgcagctgcgaaggaagtttggggagaattaacgccgctttggaaaggctgcgggaaaaagaatcttcgtttgcagatgcggcgcgttttaaaaattacggtgatttgatcctttccaatattgcaaatataaagcccgctgacaggtggcttgaaactgaagacggcggttctgtaatacgcattgaacttgatcccaaagcaaacctttcgctgtag

SEQ ID NO: 51906 - protein, 272 aa, Unknown
  Obtained from environmental sample
  DOMAIN (1)...(272): Fibronectin-binding protein A N-terminus (FbpA)
  misc_feature (1)..(272): Xaa is any amino acid
MSLNWKEINLILEELSIEGAQIQNAVQSAFDVIILRIHKKGETKNILISLSSGACRIHETFSSFPKSDKPLRFAQFLNSRIVNGWITEAVQLGNNRIVRITVKRGQFVYKMYIRLWSNAANFIVTDENGTVLDAMRRLPKRGEVTGGSYLPEIQDENKKTERKYEIREIDGEDSFNKKIDKYYAASGGSLSLEALREQARRSCEGSLGRINAALERLREKESSFADAARFKNYGDLILSNIANIKPADRWLETEDGGSVIRIELDPKANLSL

SEQ ID NO: 51907 - DNA, 450 bp, Unknown
  Obtained from environmental sample
  misc_feature (1)..(450): n is a, c, g, or t
atggagaactatgtacactctttcattgcgcctaaactcaccgcgttcatagtaccggtgctttttgtgtgtcttacggcggcaatgttggtggtcggcgttgttattatgcacaatatgaagaacacgggtgtaagcgtcggcaacggatttttgacggtaaaatctttgttttacgggaggaagatacctcttgacgaaattaatctcaacggcgttaagtcgttgaatttacacgatgaacgcaataaagattataagataacgctcagaaccaacggtatcgggttacccgggtatttagtcggatggatgagactgcacaacggccataaagcgttggtttatataacagatagaacaaatgtggtgctgatcccgaccgtgaatttcgatgtgttgatcagtacggatgatttcgaggggcttcggtacgcgctgagcaaatag

SEQ ID NO: 51908 - protein, 149 aa, Unknown
  Obtained from environmental sample
  misc_feature (1)..(149): Xaa is any amino acid
MENYVHSFIAPKLTAFIVPVLFVCLTAAMLVVGVVIMHNMKNTGVSVGNGFLTVKSLFYGRKIPLDEINLNGVKSLNLHDERNKDYKITLRTNGIGLPGYLVGWMRLHNGHKALVYITDRTNVVLIPTVNFDVLISTDDFEGLRYALSK

SEQ ID NO: 51909 - DNA, 642 bp, Unknown
  Obtained from environmental sample
  misc_feature (1)..(642): n is a, c, g, or t
atgaaagcaaccaaaacaataatgcctctgagcgccctattttttgcgttgtccctgtatcttctattgctgcccaaccaattgatcgccggacagaaaagtttttatgataggcttgccgactctgccttgacgttaaccgcgcataaagttcattatgatcccgcgtatacaactataggctaccccaacggagacgtagcgccggacaagggggtttgttcggacgtaattataagggcgtacagaaaattcggtatcgacctgcaaaaggaagtccacgaggatatgaaggtcaattttgacaaatatcccaagaaatggggcttaacaaagccggataaaaatatcgaccatagaagggtccccaacctaatgacgttttttacaaggtacgggacggtcaaaaaaataacggatgatccgaaagactacctacccggcgacatcgtttgctggcttttaagcggaaaaattacgcatatcggaatcgtgtccgggaggaagtcttccgatgggcagagatatttgatagttcacaatataggctatggacaagttcttgaagattgtctgttcgagttcaaaataatagggcactatcagtacgaaaagcaaagcgtcgcaccgtctcagccgtaa

SEQ ID NO: 51910 - protein, 213 aa, Unknown
  Obtained from environmental sample
  SIGNAL (1)...(23)
  DOMAIN (32)...(203): Protein of unknown function (DUF1287)
  misc_feature (1)..(213): Xaa is any amino acid
MKATKTIMPLSALFFALSLYLLLLPNQLIAGQKSFYDRLADSALTLTAHKVHYDPAYTTIGYPNGDVAPDKGVCSDVIIRAYRKFGIDLQKEVHEDMKVNFDKYPKKWGLTKPDKNIDHRRVPNLMTFFTRYGTVKKITDDPKDYLPGDIVCWLLSGKITHIGIVSGRKSSDGQRYLIVHNIGYGQVLEDCLFEFKIIGHYQYEKQSVAPSQP

SEQ ID NO: 51911 - DNA, 711 bp, Unknown
  Obtained from environmental sample
  misc_feature (1)..(711): n is a, c, g, or t
ttggagcaggcgcttatgcgcgacgtttcgttgcgtgagacctacgaggctaccaacttagcgcgtgttataaaatacctttggacgcgtcctaattacgagatcacgattgaaagtcttgaattgctgcaccagatgttgcttggcggaataaatgacgaatatgcgggacgtgttcgccgtgagggtgaatatgtgcgagtcggtcggcacattgcgccaccgcccgaacaggtaaaaaatctgctcgaaaacttaattaacagatacaacagcaacgttgacgattactttttaaaaaagatcgccgagtttcacttgcaatttgagacgatacaccctttttgcgatggtaacggacggatggggcggcttatcataaatctgcagcttgcggcattggggtttccgcccgtgattatacagaacaaaggcaaaagggaggattattacccgctttttgacgaatggcgcgataagcaaaaatcggacaaattcgccgattatctctacctcgccctctctgaatcgttcaacaaacggcttgcctacctacgcggaaatgaaatcgtgaaattgtcggagtacgccaagaataatagtgttggcgccgcattaattaccaacgccgcaaaacgtcaaaccataccggcttttcgccaagacggagtttggaggattgctaaagattatgtacgtaataatgattaa

SEQ ID NO: 51912 - protein, 236 aa, Unknown
  Obtained from environmental sample
  DOMAIN (40)...(160): Fic protein family
  misc_feature (1)..(236): Xaa is any amino acid
MEQALMRDVSLRETYEATNLARVIKYLWTRPNYEITIESLELLHQMLLGGINDEYAGRVRREGEYVRVGRHIAPPPEQVKNLLENLINRYNSNVDDYFLKKIAEFHLQFETIHPFCDGNGRMGRLIINLQLAALGFPPVIIQNKGKREDYYPLFDEWRDKQKSDKFADYLYLALSESFNKRLAYLRGNEIVKLSEYAKNNSVGAALITNAAKRQTIPAFRQDGVWRIAKDYVRNND

SEQ ID NO: 51913 - DNA, 516 bp, Unknown
  Obtained from environmental sample
  misc_feature (1)..(516): n is a, c, g, or t
ttgtgggctgcgggtgtcggcataaaagaaaatgaaagtgtacgcagggattcgcaaagggtacaagttgttgatatttatgataactgcgatgataatcgaggggaagatcgtgataagatggatagacttatggttattatcaacaaaatagacaaaaacgacaaatatatgatcgaaaaaaggcttttttgcgagcggtatatgtttaggtacgtagaaacaagcataacacaaaaactcaaccgagagcggttatttaacgctatcggttccatgttaaagagtataatgaaggatgtctccacaccggcaataataataaatgagcggcatagaggtatcatagcggcggtagtcggagatattcgggattgtttggataattttgaccgggaggaggtggcggcgcatactctacggttggcgttggaccgtctggcggaactttcagggcatgttgggaacgatgaggttttaaacgggatttttgagaggttttgtattggaaagtag

SEQ ID NO: 51914 - protein, 171 aa, Unknown
  Obtained from environmental sample
  misc_feature (1)..(171): Xaa is any amino acid
MWAAGVGIKENESVRRDSQRVQVVDIYDNCDDNRGEDRDKMDRLMVIINKIDKNDKYMIEKRLFCERYMFRYVETSITQKLNRERLFNAIGSMLKSIMKDVSTPAIIINERHRGIIAAVVGDIRDCLDNFDREEVAAHTLRLALDRLAELSGHVGNDEVLNGIFERFCIGK

SEQ ID NO: 51915 - DNA, 621 bp, Unknown
  Obtained from environmental sample
  misc_feature (1)..(621): n is a, c, g, or t
atgaatatggagcgccagcgggaatataataggattatttggcgcggaccggatacaggcggcggcgcggcgttcagggccgaatggaataacgcggatacttttttagggcgcgtgggtctgtattggaaccgcggaaaaccttatacggaatacaaaaatgtcttctgtgattttgagtttacaaaatccgccaatggcactgccggaggccattcatatctgggaatttacggctggtcgaaaaaccccatgatagaatggtacattgtggatgattggttcggaaacggaataattcaacctcataatataggcggaggggcggtaaaaaaaggcgagttttccgcggacggcgcaacctatttcatttatctggcaacaagaccggccggttccggcaatattgaaggcagcaaaaatcctttccctcaatatttcagcatacgtcaggaacgccgccaaaaaggaacgatttccataacggaacattttaaagcatgggaaaaaatcggtttaaaattgggaacaaatatgtatgaggctaaattccttgttgaggcgggcggcggaaccgggtggttcgacgcctcgtatatttcgttttatcaaaaagaatga

SEQ ID NO: 51916 - protein, 206 aa, Unknown
  Obtained from environmental sample
  DOMAIN (7)...(199): Glycosyl hydrolases family 11
  misc_feature (1)..(206): Xaa is any amino acid
MNMERQREYNRIIWRGPDTGGGAAFRAEWNNADTFLGRVGLYWNRGKPYTEYKNVFCDFEFTKSANGTAGGHSYLGIYGWSKNPMIEWYIVDDWFGNGIIQPHNIGGGAVKKGEFSADGATYFIYLATRPAGSGNIEGSKNPFPQYFSIRQERRQKGTISITEHFKAWEKIGLKLGTNMYEAKFLVEAGGGTGWFDASYISFYQKE

SEQ ID NO: 51917 - DNA, 345 bp, Unknown
  Obtained from environmental sample
  misc_feature (1)..(345): n is a, c, g, or t
ttgctggaaaggagcggcattctcaactggcttgtcgaaggcgctttgatgtggcaaaaagaagggctgaagccgccgagcataataatcaacgcgactaatgagtaccgcggcgagatggacgtcatcggaaattttatcaaagagcggtgcgagcaaaggcctgggcttgaaatcagggcgagggagctttttaggtgctatcaggactggtgcgaagaaagcaatgagcatgctgtcagcgagcgttttttagggctgcggctaaaggagcttgggcttgggcagcggcgcggcaatgacggccgctactggcaaaatattggggcgatgccaaataaatag

SEQ ID NO: 51918 - protein, 114 aa, Unknown
  Obtained from environmental sample
  misc_feature (1)..(114): Xaa is any amino acid
MLERSGILNWLVEGALMWQKEGLKPPSIIINATNEYRGEMDVIGNFIKERCEQRPGLEIRARELFRCYQDWCEESNEHAVSERFLGLRLKELGLGQRRGNDGRYWQNIGAMPNK

SEQ ID NO: 51919 - DNA, 1557 bp, Unknown
  Obtained from environmental sample
  misc_feature (1)..(1557): n is a, c, g, or t
atgccttttaaatacgaagaaaacctgcaatatggcaaagatgccacaaaatacaaccttatagccaaggcaaaagaagctgggatttccgttgccaaatttagtggcaaaaaagttctgaaagtcaaccgcaaggctttggtaaaattaaccgaagcagcctattcagaggtcagctttcgcctgcgtcccgcgcacacaaaacaggttgcctcaattttagaagacccagaagcaagccaaaacgataaactcgtggcactcacaatgctgcaaaattcttgcgttgcaaataaaggcattttgccattttgccaagacacaggcacagcctctgtttttgttaaaaaagggcaaaatatatggacaggaataaatgatgcagaagccatttccgaaggcatttacaatgcctacacaaaattaaatttacgctatagccaaattgccccgctcacaatgtacgaagaaacaaataccgcctgcaacctgccagcccaaatagatatttacgccgcagaaggcgaccattttgattttctctttgtagccaaaggcggaggctcggcaaataaaacttactattggcctatgacaaaggctttgctcactcctgcaaatcttgaaaaatttttgaacgaaaaaataaaaagccttggcacagcagcctgccctccataccaccttgctgttgtgataggcggcaccagcgcagatgcaaacttaaaacttgttaaacttgcaagcacaggttatttagaccacatcccaaccaaaggttcaaaaaatggaagaattttccgcgatttggaaatggaagcaaaggtaaaagagcttgcgcagaaaagcggcataggtgcgcagttcggtggaaaatatttggttcacgatgttcgcgtgattagagcgagccgccacgcggcgagttgcccagttggaattggcgtgagttgcagtgcagaccgcaacataaagggaaaaataactgaagaaggtttgttcttggagaaaatggaacacaatccagagcagtacttgccaaaaggcggctacgaatcacttggcttgtctcaaccagttagcataaacatagaccgcccgataaatgaagttttggaagatttaagcaaatatcctgtgaaaaccccgctttacttaactggaacaatgatagtggctcgcgatattgcccacgcaaaacttgcagagattttggagaaagaaggcgacttgccagaatatttcaaaaagcatcctatctattacgcaggtcctgcaaaaactccaaaaggcaagcccacgggtagctttggtccaaccactgcgggcagaatggactcttatgtggcgcgtttccaagaaaaaggcgcaagccttattatggtggcaaaaggcaaccgcaccaaagatgtaacggattcttgtcagaaaaacggtggtttctatttaggctcaataggcggtcctgcggcattgctcgcagagcaaaatattttgagcaacgaaatttggcatcccagaacttggaatggaagcaatccgcaaaatcaccgttaa

SEQ ID NO: 51920 - protein, 518 aa, Unknown
  Obtained from environmental sample
  DOMAIN (332)...(515): Fumarase C-terminus
  misc_feature (1)..(518): Xaa is any amino acid
MPFKYEENLQYGKDATKYNLIAKAKEAGISVAKFSGKKVLKVNRKALVKLTEAAYSEVSFRLRPAHTKQVASILEDPEASQNDKLVALTMLQNSCVANKGILPFCQDTGTASVFVKKGQNIWTGINDAEAISEGIYNAYTKLNLRYSQIAPLTMYEETNTACNLPAQIDIYAAEGDHFDFLFVAKGGGSANKTYYWPMTKALLTPANLEKFLNEKIKSLGTAACPPYHLAVVIGGTSADANLKLVKLASTGYLDHIPTKGSKNGRIFRDLEMEAKVKELAQKSGIGAQFGGKYLVHDVRVIRASRHAASCPVGIGVSCSADRNIKGKITEEGLFLEKMEHNPEQYLPKGGYESLGLSQPVSINIDRPINEVLEDLSKYPVKTPLYLTGTMIVARDIAHAKLAEILEKEGDLPEYFKKHPIYYAGPAKTPKGKPTGSFGPTTAGRMDSYVARFQEKGASLIMVAKGNRTKDVTDSCQKNGGFYLGSIGGPAALLAEQNILSNEIWHPRTWNGSNPQNHR

SEQ ID NO: 51921 - DNA, 621 bp, Unknown
  Obtained from environmental sample
  misc_feature (1)..(621): n is a, c, g, or t
gtggcgctgttaaaagtccttgccctaaacggaggcgaggtgccagcgtatctgaaggaggcggcaccggcagcatcgtattccacgtacactacgccggcttcgacaccgacgacattcatacaatcaaggggtggactgtcatacgccgaggtggagaatatcattgataacaaggtaagagcgaggggtggcgtctccaactggaggtattcgattgtcgatcttttgtcggccctggacatgaacagcagccttaccgcacgctcggcgcttgccgccaatctgaactattcaggccgtgacgccgatggttccgcagaaaagaatatgtggcttcatgcggagatattaagaatctttgccgaaaacagaggcgagataccatcgtatctgaggtcgggaggatacaatcctcaaccctacacgccaccccaacccacacccacaccaccacgcccacccgtacccccgcgcccacccacacccccacgtccacccacacccccacgtccacccacaccaaaacccaaccctccccagccttccgcgtcggatgcggctgcggcggcggccaaggcggcggcggaaagggcattgaaacgggcaaggggcgagtga

SEQ ID NO: 51922 - protein, 206 aa, Unknown
  Obtained from environmental sample
  misc_feature (1)..(206): Xaa is any amino acid
MALLKVLALNGGEVPAYLKEAAPAASYSTYTTPASTPTTFIQSRGGLSYAEVENIIDNKVRARGGVSNWRYSIVDLLSALDMNSSLTARSALAANLNYSGRDADGSAEKNMWLHAEILRIFAENRGEIPSYLRSGGYNPQPYTPPQPTPTPPRPPVPPRPPTPPRPPTPPRPPTPKPNPPQPSASDAAAAAAKAAAERALKRARGE

SEQ ID NO: 51923 - DNA, 300 bp, Unknown
  Obtained from environmental sample
  misc_feature (1)..(300): n is a, c, g, or t
gtggcttcatgcggagatattaagaatctttgccgaaaacagaggcgagataccatcgtatctgaggtcgggaggatacaatcctcaaccctacacgccaccccaacccacacccacaccaccacgcccacccgtacccccgcgcccacccacacccccacgtccacccacacccccacgtccacccacaccaaaacccaaccctccccagccttccgcgtcggatgcggctgcggcggcggccaaggcggcggcggaaagggcattgaaacgggcaaggggcgagtgaaatggagttga

SEQ ID NO: 51924 - protein, 99 aa, Unknown
  Obtained from environmental sample
  misc_feature (1)..(99): Xaa is any amino acid
MASCGDIKNLCRKQRRDTIVSEVGRIQSSTLHATPTHTHTTTPTRTPAPTHTPTSTHTPTSTHTKTQPSPAFRVGCGCGGGQGGGGKGIETGKGRVKWS

SEQ ID NO: 51925 - DNA, 480 bp, Unknown
  Obtained from environmental sample
  misc_feature (1)..(480): n is a, c, g, or t
atggagttgagtaaagagcaagatgaattgcttagtaagattttgtttcgggatttagatgctaataaaaaccaggttggggaagaattctgtcttgaagaacgtcctatgtttctggaagcaggttttgccgtgcagcatcttcctaacgagctaaagaccgaagctctctgccttgccgctgtgcaacaagacggcaaaacgctggaattcgtccccgaagcgctgaagaccgagaccctttgccttgccgccgtgcaacaaaacggctgggcgctgcaatacgttcccgacgcgcaaaagtccgaagccctttgccttgccgccgtgcaacaagactgctacacgcttcaatacgtccccgacgcgcaaaagaccgaaaccctctgccttgccgccgtgcaacaagacggcggcgcgttggcgtatgtgccggacgagctgagggacaaagtccaaaaggagaacgataatggctaa

SEQ ID NO: 51926 - protein, 159 aa, Unknown
  Obtained from environmental sample
  misc_feature (1)..(159): Xaa is any amino acid
MELSKEQDELLSKILFRDLDANKNQVGEEFCLEERPMFLEAGFAVQHLPNELKTEALCLAAVQQDGKTLEFVPEALKTETLCLAAVQQNGWALQYVPDAQKSEALCLAAVQQDCYTLQYVPDAQKTETLCLAAVQQDGGALAYVPDELRDKVQKENDNG

SEQ ID NO: 51927 - DNA, 597 bp, Unknown
  Obtained from environmental sample
  misc_feature (1)..(597): n is a, c, g, or t
gtggagtacgccgctacgttcataacggtacaccgtgccaagctcggcccagcgcaggggcaggtcgcgatagctgcggccctttgtnttatagatcataatatggaagggacagttcatcggtttgatgatgtaattctgctcatcgatttgcatggggctgtacatattgtccttgtaaaaccccaggtggccggaagtttcccagagccagcttttgccgatatgcggagtaaagagaatctcgtaaccgttacggtaatgctctttgcgccaaaaatcctcgatggcgacacggatacgtccgccgttggggtgccagtagatcaggcccgcgcccgcttcctcgtgaaccgagtagaggtcaagctccttgcccagacggcggtggtcgcgtttttcaacctcttccagaaaggcgaggtaggctttcaggtctttgggtgtttcccacgcggttccgtatatgcgggtgagcattgcgcgtttctcgtcgccgcgccagtaagcgcccgctacactttgcagcttaaacgccgccgagttgatttccctggtatttgcgacatggggcccccggcagagatcggcccatag

SEQ ID NO: 51928 - protein, 198 aa, Unknown
  Obtained from environmental sample
  misc_feature (1)..(198): Xaa is any amino acid
MEYAATFITVHRAKLGPAQGQVAIAAALCXIDHNMEGTVHRFDDVILLIDLHGAVHIVLVKPQVAGSFPEPAFADMRSKENLVTVTVMLFAPKILDGDTDTSAVGVPVDQARARFLVNRVEVKLLAQTAVVAFFNLFQKGEVGFQVFGCFPRGSVYAGEHCAFLVAAPVSARYTLQLKRRRVDFPGICDMGPPAEIGP

SEQ ID NO: 51929 - DNA, 867 bp, Unknown
  Obtained from environmental sample
  misc_feature (1)..(867): n is a, c, g, or t
atgcaaaaccattgttcgctctgctggcgtttatccattgcaaaaagaaatttaaacgcacaaatgaaaggtgccatattaaccagtcaaatagaacttttttttgaaataatgcagcacgactacccccacattcaaataataggcgtaaccggtacacttggaaaaggttcttgtgtttctatgattgcccactgcctgaatacttttaatattccacatttaattggtggcaattttggaattcccgcactggatttattgcaaaataaagatttgttctcaaataataataccgtaattatcttggaattaagttcatttcagcttatgacacttggcacttcaccgcatataggagttgttttgcaagtgacaagcgagcatttggattggcatacttcggtggaacaatatagagatgcaaaggcaaatttagttcgatggcaaaaaaggagtgatttctgcatttacaatgccacttccgaaggcgcagtgcaaatagcaatgttaagccgtggaataaaaaagccgtttaactctctcaaaattctgcttgatgaattcaaagttataggagcacaccaactgcaaaatatggcagcagcttgtcttgtcttggaatgcttgggaatggatacaaacatctgcctaaacgctttaaaactctacgaaggcttgccactccgcttgcaaaatataggcacaaaaatttataaaaacaaaacccttacattttacaacgattcatattccactcgtccagaggcaacaatagccgccgcaaaagcgatgaacaaacctttcacactcatactcggaggctcagaaaaacacgcagattttccgagcttctcggcgatctga

SEQ ID NO: 51930 - protein, 288 aa, Unknown
  Obtained from environmental sample
  DOMAIN (48)...(207): Mur ligase middle domain
  misc_feature (1)..(288): Xaa is any amino acid
MQNHCSLCWRLSIAKRNLNAQMKGAILTSQIELFFEIMQHDYPHIQIIGVTGTLGKGSCVSMIAHCLNTFNIPHLIGGNFGIPALDLLQNKDLFSNNNTVIILELSSFQLMTLGTSPHIGVVLQVTSEHLDWHTSVEQYRDAKANLVRWQKRSDFCIYNATSEGAVQIAMLSRGIKKPFNSLKILLDEFKVIGAHQLQNMAAACLVLECLGMDTNICLNALKLYEGLPLRLQNIGTKIYKNKTLTFYNDSYSTRPEATIAAAKAMNKPFTLILGGSEKHADFPSFSAI

SEQ ID NO: 51931 - DNA, 798 bp, Unknown
  Obtained from environmental sample
  misc_feature (1)..(798): n is a, c, g, or t
atgttaaatatgcagcaaaaacttgatctcctaaaaaatttaggccgtccgacaattaacgattacattccgctgatttttaaagactttatcgagtttcacggagaccgttatttcagcgatgatcctgcgctgcttggcggaatttgtctgttaaacgacactccggttactgttgtttcacaggtacgcgcaaaagatattgctgaattacagcgaatcaatttttccatgcctcaccccgaaggataccgcaaggctctgcgtctcgcaaaacaggctgaaaaatttcatcgtccctgtatctgctttatcgacactcccggcgcttactgcggagtaggagcggaagaaagagggcagggtgaggcaattgcgcgtaaccttcacgagttcatgatgcttaagaccccggttatttccgtcgttctaggagaaggcggctcgggcggagcgttggctctcggtgtctgcgacgagcttgcaatgcttgaaaacgctctctattcggttatttcgcccaagggttttgcttccattctgtggaaagacggctcaagggaaagggaagccgccgagcttatgaagattaccgctgaagacttaaaacgtttcggcgtttgcgataaaattatagcggaacctgaaggcggcgcggctaaggacgtaacccttacggcgaaaaatatcgcttcctggttaggtgaaactgtcagcaaacttaaaaatgaagatttcaacaaacttcccgaaagacgttatcagaaattcaggaagataggcgtattttctgaatag

SEQ ID NO: 51932 - protein, 265 aa, Unknown
  Obtained from environmental sample
  DOMAIN (2)...(95): Acetyl co-enzyme A carboxylase carboxyltransferase alpha subunit
  misc_feature (1)..(265): Xaa is any amino acid
MLNMQQKLDLLKNLGRPTINDYIPLIFKDFIEFHGDRYFSDDPALLGGICLLNDTPVTVVSQVRAKDIAELQRINFSMPHPEGYRKALRLAKQAEKFHRPCICFIDTPGAYCGVGAEERGQGEAIARNLHEFMMLKTPVISVVLGEGGSGGALALGVCDELAMLENALYSVISPKGFASILWKDGSREREAAELMKITAEDLKRFGVCDKIIAEPEGGAAKDVTLTAKNIASWLGETVSKLKNEDFNKLPERRYQKFRKIGVFSE

SEQ ID NO: 51933 - DNA, 534 bp, Unknown
  Obtained from environmental sample
  misc_feature (1)..(534): n is a, c, g, or t
ttgtcagatcggccgaggctgtccataaagggttttcctgccgtaatcggcataatggacagccgttttatgatggcaagtatgggcagtgttgtaggcgaaaaaattacccgcgccattgaatacgcgactgcaaacaaactgcctgtaatcattttttcagcgtcaggcggagcgcgtatgcaggaaggaattatctcccttatgcagatggctaaaacttcaggtgcagttgcgcgccataccgaagcaggccagctttatgtttcagttattacagacccgactacaggcggcgttaccgcttcatttgcaatgcttggagacataatccttgcggaaccgggggtaactttgggatttgcgggaaaacgcgtcattcaggacacaataggcgcagtactgcctgaaagattccagacttcggaatttgtgggcgaacacggatttgttgacgcaatataccgccgcagtgaactacccggcatgattgcaaaaatcataagacttcacggctataaaggaggacaataa

SEQ ID NO: 51934 - protein, 177 aa, Unknown
  Obtained from environmental sample
  misc_feature (1)..(177): Xaa is any amino acid
MSDRPRLSIKGFPAVIGIMDSRFMMASMGSVVGEKITRAIEYATANKLPVIIFSASGGARMQEGIISLMQMAKTSGAVARHTEAGQLYVSVITDPTTGGVTASFAMLGDIILAEPGVTLGFAGKRVIQDTIGAVLPERFQTSEFVGEHGFVDAIYRRSELPGMIAKIIRLHGYKGGQ

SEQ ID NO: 51935 - DNA, 1512 bp, Unknown
  Obtained from environmental sample
  misc_feature (1)..(1512): n is a, c, g, or t
atgaaaacaaatcctgtcgcggactaccttgccgcagtaacaccggaaaaaattgagccaagtatgctggcttatatttgtaatttaacggaagtcgccaaagttacgccggaaatcgcatcctctatcgttttggaattggaaaatcagagaaagcgcgtaaaattgatcgcaagcgaaaattactgctctatggcggttcagttggctatgggaaaccttttaaccgacaaatacgccgaaggtatgccggatcaccgtttttatgcgggcaacgaaaatgttgacgctatcgaatctttggcggcgcaggaagcttgtaaacttttcggcgcgcaatacgccaacgtgcaggctcattgcggagcggacgcaaaccttctggcatattgggctattctaagcacgcggatagaaactcccgcgctggaaaaactgggcgaaacaaatctctataaattaaccgattctcaatggaatgaattaagggcttctcttggaaaccagcgtcttttgggtttggattactattccggcggacacttaacgcacggttacagaaacaacctttcagggcgaatgttcgatattcacggatattccgtatctgccgaaaacggaatgcttgattacgacgaaattgaaaaacaggctcttgaagtgcgtccgttaattttattggccggttattccgcttatccgcgtaaaataaattttaagcgcatgcgggagatcgccgacaaagccggggcggtgttcatggtggacatggcgcacttcgccggattagtggccggcaaagtcctcaccggcgaattcgaccccgtggcgcacgcccacgtcgtcaccaccacgacccacaagacgctgcgcggaccgcgcggcggcatagtgctctgcaccgaggagttcgccgacagcgtggacaaaggctgcccgttagtcatgggcggccccctagcacatgtaatggccgcgaaagccgtggcgctcacggaggcaaacgccccgtcgtttaaaaagtacgccgccgccattgtaaaaaacgccgccgccatgagcaaacattgcgtagccgagggaatgacggtcgccaccggcggaaccgagaaccacctattccttatagacgtcacccccttcggcctgacaggccgccaagccgagagcgcactgcgcgaatgcggcataaccctgaaccgcaactccctgccatacgacaaaaacggcccttggtacacaagcggcctgagaataggcaccccggcgactacgacgctcggaatggacgtcaacgaaatgaaagagatcgccgccgtgataaaacaagtgctgtcaaacacgaagcctgagatagtcacagacggtgaaaacgccggaaaaccgagcaaagcaaagtaccataccgaccccaaagcggcaaaagaggccaaagcgcgggtcaaggcgcttttagatagattcccggtctacccgcagttagatttggaggctctgcggaaggggttctga

SEQ ID NO: 51936 - protein, 503 aa, Unknown
  Obtained from environmental sample
  DOMAIN (32)...(441): Serine hydroxymethyltransferase
  misc_feature (1)..(503): Xaa is any amino acid
MKTNPVADYLAAVTPEKIEPSMLAYICNLTEVAKVTPEIASSIVLELENQRKRVKLIASENYCSMAVQLAMGNLLTDKYAEGMPDHRFYAGNENVDAIESLAAQEACKLFGAQYANVQAHCGADANLLAYWAILSTRIETPALEKLGETNLYKLTDSQWNELRASLGNQRLLGLDYYSGGHLTHGYRNNLSGRMFDIHGYSVSAENGMLDYDEIEKQALEVRPLILLAGYSAYPRKINFKRMREIADKAGAVFMVDMAHFAGLVAGKVLTGEFDPVAHAHVVTTTTHKTLRGPRGGIVLCTEEFADSVDKGCPLVMGGPLAHVMAAKAVALTEANAPSFKKYAAAIVKNAAAMSKHCVAEGMTVATGGTENHLFLIDVTPFGLTGRQAESALRECGITLNRNSLPYDKNGPWYTSGLRIGTPATTTLGMDVNEMKEIAAVIKQVLSNTKPEIVTDGENAGKPSKAKYHTDPKAAKEAKARVKALLDRFPVYPQLDLEALRKGF

SEQ ID NO: 51937 - DNA, 750 bp, Unknown
  Obtained from environmental sample
  misc_feature (1)..(750): n is a, c, g, or t
ttgacccgcgctttggcctcttttgccgctttggggtcggtatggtactttgctttgctcggttttccggcgttttcaccgtctgtgactatctcaggcttcgtgtttgacagcacttgttttatcacggcggcgatctctttcatttcgttgacgtccattccgagcgtcgtagtcgccggggtgcctattctcaggccgcttgtgtaccaagggccgtttttgtcgtatggcagggagttgcggttcagggttatgccgcattcgcgcagtgcgctctcggcttggcggcctgtcaggccgaagggggtgacgtctataaggaataggtggttctcggttccgccggtggcgaccgtcattccctcggctacgcaatgtttgctcatggcggcggcgttttttacaatggcggcggcgtactttttaaacgacggggcgtttgcctccgtgagcgccacggctttcgcggccattacatgtgctagggggccgcccatgactaacgggcagcctttgtccacgctgtcggcgaactcctcggtgcagagcactatgccgccgcgcggtccgcgcagcgtcttgtgggtcgtggtggtgacgacgtgggcgtgcgccacggggtcgaattcgccggtgaggactttgccggccactaatccggcgaagtgcgccatgtccaccatgaacaccgccccggctttgtcggcgatctcccgcatgcgcttaaaatttattttacgcggataa

SEQ ID NO: 51938 - protein, 249 aa, Unknown
  Obtained from environmental sample
  SIGNAL (1)...(26)
  misc_feature (1)..(249): Xaa is any amino acid
MTRALASFAALGSVWYFALLGFPAFSPSVTISGFVFDSTCFITAAISFISLTSIPSVVVAGVPILRPLVYQGPFLSYGRELRFRVMPHSRSALSAWRPVRPKGVTSIRNRWFSVPPVATVIPSATQCLLMAAAFFTMAAAYFLNDGAFASVSATAFAAITCARGPPMTNGQPLSTLSANSSVQSTMPPRGPRSVLWVVVVTTWACATGSNSPVRTLPATNPAKCAMSTMNTAPALSAISRMRLKFILRG

SEQ ID NO: 51939 - DNA, 1392 bp, Unknown
  Obtained from environmental sample
  misc_feature (1)..(1392): n is a, c, g, or t
atgaaaaacttttcttacggcgatgatacccccattgcggcgtttgccaccgttccaggcaagagcgcccttacattgatccgctgttccggcaaagactcgcttgagcttgtggcaaaaattttctcctcaccgcaaaaattaatgcgtgctgtgggaaatacagtaatccatggatggatagttacgcataacaaacagtctgacaaacagcttgagcgcgtagacgacgtgctgatctctgtgttccgcgcaccaaaaagctacaccggagaggacagtctggacatttcctgccacggaggaaacgccgccggacaggctgtaatggaggctttgcgcgccgccggtttccgctgcgccctgcccggtgaatttaccttccgcgcctttatgaacggcaagctcgaccttacccgcgccgaatcggtaatggaactggtttccgccaaaacggacagaggccgcggtaatgcgattaaccggctttccggcgtactggagaaagagattggcgcgattaaaaaaacgcttgtggaagttttgtccggcgcggaaatttttcttgactattccgatgatgaaataagcgcgggcgccgaagagatcgccggcaggcttcccgaagaaacgcttgctcgggaggcgctttcccgcctgcaaaaactcgcgcaatcctggcagttggaacgtatctatcaggaagggattcttgcggtaatcgcgggacggcccaattcgggcaagtccagccttttcaatctgttgctgaaagaagaacgttccattgtgacggaggttcccggcacgacccgcgactggattgaggcgtgggtttccattgaaggcataccggtgcgccttgccgacacggccggccttagggattcttcagacccggttgaaaaaatcggagtggaacgcagccgcgatttactggaagccgccgatcttgtcctgtacctcatcgacggcgaagaagggatcacagatgaggatgccgcgttaattgacaagttggaaatacctcatcttgtcatctggaacaagaccgacatcgctcccgcgccaaaggagcttcctgccgtaagcgctaaaaccggcgaaagccttgcggaactgtcagcggcaatagcggctataattacaacttacgttgaaaacactgacgcggcatccgcgtcgcttggcactgaacgtcaaaaaaaccttgtggaggcggcaatagccgcgctggaagaagcgctgcgtctgactaaagggggggaaccgcttgaccttgtttcccccatgctgagggaagcggtaaattcgctgggcgaaatcactggagaggtttctactgcggatatactggaagagatgttcagcaaattctgcgtgggaaagtaa

SEQ ID NO: 51940 - protein, 463 aa, Unknown
  Obtained from environmental sample
  DOMAIN (237)...(352): GTPase of unknown function
  misc_feature (1)..(463): Xaa is any amino acid
MKNFSYGDDTPIAAFATVPGKSALTLIRCSGKDSLELVAKIFSSPQKLMRAVGNTVIHGWIVTHNKQSDKQLERVDDVLISVFRAPKSYTGEDSLDISCHGGNAAGQAVMEALRAAGFRCALPGEFTFRAFMNGKLDLTRAESVMELVSAKTDRGRGNAINRLSGVLEKEIGAIKKTLVEVLSGAEIFLDYSDDEISAGAEEIAGRLPEETLAREALSRLQKLAQSWQLERIYQEGILAVIAGRPNSGKSSLFNLLLKEERSIVTEVPGTTRDWIEAWVSIEGIPVRLADTAGLRDSSDPVEKIGVERSRDLLEAADLVLYLIDGEEGITDEDAALIDKLEIPHLVIWNKTDIAPAPKELPAVSAKTGESLAELSAAIAAIITTYVENTDAASASLGTERQKNLVEAAIAALEEALRLTKGGEPLDLVSPMLREAVNSLGEITGEVSTADILEEMFSKFCVGK

SEQ ID NO: 51941 - DNA, 1737 bp, Unknown
  Obtained from environmental sample
  misc_feature (1)..(1737): n is a, c, g, or t
ttgcttgatcccaccgacttaaaagagccccaatgttccgcctgcggcagcagcccgactctggaaaagacaaaccacctttatatagaccttcccgctataaaagataaacttgaggcttggataaaaaccgcttcgcaaaaaggtttttgggcgaataacgcggtgcagatgactcacgcgtggatacgagacggcctgaaagaacgggcaataacgagagatttaaaatggggaattcccgtgccgaaacccggttatgaaaaaaaggttttttatgtttggttcgacgcgcctataggctatatttccattacgggaaatctgggcgaagaaaagtccaaaaccggctggcgcgactttgtaaattactggtggaaaagcccggacgatgttgagttgtttcagtttatcggcaaggataatatacctttccatactgttattttcccctccagccttttgggaagcggcgataaatggacaatgttacaccacatgtcaagttctgagtacttaaattatgagaacgggaaattttccaagtctaggggagttggcgtattcgggacggacgcaaaggaaaccggaatcccggcagatgtgtggcggttctatattttctacaaccggcccgaaaaatcggacgctatgtttacatgggatgactttcaggaaaaagtaaacggcgagcttatcggcaatcttggaaaccttgtaaaccgcacccttacttttgttacgcgctattatgacggtagactgccgtccgcaaagagcaacggcgccttttgggacgaagtaaaaaaacgcgaggcgtcaataaccgaaaaacttgacagagccgaactgcgggacgcttttagggaaatatttgaactttcatcgtttgcgaataaatattttcaggattcggaaccttggcgtctgcgaaatgacgatcctgaaaaagcaaaagaggtaatccgcgatctttcctatattgtgcgcgatctttctgttttaatagaaccttatatgccgcaggcggcgttaaggatcgcttcgttctttggtattagcgtaagtgaaggtcttggctggatagatcttggcaaagtaggcggcattggcgatgtgcagataacaagcgaagtgcttttcgcaaagctggaagatgatcaggtagcggctttacgcgaaaaatattcgggaagccagcaggaaagaacgcaggcaaaaccgtcgttttcttccgttgtggatttgcgtgtggcaaaaatagtaaaaattgagcggcatccgaaagccgacaaactttacattgaacaaattgaagtaggggcgggggaagagcggacaattgtttccggtcttgttcctttctacaccgaagatcagcttcttggtaagaaaatcgtcgtcgcctacaatcttaaacccgcaaaacttcgcggaattgagtctaagggaatgcttcttgcggctggcgataaaaacggaaccggcccggaaggggaagctgttgaacgtgtagaggtattggatgcgggcgattatcctgtgggaacaaggctgttgccggaaggcgaagaagccacagcggtacctgcggaaatcgacatagacacgtttttttcttatccgattgtagttaaggataacgatgttttatgcgaagggaaaaaattgtgccttaacggaaacgcgcgttcgcacaaatattattccgaatggagaagtccattagtttattaa

SEQ ID NO: 51942 - protein, 578 aa, Unknown
  Obtained from environmental sample
  DOMAIN (416)...(518): Putative tRNA binding domain
  misc_feature (1)..(578): Xaa is any amino acid
MLDPTDLKEPQCSACGSSPTLEKTNHLYIDLPAIKDKLEAWIKTASQKGFWANNAVQMTHAWIRDGLKERAITRDLKWGIPVPKPGYEKKVFYVWFDAPIGYISITGNLGEEKSKTGWRDFVNYWWKSPDDVELFQFIGKDNIPFHTVIFPSSLLGSGDKWTMLHHMSSSEYLNYENGKFSKSRGVGVFGTDAKETGIPADVWRFYIFYNRPEKSDAMFTWDDFQEKVNGELIGNLGNLVNRTLTFVTRYYDGRLPSAKSNGAFWDEVKKREASITEKLDRAELRDAFREIFELSSFANKYFQDSEPWRLRNDDPEKAKEVIRDLSYIVRDLSVLIEPYMPQAALRIASFFGISVSEGLGWIDLGKVGGIGDVQITSEVLFAKLEDDQVAALREKYSGSQQERTQAKPSFSSVVDLRVAKIVKIERHPKADKLYIEQIEVGAGEERTIVSGLVPFYTEDQLLGKKIVVAYNLKPAKLRGIESKGMLLAAGDKNGTGPEGEAVERVEVLDAGDYPVGTRLLPEGEEATAVPAEIDIDTFFSYPIVVKDNDVLCEGKKLCLNGNARSHKYYSEWRSPLVY

SEQ ID NO: 51943 - DNA, 768 bp, Unknown
  Obtained from environmental sample
  misc_feature (1)..(768): n is a, c, g, or t
atggcttttatcaataatattactaaagctgatcttaaagtttgcgaatcagcgccttcttttttacaatccgccatgtggggagaatttaaatcccgctttggctggtctagcagtgcgttcttaattgaatggtcaggttacgcaataagtcccctgttgcttcttttccgccgtcttgcccccggcttttcatttgcttatgttccgtggggacccaacctgcccgataattttcccgcctcggacagaacggcggctctctctgagcttgcgttaaaactaaaacctttactttcgcgtaacaccgcatttatccgttttgatccgccgtgggctgtcaatgacggcgaaaatgcgccgccgtttcctgcgaatttcaagcgcgccgctgcggatatacagccgcctgataccgtaattatcgatctgtccgcctcggaaaatgaaatacttgcggcgatgaaatcaaaatggcggtataacatttcgcttgccggaaagaaaggcgtacaaatcaatacaggcggcgcgcaggagatagaaaaattttacagcttgttaaaagagacggcgcanagggacggtatcgcaatccacagcatcgactactataaaactctttttgacatttgcggcgcgtacccggggaacgatttatctttgcgcctgtataccgcaagtcatgagggcgacaccctcgctgcgnatgtggntcttttccgaagagaaattgcgacttatctttatggtgcgtcttccatataa

SEQ ID NO: 51944 - protein, 255 aa, Unknown
  Obtained from environmental sample
  misc_feature (1)..(255): Xaa is any amino acid
MAFINNITKADLKVCESAPSFLQSAMWGEFKSRFGWSSSAFLIEWSGYAISPLLLLFRRLAPGFSFAYVPWGPNLPDNFPASDRTAALSELALKLKPLLSRNTAFIRFDPPWAVNDGENAPPFPANFKRAAADIQPPDTVIIDLSASENEILAAMKSKWRYNISLAGKKGVQINTGGAQEIEKFYSLLKETAXRDGIAIHSIDYYKTLFDICGAYPGNDLSLRLYTASHEGDTLAAXVXLFRREIATYLYGASSI

SEQ ID NO: 51945 - DNA, 1311 bp, Unknown
  Obtained from environmental sample
  misc_feature (1)..(1311): n is a, c, g, or t
atgtcagaaaggacaatcatgcacaaaagaaccatccttccaacgttgataggcacggcgctattgcttgcagggcagtcggcggcggcgggcgttgccccaaagtggctgcgctacccttccatttcgcccgatggcaagaccatcgttttttgctaccagggggacatctacagcgtctctagcggcggggggacggcagtgccattgacgctgggtcaagcgtacaacacgcgcccaagatggtctcccgatggaaaaacgctggccttcgcgtcagaccgctacggcaaccttgatatattcgtgatgccagccaatgggggcgaggccaagcgcctcaccttccactcggccaacgatgtgccttcggccttcaccccagacgggaaacaggtgctattcacgtccaaccgcataaccacttcaagcgacttgcagttcccatccaatttcgcccagacgtacaccgtgccggttacgggtggccaagccaacttggtacacactgccaccatggaatatggggtatatgacggcaagggaagcagcatattgttccacaacataaagggctacgaggacacttggcgcaagcaccacacttcttcggtcactagggacatctgcctgttcgacgtggccgctgggacattcaagatgctcaacgacgatggcggcgagtaccgcaatcccatctttggcaacagcggcgactactactttttggccgagcgcggcggctcttttaacgtgtttcgcggcgccttggcgcagccccaaaacgtcacccaactgacgcgctttgacaagcacccagttcgcttccttagccgcgcaaatgacggcaccctatgctttgcctttgacggcgatttgtacactttgaaagatggcgcggcccccgccaaggtcaatgttcaaatccagattgacaacaggcccgacgtcgagcgcgtcacgcccgtcaatggcggcctgacagaatttgcggtggccaaaagcggcaaggaagtggcctttgtcgtgcgcggagagctatttgccagcaactcggatggcacagtgacaaagcgactgaccgacacacccgtgcaggagagaagcgcatggttcagcccagatggccgaaccttgctgtacgccgccgagcgcaacggcaagtgggggctgtacaccttggcgctgacgcgaaaagaagaaaattatttctatgcctcaacggtgctaaaggagacctgcgtactgtcaggcgaaaaggacgtattccagcccatttttttgcagacgggcaaggaggtgcctacctag

SEQ ID NO: 51946 - protein, 436 aa, Unknown
  Obtained from environmental sample
  SIGNAL (1)...(28)
  DOMAIN (358)...(393): WD40-like Beta Propeller Repeat
  misc_feature (1)..(436): Xaa is any amino acid
MSERTIMHKRTILPTLIGTALLLAGQSAAAGVAPKWLRYPSISPDGKTIVFCYQGDIYSVSSGGGTAVPLTLGQAYNTRPRWSPDGKTLAFASDRYGNLDIFVMPANGGEAKRLTFHSANDVPSAFTPDGKQVLFTSNRITTSSDLQFPSNFAQTYTVPVTGGQANLVHTATMEYGVYDGKGSSILFHNIKGYEDTWRKHHTSSVTRDICLFDVAAGTFKMLNDDGGEYRNPIFGNSGDYYFLAERGGSFNVFRGALAQPQNVTQLTRFDKHPVRFLSRANDGTLCFAFDGDLYTLKDGAAPAKVNVQIQIDNRPDVERVTPVNGGLTEFAVAKSGKEVAFVVRGELFASNSDGTVTKRLTDTPVQERSAWFSPDGRTLLYAAERNGKWGLYTLALTRKEENYFYASTVLKETCVLSGEKDVFQPIFLQTGKEVPT

SEQ ID NO: 51947 - DNA, 1344 bp, Unknown
  Obtained from environmental sample
  misc_feature (1)..(1344): n is a, c, g, or t
atgaataaatatttttttgtttttcttttttttatcagtttttttgtgtacgcgcaggagattgaggcttcacggctggcaattattaagtacgggacggagacggaaattgccaatcttattcagtccctcaggaatgaaaacgcggattaccttgatgatgaacttattaaattaatagataacaccaaaaatcaaaaaatattaagcggtgttttcgcgtttttcggcgaaagggaaaaaagcggccttgaagaaagggcgattaaggcgttggatgagcgcgaggacgaggcgaatgaaacagtcctttccgccattgattaccttggcatgttaaaagtatcaaaagcggttccctcgcttatggaactccttgatactgaagaaaagcgttttatgaacaacgctttccgcgccctcggcagggcaagcagctcagacaaagaaaaagcagacgctgccgccgatttcttgattgatttttacaatgaccgcaacgtaggcgaaaacgcgagagaaataataatcgcaatcggagaaacaaagtccccaaaagcggtttcccttcttgcgaatatagcgtccaaccctgacgaacgtaccccattgcgcattgccgcgttagacgccctttccagagtaggcgatcccgcggggcttgacgcggttctttcctgtatcagcaccaacgaccccaatgtgcgttcagccgcggtcgccgccttaggcccgttttcaggcgagaaagtggacaaggccattttggacgctttccgggattcatattaccgcacccgcatagcggcggcgcaggcgagccgcgagcgtaaacttgtttccgccgtcccttaccttcaattccgcgccgaacgcgacgacgttccgaatgtcaaggacgaagccgtcaaagcgttaggtgaaatcgccaacgatgaggcaatggcggttctggacaatttgtttaaggaaagaaaaaactcggaccgcatccgccttatttgcgcgcaaatgctgatgaaaaacgccggccagaaaaatttaacccgcgtaatcatagaacttgacgaggcgaagcaaaaaaaccagaccgccctttacaacggtttcttaaaaataatcggagaggctaagattgacggtgacacaagcgagatggaaaagcttacgcgccgtttcctgcaaaacggcggtataattgaaaaattatacgggcttgatatggccgcaaacaatgagttaaaaggcctttccacggagataaaagctttaacaacggataaaaatgaaagccttgccagaaaagcgcggcggactgccgaacggcttggcatagaaatttaa

SEQ ID NO: 51948 - protein, 447 aa, Unknown
  Obtained from environmental sample
  SIGNAL (1)...(18)
  misc_feature (1)..(447): Xaa is any amino acid
MNKYFFVFLFFISFFVYAQEIEASRLAIIKYGTETEIANLIQSLRNENADYLDDELIKLIDNTKNQKILSGVFAFFGEREKSGLEERAIKALDEREDEANETVLSAIDYLGMLKVSKAVPSLMELLDTEEKRFMNNAFRALGRASSSDKEKADAAADFLIDFYNDRNVGENAREIIIAIGETKSPKAVSLLANIASNPDERTPLRIAALDALSRVGDPAGLDAVLSCISTNDPNVRSAAVAALGPFSGEKVDKAILDAFRDSYYRTRIAAAQASRERKLVSAVPYLQFRAERDDVPNVKDEAVKALGEIANDEAMAVLDNLFKERKNSDRIRLICAQMLMKNAGQKNLTRVIIELDEAKQKNQTALYNGFLKIIGEAKIDGDTSEMEKLTRRFLQNGGIIEKLYGLDMAANNELKGLSTEIKALTTDKNESLARKARRTAERLGIEI

SEQ ID NO: 51949 - DNA, 1197 bp, Unknown
  Obtained from environmental sample
  misc_feature (1)..(1197): n is a, c, g, or t
ttggtttcccgttttaatttttatagtaataggattgcttcttttacggagcgcgaaaacctgatgcgttttagcgtaacctcccgcgatagctcttgcgccgccagaacgggaattttgcatcttccccacggcgatgtaatcactcctgtttttatgcctgtggggactaacggaaccgtaaaagcgttaacgtcggatgatttaatagaaataggctatgatttgattctttcaaatacatatcatttatatttaaggccgggagaggaagtgcttgaaaaggcgggagggcttcatcaatttattaattgggacagaaatatattaacggattcaggcggcttccagattttttccctttccgccctgcgaaaaattaaaccggaaggcgcgtggtttcaatcccacattgacggttcaaaacattttatcagcccggagaaagccgtaacaattcaggctattcttggcagcgatatacagatgcagttggattactgctctcattatggcgctagtaggaaagaggccgagaaagctctcgcgattacttccgaatggcttggcagggcgaaaagcagatgggaagaagttaccgcggacggaaaatataaaggtagtttattcagtatagtgcagggaaatttttttaacgatctgcggaaaaaaagcgcggaagtttgcgttgattctcttactcccggcattgccatangcggtctgtcggtaggggagccttcggatttattttacgaaacattagcctataccgccgctcttttgccgggagaaaaaactcggtatgttatgggaatagggacgccccagtacattttaaccgctattgagcatggaattgacatgtttgactgcgttcttcttacaagggaagcccgaaacggcagggtttacacgcgaaaagggccttttgcgcttaaaaaacgcgaaaacacccttgatttttcgccgatagataaggagtgcggctgtaaagtttgcagggagtattcccgcgcctatttacgccacctttttaagacaaaggagattctttgttccatgttggcaagttaccataatttgtattttatcaatgatcttgttataaattgccgtaacgctatcaaggaaggaaggtttttacaatataagaaggaattcttgtccgcctacacggaggaaggaaatgaataa

SEQ ID NO: 51950 - protein, 398 aa, Unknown
  Obtained from environmental sample
  DOMAIN (148)...(390): Queuine tRNA-ribosyltransferase
  misc_feature (1)..(398): Xaa is any amino acid
MVSRFNFYSNRIASFTERENLMRFSVTSRDSSCAARTGILHLPHGDVITPVFMPVGTNGTVKALTSDDLIEIGYDLILSNTYHLYLRPGEEVLEKAGGLHQFINWDRNILTDSGGFQIFSLSALRKIKPEGAWFQSHIDGSKHFISPEKAVTIQAILGSDIQMQLDYCSHYGASRKEAEKALAITSEWLGRAKSRWEEVTADGKYKGSLFSIVQGNFFNDLRKKSAEVCVDSLTPGIAIXGLSVGEPSDLFYETLAYTAALLPGEKTRYVMGIGTPQYILTAIEHGIDMFDCVLLTREARNGRVYTRKGPFALKKRENTLDFSPIDKECGCKVCREYSRAYLRHLFKTKEILCSMLASYHNLYFINDLVINCRNAIKEGRFLQYKKEFLSAYTEEGNE

SEQ ID NO: 51951 - DNA, 375 bp, Unknown
  Obtained from environmental sample
  misc_feature (1)..(375): n is a, c, g, or t
ttgagcccggggttttcacatcagacttacaaggccgcctacgcgccctttacgcccaataattccgaacaacgctcgccccttacgtgttaccgcggctgctggcacgtaattagccggggcttattcgcgggccggcgtcaccgacagggcattccctccctgccttcttcttcgcccgcaaaaggattttacaacctttcggccttcgtcatccacgcggcgtcgctccgtcagactttcgtccattgcggaatattcttagctgctgcctcccgtaggagtctgggccgtatctcagtcccagtgtggccgttagccctctcaggccggctacccatcttcaccttggcgggccgttacccctccaactag

SEQ ID NO: 51952 - protein, 124 aa, Unknown
  Obtained from environmental sample
  misc_feature (1)..(124): Xaa is any amino acid
MSPGFSHQTYKAAYAPFTPNNSEQRSPLTCYRGCWHVISRGLFAGRRHRQGIPSLPSSSPAKGFYNLSAFVIHAASLRQTFVHCGIFLAAASRRSLGRISVPVWPLALSGRLPIFTLAGRYPSN

SEQ ID NO: 51953 - DNA, 450 bp, Unknown
  Obtained from environmental sample
  misc_feature (1)..(450): n is a, c, g, or t
gtgtgccgcctggggagtatgcccgcaagggtgaaactcaaaggaattgacgggggcccgcacaagcggtggagcatgtggtttaattcgatggtacgcgaggaaccttacctgggtttgacatggaggtggatgcgccagagatggcgcagcgtagcaatacgcgcctctgcaggtgctgcatggctgtcgtcagctcgtgccgtgaggtgttgggttaagtcccgcaacgagcgcaacccctaccgccagttaccagcagttaggctggggactctggcgggactgccggcgacaagccggaggaaggcggggatgacgtcaagtcatcatggcccttatgtccagggctacacacgtgctacaatggccggcacaaagcgatgccagccccgagagggcgcagcggaaccgcgaaaagccggccgtagctccggattgaaagtctga

SEQ ID NO: 51954 - protein, 149 aa, Unknown
  Obtained from environmental sample
  misc_feature (1)..(149): Xaa is any amino acid
MCRLGSMPARVKLKGIDGGPHKRWSMWFNSMVREEPYLGLTWRWMRQRWRSVAIRASAGAAWLSSARAVRCWVKSRNERNPYRQLPAVRLGTLAGLPATSRRKAGMTSSHHGPYVQGYTRATMAGTKRCQPREGAAEPRKAGRSSGLKV

SEQ ID NO: 51955 - DNA, 894 bp, Unknown
  Obtained from environmental sample
  misc_feature (1)..(894): n is a, c, g, or t
atgattgaaactcaggatttttccaagtttattcgtcagccgctatttatgtcgtcggaaggggaaaatgtccgctgtgaactatgcccgaataactgcgtaataaaaagcggtcatttcggctcgtgcaaagtcaggggaaacaagggcggaaagggaattattccattttacggatttatttccgctcttgcgattgatccaatagaaaaaaaacctctgtatcattttaagcctcgcacaaaaatactctcgctcggttttgcgggctgcaatttccactgccctttctgccagaactggcacatttcccagaacacagacataagcggcaaatggatgcagcccggtgaaataatttccgccgcgctaaaacaggatactccgtccattgcttacacatactcggagcctcttgttcacattgagtatattcttgattgcatgacgcttgcccgcaagcacggaatagccaatgtgctggtaacgaacggctgtatcaaatcggaagccgccgccgaagttttaaaatttaccgacgccgccaacgtggacttaaaaactttttcacaagaaacatacaaaaaaacactgaacggcgatttgcagactgtgctggattttatcgcgctttgtcacaagacgggcgttcatgttgaagttaccactcttgtcgtgcccgacttaaatgattcaagtgacgaactaagcaaagcggcggattttatcgcttccgtaagcaaagaaatcccctggcacttgacagcctatcaccccgattaccgctggaacgctccgcctacagacccgtcttttcttttaaacgccgccaaagaagcgggaaaaaagctgacgtttgtgcatacggggaatatcggctttatgcctttgtag

SEQ ID NO: 51956 - protein, 297 aa, Unknown
  Obtained from environmental sample
  DOMAIN (85)...(240): Radical SAM superfamily
  misc_feature (1)..(297): Xaa is any amino acid
MIETQDFSKFIRQPLFMSSEGENVRCELCPNNCVIKSGHFGSCKVRGNKGGKGIIPFYGFISALAIDPIEKKPLYHFKPRTKILSLGFAGCNFHCPFCQNWHISQNTDISGKWMQPGEIISAALKQDTPSIAYTYSEPLVHIEYILDCMTLARKHGIANVLVTNGCIKSEAAAEVLKFTDAANVDLKTFSQETYKKTLNGDLQTVLDFIALCHKTGVHVEVTTLVVPDLNDSSDELSKAADFIASVSKEIPWHLTAYHPDYRWNAPPTDPSFLLNAAKEAGKKLTFVHTGNIGFMPL

SEQ ID NO: 51957 - DNA, 411 bp, Unknown
  Obtained from environmental sample
  misc_feature (1)..(411): n is a, c, g, or t
ttggatgtaaccatacaaaaacagattgtggaactcttaaaaacattgcgccgcacccgggggatatcgatcatcttcataagccatgacatagaccttgtcgctgaaatttcggacaggataatggtcatgtacgggggaatggagatggaaaccgctctgtcagaagtgattatcaacaatcccaggcacccttacacaaaagccctgctcgcctcctcgccccgtttcggcagccattactcgctgggccggctttccgccattcccggcaaggtaagcgatccgggaaccgaaattacaggctgtcctttcgccccccgctgctcccaggccgtggaaaaatgccatgaaacaacgccgccgcttgccatggttgagggccatgaggtgggatgctggaacacttga

SEQ ID NO: 51958 - protein, 136 aa, Unknown
  Obtained from environmental sample
  DOMAIN (50)...(116): Oligopeptide/dipeptide transporter, C-terminal region
  misc_feature (1)..(136): Xaa is any amino acid
MDVTIQKQIVELLKTLRRTRGISIIFISHDIDLVAEISDRIMVMYGGMEMETALSEVIINNPRHPYTKALLASSPRFGSHYSLGRLSAIPGKVSDPGTEITGCPFAPRCSQAVEKCHETTPPLAMVEGHEVGCWNT

SEQ ID NO: 51959 - DNA, 585 bp, Unknown
  Obtained from environmental sample
  misc_feature (1)..(585): n is a, c, g, or t
ttggggaatataattatgcagctgctaaaagacagaattttatccgagggcaaggtgatgcccggcgatatcctcaacgtgtccagctttcttaaccagcaggtcgacattaatctgtacaatgaaatcggcagggaatttttccgcctttttttaagcagtccgattaataagattctgactattgaagcgtcaggcataggaattgcctgcatcacggcgcagtatttcaaggtgccggtggtttttgccagaaagttcaggncaaaaaacgtggagaacgatctttttctcgcttccgtcacttcctatacccacggaatagattacacaatctccgtacccaaacaatttctgaaagaaagcgatactgttctgcttattgatgattttcttgccaacggctgcgccctggaagggctgataaaaattgttcaaatatccggagcaaaactcgcgggggccggggcagtcattgaaaaagggtttcagggcggcggcaagcgcataagggaacaaaacatacgcgtagaatcccttgccatcattgaaagcatggacgagaacggaatcaaattcagataa

SEQ ID NO: 51960 - protein, 194 aa, Unknown
  Obtained from environmental sample
  DOMAIN (36)...(178): Phosphoribosyl transferase domain
  misc_feature (1)..(194): Xaa is any amino acid
MGNIIMQLLKDRILSEGKVMPGDILNVSSFLNQQVDINLYNEIGREFFRLFLSSPINKILTIEASGIGIACITAQYFKVPVVFARKFRXKNVENDLFLASVTSYTHGIDYTISVPKQFLKESDTVLLIDDFLANGCALEGLIKIVQISGAKLAGAGAVIEKGFQGGGKRIREQNIRVESLAIIESMDENGIKFR

SEQ ID NO: 51961 - DNA, 1035 bp, Unknown
  Obtained from environmental sample
  misc_feature (1)..(1035): n is a, c, g, or t
atgagagcgttatttatcggcggaacgggcactatcagcgcggcgatttcacggcaggttctggaactgggatgggaattgtttctattaaacaggggaaacaggaataatgaaattgacgcaaagggaaaacccgggaaactggttgaaataaactgcgacatacggactgacagcgtagaaacgattcaccgcaagctcaagtccgcgtcgggaggccagcttttcgatgttgtcgcggattttatcgcgttcacgcccgagcatgttgagaaagatttttctgtttttgaatatctttgcaggcagtacatctttataagctccgcctcggcgtaccaaaaacctttgtcttcgtatctgattaccgaaagcacccccttggccaatccctattgggaatattcccgtaacaaaatcgcctgcgagaattatctaaggaacgtttaccgcaataagggttttcccataaccattgtccgtcccagccatacttatgatgaaagatcggttccgctgggggttcacggggataaaggcagctggcaggttgtcaaaaggatgctcgaaggcaagcccgtgatcattcacggggacggcacaagcctctggacgatgacacataacagagattttgcctgtgggttcatcggtttaatgggaaacatacacgcgacaggcgaggcggtacagataacttcggacgaaaccctggactggaaccagatttacagggcgattgcggacgccctgaatatagaattgaacgccgtgcatatttccagcgaatacctggcaaataacagcccctacgattttaccggaagcctgatcggagacaaggcaaactccgtagtctttgacaataccaaactaaaaaggcttgttcccggcttttgcgccaaagtacgttttgatcagggaatacggatgacaatcgcccatgtgctctcgcataaggaatgtcaaattgacgatccggaatttgacgcgtggtgcgatatacaggtagcaggtagcagagagcagagttaa

SEQ ID NO: 51962 - protein, 344 aa, Unknown
  Obtained from environmental sample
  DOMAIN (3)...(233): NAD dependent epimerase/dehydratase family
  misc_feature (1)..(344): Xaa is any amino acid
MRALFIGGTGTISAAISRQVLELGWELFLLNRGNRNNEIDAKGKPGKLVEINCDIRTDSVETIHRKLKSASGGQLFDVVADFIAFTPEHVEKDFSVFEYLCRQYIFISSASAYQKPLSSYLITESTPLANPYWEYSRNKIACENYLRNVYRNKGFPITIVRPSHTYDERSVPLGVHGDKGSWQVVKRMLEGKPVIIHGDGTSLWTMTHNRDFACGFIGLMGNIHATGEAVQITSDETLDWNQIYRAIADALNIELNAVHISSEYLANNSPYDFTGSLIGDKANSVVFDNTKLKRLVPGFCAKVRFDQGIRMTIAHVLSHKECQIDDPEFDAWCDIQVAGSREQS

SEQ ID NO: 51963 - DNA, 603 bp, Unknown
  Obtained from environmental sample
  misc_feature (1)..(603): n is a, c, g, or t
gtgatgggtacgaccgttttatttaagcctactgcggtacagagaaaagcccttgcgttgttaaagggcggggctaaacacattttgcttttcggcgggagccgaagcggtaaaactacggtgctggttatggcgattatctacagggcgttaaagtttgccgggtccagacatttgatttgccgttaccgcgctaaagatgctcgttcatcggttatgcgggaaaccttgttaccgtggttggataaaactgtaggaaaaatcggctacacctaccttgcccatgaaagcatggttaccctttttaattcttcggagatttggattggcggcctgggggatagggagcaagcggacaaaatactcggacacgaatacaacacaatttattttaacgagattagccagctttcctatgccgccgtaaccacggcatattcacggctggcaatgagaataaaagattgccggaacctgttttactacgactgcaatccgggcagccctctgcattgggcttacaagattttcgttttgaaacaggacatttcttactggcgatccattggagaaacgcggagctatatcaagcaatgctcctaa

SEQ ID NO: 51964 - protein, 200 aa, Unknown
  Obtained from environmental sample
  misc_feature (1)..(200): Xaa is any amino acid
MMGTTVLFKPTAVQRKALALLKGGAKHILLFGGSRSGKTTVLVMAIIYRALKFAGSRHLICRYRAKDARSSVMRETLLPWLDKTVGKIGYTYLAHESMVTLFNSSEIWIGGLGDREQADKILGHEYNTIYFNEISQLSYAAVTTAYSRLAMRIKDCRNLFYYDCNPGSPLHWAYKIFVLKQDISYWRSIGETRSYIKQCS

SEQ ID NO: 51965 - DNA, 627 bp, Unknown
  Obtained from environmental sample
  misc_feature (1)..(627): n is a, c, g, or t
atggaaagcgatttttccctgcttccaaaggaaaatgcaaaaaaattaaaggatgaacaggaaacgcggataaatgagacccgacttatttttccttttgccgactttcatgaaaaccgtacccttatggaaggagccgcgtcccaatatctgacattacgctgttatgattattacaacaaacaaacctctcccacaattaaacaggggcttgcctcaatacgctgcgcatggttgttagacgaaatgaataaaaaattcccggaacagcactacgactggcttgcctctcttttcagaaaaaaagccgagtatctttacaacgaggcgcttgcccgtgaacaaaacggaaaagaaactctttccggcatgaaagcctttggccccgataccgataaaaattacgcgtacgagggaatgttatacatgtgcgcctatcttcgctataacttcggtcccgcccatgacgacgcggagcgaaaagagtcgcttgaagacgcgcgcaggactatagccaaacttttcggcttggggaaggcatcaaaagataaacctggcgcgttccttgaacacgcaagaaaactctatgacaccatcaatcaaaagctttcggaaaatgaatcctga

SEQ ID NO: 51966 - protein, 208 aa, Unknown
  Obtained from environmental sample
  misc_feature (1)..(208): Xaa is any amino acid
MESDFSLLPKENAKKLKDEQETRINETRLIFPFADFHENRTLMEGAASQYLTLRCYDYYNKQTSPTIKQGLASIRCAWLLDEMNKKFPEQHYDWLASLFRKKAEYLYNEALAREQNGKETLSGMKAFGPDTDKNYAYEGMLYMCAYLRYNFGPAHDDAERKESLEDARRTIAKLFGLGKASKDKPGAFLEHARKLYDTINQKLSENES

SEQ ID NO: 51967 - DNA, 855 bp, Unknown
  Obtained from environmental sample
  misc_feature (1)..(855): n is a, c, g, or t
ttgaacacgcaagaaaactctatgacaccatcaatcaaaagctttcggaaaatgaatcctgacggcagaaatatctatcttctgattgcctatgacggtacggatttttcaggctggcagaggcagagcgaatcgacaagcgattcgcagggtaatataccgaataaagtaagaaccgtacagggcgagatagaaaaagctcttgaaaaaatacacggacatgccgtaccccttacgggttcaggcaggacggatgcgggcgttcacgcggccgggcaagccgcaaatttttacacaaacataaacagcatccccgcccaaaaatttgttcccgcgcttaatacaattcttccgaaggatgtccgtattcttgaagcccgcgaaacagacccggaatttcacgcccgcttcagcgcggtatcgcgtacttaccgctatcactttatctgccgcccttcccttccccacgaaaaccgctacaatcttcagctttggcgcttccctcggatagaaatccttaatgcctacggcagactgcttcttggagaaactgactgctccatctttgccggcgcgggggacagcgcgcttgaagcgggaaagtcaacaaacaggtatatttactccgcctgctttttcccggaagcggaccgtcttgtttttgaaatacgcgccaacgcttttatgcggaaaatggtgcgctcaatagccggcactttcctgcactacgaggaaaaaaacacgacgcctgaaaagcttagagaaataatctcttcgggagagcgttctcttgccggccccactctgccgcctcatggcctcttcctgtggaaagtggaattttcgaactcttaa

SEQ ID NO: 51968 - protein, 284 aa, Unknown
  Obtained from environmental sample
  DOMAIN (176)...(282): tRNA pseudouridine synthase
  misc_feature (1)..(284): Xaa is any amino acid
MNTQENSMTPSIKSFRKMNPDGRNIYLLIAYDGTDFSGWQRQSESTSDSQGNIPNKVRTVQGEIEKALEKIHGHAVPLTGSGRTDAGVHAAGQAANFYTNINSIPAQKFVPALNTILPKDVRILEARETDPEFHARFSAVSRTYRYHFICRPSLPHENRYNLQLWRFPRIEILNAYGRLLLGETDCSIFAGAGDSALEAGKSTNRYIYSACFFPEADRLVFEIRANAFMRKMVRSIAGTFLHYEEKNTTPEKLREIISSGERSLAGPTLPPHGLFLWKVEFSNS

SEQ ID NO: 51969 - DNA, 483 bp, Unknown
  Obtained from environmental sample
  misc_feature (1)..(483): n is a, c, g, or t
ttgaaaggcagtgatgttgtcatcaaggatataagcaagttctttgtgatttttagggctcttaataatgtgagtctggaaataaaaaaaggggaatttttctccttgctcggaccttccgggtgcgggaaaaccactcttttgcggataattgccggttttgaaaatcccgacaagggggaacttacccttgacgggaacgacgtgctttcggctcctcctaaccggcgtcatacaaatacggtatttcagaactattctctttttccccatcttacggtttttgaaaacgtcgctttttcgcttaggcttaaaagggcgtcttctacagaagttaagaacaaggtcaacgagtaccttcaccttgtacagcttgtggaccactcgcacaaaaaaccaaaccagctttccggcgggcagaaacagcgggtagccatcgcgcgcgctcttattaatgaaccgcgattttctcattttggatga

SEQ ID NO: 51970 - protein, 160 aa, Unknown
  Obtained from environmental sample
  DOMAIN (31)...(160): ABC transporter
  misc_feature (1)..(160): Xaa is any amino acid
MKGSDVVIKDISKFFVIFRALNNVSLEIKKGEFFSLLGPSGCGKTTLLRIIAGFENPDKGELTLDGNDVLSAPPNRRHTNTVFQNYSLFPHLTVFENVAFSLRLKRASSTEVKNKVNEYLHLVQLVDHSHKKPNQLSGGQKQRVAIARALINEPRFSHFG

SEQ ID NO: 51971 - DNA, 1443 bp, Unknown
  Obtained from environmental sample
  misc_feature (1)..(1443): n is a, c, g, or t
atgacggataattccgctcttttcacggatttttattctctcacaatggctcaaggttactggaaaaataaccgcgacgaaaatgtcgtattcgagatgtttttccgtcaacagccgttttcgggcggttactccatttttgcggggctcggcgttttgcttgaaaaactggtcaattttaaattttcagaagatgacattgcctttcttaaaggtttgggtatttttgaaaacggttttaccgattatcttaaaacttttcgttttaacggctctctttgggcaatggacgagggaacggttatttttccgcaggaaccgttgatacgagcggaaggcagtcttattgaatgtcagataatcgaagggcttatcttaaatattatcaattttcaaagtttaatcgctacaaagacacgccgaatatggcttgcttcgggtaaagggcagataatggagttcggtcttcgcagagcgcagggacctgacggggcgatttccgcttcccgcgcggcgtacattggcggcgttcaaggaacaagcaacacgctggcgggaaaaatttacggtatccccgtaatgggaacaatggctcactcatggataatgtcattcgataacgaagaagacgcatttgacgcctacgcctcgctgtaccccgacagatcaatttttttaatcgacacttatgacacattaaaaagcggaattgttaacgctataaagtcggggaaaaaacttaccgctaaaggaaaaaatttcggagtgcgtcttgattcgggcgacattcagtatctttcaacggaagtaaggcggcagcttgacggcgcgggacttaaaaacgcttttattacggtctccaatgatcttgatgaaaatataatcgaaacgcttgtgaaagacggcgcgcccgtgaatagctggggagtgggaacccgtcttgtaacaggcgcatacgcttccgcctttaccggagtgtacaaacttgccgctctccgaggaaaagaaggcactacgcccgttatgaaattttcagataaccccgaaaagacgacaaacccgggcataaaacaagtttggcggataagagataaaacgggctcagcgatagcggacgtgttgagtatagacgaagatgacgatgaaataaaaaacggacagacttattccttctggcatccttccgcggattaccgccattttgtacacaccgttgaaggaagcgcaacggcgatgttgaaaaaacgcatagaaaacggcgttctgacagcggaactgccttcgcttgcggaaattaaagactatgccgccgccgaccttgaaagttttgattcgacatacaaaagactgttaaatccccacatttacaaagtatcgattaccgataaattgcgctctcttaaactggaattgatacagaaacagttggattttggagagtaa

SEQ ID NO: 51972 - protein, 480 aa, Unknown
  Obtained from environmental sample
  DOMAIN (149)...(364): Nicotinate phosphoribosyltransferase (NAPRTase) family
  misc_feature (1)..(480): Xaa is any amino acid
MTDNSALFTDFYSLTMAQGYWKNNRDENVVFEMFFRQQPFSGGYSIFAGLGVLLEKLVNFKFSEDDIAFLKGLGIFENGFTDYLKTFRFNGSLWAMDEGTVIFPQEPLIRAEGSLIECQIIEGLILNIINFQSLIATKTRRIWLASGKGQIMEFGLRRAQGPDGAISASRAAYIGGVQGTSNTLAGKIYGIPVMGTMAHSWIMSFDNEEDAFDAYASLYPDRSIFLIDTYDTLKSGIVNAIKSGKKLTAKGKNFGVRLDSGDIQYLSTEVRRQLDGAGLKNAFITVSNDLDENIIETLVKDGAPVNSWGVGTRLVTGAYASAFTGVYKLAALRGKEGTTPVMKFSDNPEKTTNPGIKQVWRIRDKTGSAIADVLSIDEDDDEIKNGQTYSFWHPSADYRHFVHTVEGSATAMLKKRIENGVLTAELPSLAEIKDYAAADLESFDSTYKRLLNPHIYKVSITDKLRSLKLELIQKQLDFGE

SEQ ID NO: 51973 - DNA, 660 bp, Unknown
  Obtained from environmental sample
  misc_feature (1)..(660): n is a, c, g, or t
atgaatttagacgtatcaaaaactttacttttaattattgacgcgcagaatgatttctgtccgggcggcgcgttggcggtgaacgacggagacgccgttgtttctccgctgaacgcggtatcccgctctcttgccgaaaaaggcggtcgagtcgccgccactcaagactggcacggtacggggcatatctcttttgcctcgtcacataacggcaaaaaatccggcgatgttatcgacactccccttgttaaaggacaggttctctggcctgaccactgcgttcagggaaccaagggagccgattttcacaaagacctcgatctcaaacccatttcattgattgtccgaaaaggttttcacaaagacattgattcctattcggcgttttttgaaaacgacagaaaaaccaaaacagggcttgaaagttaccttcgagggctcggcatagaaactgtcatcatgggcggcattgccaccgattactgtgtatttttcagcgcaatggattgtaaaaatcttgggttcgacactgttatcgccgaggacgcagtgcgaggggtcggcttccccgaaggctcagtggaaaaagccgtaacagcaatgaaggacgcaggggttaaatttatctcttccaaagaaatcattaatagtttaaaataa

SEQ ID NO: 51974 - protein, 219 aa, Unknown
  Obtained from environmental sample
  DOMAIN (3)...(209): Isochorismatase family
  misc_feature (1)..(219): Xaa is any amino acid
MNLDVSKTLLLIIDAQNDFCPGGALAVNDGDAVVSPLNAVSRSLAEKGGRVAATQDWHGTGHISFASSHNGKKSGDVIDTPLVKGQVLWPDHCVQGTKGADFHKDLDLKPISLIVRKGFHKDIDSYSAFFENDRKTKTGLESYLRGLGIETVIMGGIATDYCVFFSAMDCKNLGFDTVIAEDAVRGVGFPEGSVEKAVTAMKDAGVKFISSKEIINSLK

SEQ ID NO: 51975 - DNA, 813 bp, Unknown
  Obtained from environmental sample
  misc_feature (1)..(813): n is a, c, g, or t
atgaacagcgacgtgaaaatttcgccatgcaggttaaacggcgttgttcgcgcaatcccttccaagtcgcaggctcacagggcgcttatctgcgcggcgttagctgataaacctacaactattgaatgtaatggcggctccgatgacatagcggcaaccgctgattgcctgtccgcgctgggagctaagattgaacatgaatcgggcgtttatattgtccatccgttaaaacgtgagggtaatgacatcgctactctagactgcggggaaagcggaagcacgttccggtttatgctgcccatcatcggcgcgcttggacgtaaagcttcgtttatcctgaaaggacggcttcccgaacgccccctctccccgttatatgaagaacttgtccgccacggagccgaattgccacctcatggtactgttccgttttgcgcctcagggcagcttgcgcctgggtcttattcgctggatgccggtgtatcgtcgcaatttatcagcggcctgttgttcgccctgcccttgctcgacggggacagtgaattgcatctaacaggacaggcggagtcatttccttatattgaactgactctggcaatgctggaaatatttggtataaaaacagaatttaaaaacaatgttttttttataccgggcgggcaaacataccgatctcccggcaagacgcgggtagagggcgattggtcgaacgccgcgttctggctgagcgcgggggctattggaaaagggcagcgttacccctgcaccggatttgaatttaaaatcacggcagggcgaccgcgcgatccttga

SEQ ID NO: 51976 - protein, 270 aa, Unknown
  Obtained from environmental sample
  DOMAIN (7)...(270): EPSP synthase (3-phosphoshikimate 1-carboxyvinyltransferase)
  misc_feature (1)..(270): Xaa is any amino acid
MNSDVKISPCRLNGVVRAIPSKSQAHRALICAALADKPTTIECNGGSDDIAATADCLSALGAKIEHESGVYIVHPLKREGNDIATLDCGESGSTFRFMLPIIGALGRKASFILKGRLPERPLSPLYEELVRHGAELPPHGTVPFCASGQLAPGSYSLDAGVSSQFISGLLFALPLLDGDSELHLTGQAESFPYIELTLAMLEIFGIKTEFKNNVFFIPGGQTYRSPGKTRVEGDWSNAAFWLSAGAIGKGQRYPCTGFEFKITAGRPRDP

SEQ ID NO: 51977 - DNA, 834 bp, Unknown
  Obtained from environmental sample
  misc_feature (1)..(834): n is a, c, g, or t
atgaacatcggcattatcggtctgggccttatcggcggttcgtttgccaaagcgtacaaggccgccgggcacactgtatacgcaggcgagatcgataaaagcatactggattttgccgttctttcaggcgctgttgacgcgccgctggacgaagaggcgctgtcccgctgcggcctgatcctgattgccctgtacccgcaggcggcgatagaatttctggacaaaatggcgcggcatatactagtttccgccacagtcatcgactgctgcggcaccaaaaaaaatatatgcgccgcagggtttaaggccgccgctcagtacggcttcacctttgcgggcggacacccgatggcgggcaccgaacattcaggatttaagcacagcaaggcgaatatgttcaagggcgcgtccatgatcatagtgccgcccatgtatgacgacattcagtttcttgagaaaatcaaggtactgctcgcgccggcggaattcggcaggctgaccgttaccaccgcggaaaaacacgacgcgatgatcgcgttcacctcgcaaatggcccatctggtatccaacgcgtttattaaaagcccgaccgtgcttgagcacagggggttttccgccgggagctacaaagacctgacgcgcgtggcctggctcaacgagcggatgtgggcggagctgtttctggaaaacagggacaatctgctccatgagcttgatctgtttattgcttccctccaagagtacagggacgcgctgcagaagaatgactttcccaaactccagtctcttcttcttgatggcaagcgccttaaagaagaggttgaccgacgatga

SEQ ID NO: 51978 - protein, 277 aa, Unknown
  Obtained from environmental sample
  SIGNAL (1)...(16)
  DOMAIN (1)...(142): NAD binding domain of 6-phosphogluconate dehydrogenase
  misc_feature (1)..(277): Xaa is any amino acid
MNIGIIGLGLIGGSFAKAYKAAGHTVYAGEIDKSILDFAVLSGAVDAPLDEEALSRCGLILIALYPQAAIEFLDKMARHILVSATVIDCCGTKKNICAAGFKAAAQYGFTFAGGHPMAGTEHSGFKHSKANMFKGASMIIVPPMYDDIQFLEKIKVLLAPAEFGRLTVTTAEKHDAMIAFTSQMAHLVSNAFIKSPTVLEHRGFSAGSYKDLTRVAWLNERMWAELFLENRDNLLHELDLFIASLQEYRDALQKNDFPKLQSLLLDGKRLKEEVDRR

SEQ ID NO: 51979 - DNA, 585 bp, Unknown
  Obtained from environmental sample
  misc_feature (1)..(585): n is a, c, g, or t
atgcgcgccgaaggcatagaactcctgttgaaaacaagagacaaaaccggcatgcccatagttacagaaataatgaacgccgatcatattcccttatttgaacaggtggatgtgattcaggtaggcgcgcgcaatatgcagaacttcgagctgcttaaggaactggggcaggtaaagaagcccatcctcctaaaacgcggatttgcgaacaccctgcaggaactattgatgagcgccgagtacctcatggctgaaggaaacgataatgtgatcctctgcgaaaggggaatacgcacctttgaaacttacacgaggaacaccctcgatctgtccgccgtgcccgtgctgaaggagctctcccatctgccggtgatcattgatccaagtcatgctatcggcgtttcgcgttatgtgaaaccaatggcgcttgcgtcggtggctgccggcgcggacgggcttattatcgaagtgcacaatgatccaaaaaacgccgcctgcgacggcgcgcagtccctcacgctggaacagttcgccgatgtcgcggaaaaggtgcggcggatacgcgaagtaatcgcggcgctttag

SEQ ID NO: 51980 - protein, 194 aa, Unknown
  Obtained from environmental sample
  DOMAIN (1)...(190): DAHP synthetase I family
  misc_feature (1)..(194): Xaa is any amino acid
MRAEGIELLLKTRDKTGMPIVTEIMNADHIPLFEQVDVIQVGARNMQNFELLKELGQVKKPILLKRGFANTLQELLMSAEYLMAEGNDNVILCERGIRTFETYTRNTLDLSAVPVLKELSHLPVIIDPSHAIGVSRYVKPMALASVAAGADGLIIEVHNDPKNAACDGAQSLTLEQFADVAEKVRRIREVIAAL

SEQ ID NO: 51981 - DNA, 471 bp, Unknown
  Obtained from environmental sample
  misc_feature (1)..(471): n is a, c, g, or t
atggataaaaaagggacaataaccattatttcattattttctggttgtggcggcatggatttaggttttcttggtggatttgagtttttaggaaaaaagtataaaaaaaacaactttgaaattatctgggcgaatgaaattaatactcctgcctgtaatacctatcaaaaaaatattggaaatcatatcatcgaaggcgatattcagcaaaaaattaatatgctgccacagtatgcggatgtagttattggcggttttccctgtcaagatatatcaataaatggcaaaatgaaaggagttaaagggaagcgaagctgtttatatatgtcaataatagatacagttaaaaaaatacaacccaaaatatttatcgctgaaaatgtcaaaggacttttacttaaatcaaatgccgactcattaaaaaaaatattaaatgattttaattcgcttggatatatatattacatataa

SEQ ID NO: 51982 - protein, 156 aa, Unknown
  Obtained from environmental sample
  DOMAIN (7)...(156): C-5 cytosine-specific DNA methylase
  misc_feature (1)..(156): Xaa is any amino acid
MDKKGTITIISLFSGCGGMDLGFLGGFEFLGKKYKKNNFEIIWANEINTPACNTYQKNIGNHIIEGDIQQKINMLPQYADVVIGGFPCQDISINGKMKGVKGKRSCLYMSIIDTVKKIQPKIFIAENVKGLLLKSNADSLKKILNDFNSLGYIYYI

SEQ ID NO: 51983 - DNA, 996 bp, Unknown
  Obtained from environmental sample
  misc_feature (1)..(996): n is a, c, g, or t
ttgaaacgaataattttaagacagggcgaggaggatcgtatcctgctcggacacccttgggtttacggcaatgaaattgacagcgtgctggaaggcaaggaacattcacagcttgttcccggcgaatgcgccgacgtagaaagcgctcgcaaaaaatatctcggcagggcgattgtaaaccccaactcaaaaataaccgcccgcctgtacagcccttccaaagaaggaattgataaaggttttttcaaacgccgtatccgcgaagccgttcttaaacgcaaatttttccgtaacctttccgttgaatccgcaaggcttgtctttgccgaagcggattttcttcccggacttataatcgactgtttcgcaggctggccgttagccgaaattgaatccgccgtaacacagcgtccgctcacttttgatactgtgcaatccgctctgggcgctccacgtttttggctctccgttcaatttcttgtctggggcatggacagccgcaaagaaatgataattgaggcgcttcaagaagtgataacaatcgccgcttctgcggatacggaagacggcgcagtgtatcctgcggcgtttattcccgacggcgctctttgcggcattatcgaaaaatccgccgctcatgtccgtgagttggaggggcttcccctgcgtgagggcgtattgcaaggttcatttcccgaaacaggaattgttatttttgaaggcggcttgccttttattgtggattgcgcgcaggggcaaaagacaggtttttttctggatcaaagagacaatcatattctttgcggcaaatacgcatccttgctgcaaaaagaaacaggtaaagaattgcgtattcttgacgcttgttcttacacgggcggttttggtcttcacgcaatcggttctcaggggaaacttaccatgcttgatgtttcggcgtcggctcttgaaacggcgaaaaaaacgccgcgcttgccggaactgcggatcgtgtaa

SEQ ID NO: 51984 - protein, 331 aa, Unknown
  Obtained from environmental sample
  misc_feature (1)..(331): Xaa is any amino acid
MKRIILRQGEEDRILLGHPWVYGNEIDSVLEGKEHSQLVPGECADVESARKKYLGRAIVNPNSKITARLYSPSKEGIDKGFFKRRIREAVLKRKFFRNLSVESARLVFAEADFLPGLIIDCFAGWPLAEIESAVTQRPLTFDTVQSALGAPRFWLSVQFLVWGMDSRKEMIIEALQEVITIAASADTEDGAVYPAAFIPDGALCGIIEKSAAHVRELEGLPLREGVLQGSFPETGIVIFEGGLPFIVDCAQGQKTGFFLDQRDNHILCGKYASLLQKETGKELRILDACSYTGGFGLHAIGSQGKLTMLDVSASALETAKKTPRLPELRIV

SEQ ID NO: 51985 - DNA, 1416 bp, Unknown
  Obtained from environmental sample
  misc_feature (1)..(1416): n is a, c, g, or t
ttggatcactaccgcgccatcgaggacacaaaaaacacgcgatataccgatttgaagtaccgcttggtgcaattcgcggagaagtaccgggttaagtacgtttactactttcgcgagcacgacaaggagaacttccagtacatcatagacaacgactttgacccggccaccgaggtggggccggacaagatatttaagatcggcggcatagcaagacaggccttggccggcagcgtgaccgcgaccgaactcggcgcccacgacccaagttgggagaatcttctcgccggctttgccccggtgtacgataccaacggcaatttctactgcgtagccggagttgatataggcgataagatttttttcgacctccgcagaaacgcgctggtgatgatggcgctccagatcttcgccctcgccgtttcggtgctcttcggcgtcttgtctatactcgtgtaccgaaagaaagcgcgtgagaccgaggaggcgcacctcaaactccagtacttcaacaacaatatgcgtcaggccttttccacctacctgtcggacgaggtggtggaggaggttatatccgaccctgcccgtctgaaactcggcggcaccaaccggcacatgacagccctattctccgacatcaaaaactttaccggcatagcggaggtgctcatgccagagcacttggtagacctcctcaactactacctctccaccatgagcgacatccttttggagcagaaagggacgatagacaagtatcagggcgactcgatcatgtccttcttcggcgcgccgctggaactggccgaccacgccctgcacgcctgcaccgccgcgataaccatgaagcggacggagaacgacgtanaccgctatgtcttagaaaagggcataagcccgtcgccgctcctaacccgcatcggaatcaacaccgggagcatggtagcaggaaacatgggaacgggaaacaagatgaactacacgatcatgggaaacgccgttaaccttgccgcacgtcttgaaggggttaacaaacagtacggaacctggatactcgcttcggatgacacaatacgcgaaacccaggggaagattcttgtccgtatgctcgaccgcgtgcgcgtagtcggcatcaacgaaccggtacgcctttatgaactgataaataccgccgagaacgcagggcaggaagaaaaaacgttagttgaaactttccaccaggccctggactgttatgagacgcgccaatggaaaaaagccgccgaaggtttcagggatgcccttgagatagagaccaggctcgcactcaacccggacggcggcccctccgccgtatatcttgagcgctgcgggaagttcaagtccaagccgccggcggacgactgggatggcgttcataacctgacggaaaagtaa

SEQ ID NO: 51986 - protein, 471 aa, Unknown
  Obtained from environmental sample
  DOMAIN (201)...(389): Adenylate and Guanylate cyclase catalytic domain
  misc_feature (1)..(471): Xaa is any amino acid
MDHYRAIEDTKNTRYTDLKYRLVQFAEKYRVKYVYYFREHDKENFQYIIDNDFDPATEVGPDKIFKIGGIARQALAGSVTATELGAHDPSWENLLAGFAPVYDTNGNFYCVAGVDIGDKIFFDLRRNALVMMALQIFALAVSVLFGVLSILVYRKKARETEEAHLKLQYFNNNMRQAFSTYLSDEVVEEVISDPARLKLGGTNRHMTALFSDIKNFTGIAEVLMPEHLVDLLNYYLSTMSDILLEQKGTIDKYQGDSIMSFFGAPLELADHALHACTAAITMKRTENDVXRYVLEKGISPSPLLTRIGINTGSMVAGNMGTGNKMNYTIMGNAVNLAARLEGVNKQYGTWILASDDTIRETQGKILVRMLDRVRVVGINEPVRLYELINTAENAGQEEKTLVETFHQALDCYETRQWKKAAEGFRDALEIETRLALNPDGGPSAVYLERCGKFKSKPPADDWDGVHNLTEK

SEQ ID NO: 51987 - DNA, 366 bp, Unknown
  Obtained from environmental sample
  misc_feature (1)..(366): n is a, c, g, or t
ttggcggttattcccacactctcccatgttttgaaaatttacggaacgaaaggaacctggtgggttcgggttcccaacactttggggggcccggtctatgttaagcgattccgtgaagaagaatggttgcagatacccctgattaacaattatacggaagactgccgtgggttaggcgtcacagaaatggtcgaagcgatagaagctgaccgtccgcaccacgcctccgcggagcttgcttaccatgtgctggatattatgtacggcatacatgaggctgcggagacgggaaggtactataattcttttacttttccgtcaggttatgaacgccatcccagtcgtccgccggcggcttggacttga

SEQ ID NO: 51988 - protein, 121 aa, Unknown
  Obtained from environmental sample
  misc_feature (1)..(121): Xaa is any amino acid
MAVIPTLSHVLKIYGTKGTWWVRVPNTLGGPVYVKRFREEEWLQIPLINNYTEDCRGLGVTEMVEAIEADRPHHASAELAYHVLDIMYGIHEAAETGRYYNSFTFPSGYERHPSRPPAAWT

SEQ ID NO: 51989 - DNA, 381 bp, Unknown
  Obtained from environmental sample
  misc_feature (1)..(381): n is a, c, g, or t
atgtggtatgttattgagcattttacagactgtcttaacgtattagctgaaattaaaaaactgttaaaacccggcgggattctggcgttttcaacgccttcgttttcagggatcagcgggcgcaaatcgcttcgcaagtttttagaaaacagtcccgccgatcactttacaatctggtcgcccaaaatgtgtaaaaaagcgcttgccctcgccggctttaaagttaaaaaaatagcgatgagcggctgccaccccgagcgttttcctctcttcggagaattcgccgcagacaaaaacagccgcttgtatagtatacttatggctgtcagcagaattttcgctctgggagacacttttgaggtatatgcgaaaaaatattaa

SEQ ID NO: 51990 - protein, 126 aa, Unknown
  Obtained from environmental sample
  misc_feature (1)..(126): Xaa is any amino acid
MWYVIEHFTDCLNVLAEIKKLLKPGGILAFSTPSFSGISGRKSLRKFLENSPADHFTIWSPKMCKKALALAGFKVKKIAMSGCHPERFPLFGEFAADKNSRLYSILMAVSRIFALGDTFEVYAKKY

SEQ ID NO: 51991 - DNA, 753 bp, Unknown
  Obtained from environmental sample
  misc_feature (1)..(753): n is a, c, g, or t
atgggttcgctattggttggcgcaaattttgcacaaggacttgcaaaagatttgggcattgaatgctatggaataaaccatttagaggggcatatatgctccgcaatgctcaataagggagagtggttagcagatagttttatagccttgatagtctctggtgggcacacggaattggttttgctaaaatcagggtttaaatatacctccattggcaaaacaagagatgatgcagctggcgaggcttttgacaaaagcggaaagctactcggtcttggctaccccgcaggcgcagaaatcagcaggcttgcaaaaaatggaaacaaaaatttttacgagttccccagagctttaaacgagcctgcttctcttgatttttcatttagcggcttaaaaaccgcagttagccgttatgttcaaacaaaaggcaaagaatttgtagatgaaaaccttgcaaacatctgtgcaagccttcaagaagccatagcggatattttgtctctgaaggcggtaaatgcggctaaaaaaaacaacgtggaaaatctcattttatgcggcggtgttagcgcaaacagcaggctcagagaacttttagaagaacgggcatcaaaacaagggataaacttaatttgcccgccaccagctttatgcacagataacggtgcgatgattgctgctgctgctatttttagaaagcgagctggaatgctcgtggagaatagagaggttaaagcctggaatgagttgttttaa

SEQ ID NO: 51992 - protein, 250 aa, Unknown
  Obtained from environmental sample
  DOMAIN (2)...(226): Glycoprotease family
  misc_feature (1)..(250): Xaa is any amino acid
MGSLLVGANFAQGLAKDLGIECYGINHLEGHICSAMLNKGEWLADSFIALIVSGGHTELVLLKSGFKYTSIGKTRDDAAGEAFDKSGKLLGLGYPAGAEISRLAKNGNKNFYEFPRALNEPASLDFSFSGLKTAVSRYVQTKGKEFVDENLANICASLQEAIADILSLKAVNAAKKNNVENLILCGGVSANSRLRELLEERASKQGINLICPPPALCTDNGAMIAAAAIFRKRAGMLVENREVKAWNELF

SEQ ID NO: 51993 - DNA, 930 bp, Unknown
  Obtained from environmental sample
  misc_feature (1)..(930): n is a, c, g, or t
gtgtgcacccttgggacgctttttgacgagcagatttacgatgacatagaaggcgacaaacgggaacattttatccttcattataactttccgcctttttcggtcggagaagtcgggcgcatgggcacaggccgccgcgaaatagggcacggaaacctggcgcgccgttccctggaagccatgatcccgccgaaagaggtttttccctacacggtacgggtagtctctgaaattatggaatccaacggttcttcttccatggcttcagtctgcggaggaaccctttcgatgctgcacgccggagtgcccatgaaaaaaccggtagcaggcattgccatgggcttgataaccgaaagcaacgcaccgggagcccgctatgccattctctctgacatccttggcgaagaagatcaccttggggacatggacttcaaagttgccggaaccgaaggcgggattaccggctttcaaatggatattaagatcgccggcgtaaatcctgaaattatgcggaatgcgctcgaccaggcaaaacgtggacgaatgcatattctttcaatcatgaacaagacgattagcaagcctttggatgaaatcagcgaatatgccccaaagatagtaacgctgcgcattgacaccgataagatcggcgccttgattggtcccggagggaaaaacattaaagcgctttgcgaacagtacagcgtaaggatcaacaccgaggacgacggtaccgttaccatatttggaaagagttccatagacgcagaagacgcaaaagcggcggtattgggtatagtcctggatcctgaggtaggcaaaatctacgaaggtacagttaagcgcataatggatttcggcgctttcgtgaaatacttcccggcagggaagggctggtgcatatcagcaaactttcccgccagcgcatag

SEQ ID NO: 51994 - protein, 309 aa, Unknown
  Obtained from environmental sample
  DOMAIN (206)...(263): KH domain
  misc_feature (1)..(309): Xaa is any amino acid
MCTLGTLFDEQIYDDIEGDKREHFILHYNFPPFSVGEVGRMGTGRREIGHGNLARRSLEAMIPPKEVFPYTVRVVSEIMESNGSSSMASVCGGTLSMLHAGVPMKKPVAGIAMGLITESNAPGARYAILSDILGEEDHLGDMDFKVAGTEGGITGFQMDIKIAGVNPEIMRNALDQAKRGRMHILSIMNKTISKPLDEISEYAPKIVTLRIDTDKIGALIGPGGKNIKALCEQYSVRINTEDDGTVTIFGKSSIDAEDAKAAVLGIVLDPEVGKIYEGTVKRIMDFGAFVKYFPAGKGWCISANFPASA

SEQ ID NO: 51995 - DNA, 1305 bp, Unknown
  Obtained from environmental sample
  misc_feature (1)..(1305): n is a, c, g, or t
atggtaatgggcatgaagcgttttccaagtcgcgccggtgaaagtccgcgctccatgtcctttaccattttcatgtatatcctctctgaagcgtttttttcttttttcatttcatttctttttttcttttttattttttttgtgaatcagctcctgttaatggcccaggacattctttcaaagcaggttccattggggcaggttgcccttttggttctgttctctttaccttctgttatagcattgtccgctccttttgcttcccttgtcggtcttttgatgactgtagggcggctttcaagcgataacgaaattctggtatttctgtcatccgggctttctttcaggaatgtgtttataccggcaatagccgtaggcatagttatttccattctttcttttattgccaatgacatactgcttcccggaggttatgtgcaatttgcccaactgtacaggcgtatacttgtttccactccggcgctggaactggaggcaaactcggtaaaaaaatacaagaacacgataatagtcaccggtaatgtgacaggcaacgctatcgacaacttgataataatagacaagaccagcgacggcgagcgccgtgttatcatggctggtaacgccgaattaaaagactccggcaagaacggcttgagccttgagcttgacaaagcttttgtacaatcttcaaaggaaattgcccgcgaggattacgactacgcatccgccgggtaccttcgctactgggtaccccaggaagaccttatacaggccgtgtcttctataagcccccgtgagatgagttccatcgacgtgtacaaggagataaaaagcagaaccttcgagcttaatagccgcatgaatgaaaaaaggaacaaggtttcctctctggcccttgtccttgagaacagcctgcgcgccgggcccgcttcgcctgaatggaaccgcagaaccaaccagtttaccgctttccagcgggaggcgcagacgcttcacagtatgagtaaagacagggggctttccctatattggctggaattctacaagaaattctccatgccattcggggctttttcgttcgtattccttgcggtcgcgctggggctgatggcaaaaagaagcggccagaccgtgggctttatctttggacttatcatttcggtaatctactgggcgctgcttctgggcgggcagaccatgggaataaggctaagcacccccccattttggtcaatgtggctgccaaatattctagcgttgtcgatcgggcttgttctgaccattatcagggtaaccaaatga

SEQ ID NO: 51996 - protein, 434 aa, Unknown
  Obtained from environmental sample
  DOMAIN (25)...(430): Predicted permease YjgP/YjgQ family
  misc_feature (1)..(434): Xaa is any amino acid
MVMGMKRFPSRAGESPRSMSFTIFMYILSEAFFSFFISFLFFFFIFFVNQLLLMAQDILSKQVPLGQVALLVLFSLPSVIALSAPFASLVGLLMTVGRLSSDNEILVFLSSGLSFRNVFIPAIAVGIVISILSFIANDILLPGGYVQFAQLYRRILVSTPALELEANSVKKYKNTIIVTGNVTGNAIDNLIIIDKTSDGERRVIMAGNAELKDSGKNGLSLELDKAFVQSSKEIAREDYDYASAGYLRYWVPQEDLIQAVSSISPREMSSIDVYKEIKSRTFELNSRMNEKRNKVSSLALVLENSLRAGPASPEWNRRTNQFTAFQREAQTLHSMSKDRGLSLYWLEFYKKFSMPFGAFSFVFLAVALGLMAKRSGQTVGFIFGLIISVIYWALLLGGQTMGIRLSTPPFWSMWLPNILALSIGLVLTIIRVTK

SEQ ID NO: 51997 - DNA, 1149 bp, Unknown
  Obtained from environmental sample
  misc_feature (1)..(1149): n is a, c, g, or t
ttggctggaattctacaagaaattctccatgccattcggggctttttcgttcgtattccttgcggtcgcgctggggctgatggcaaaaagaagcggccagaccgtgggctttatctttggacttatcatttcggtaatctactgggcgctgcttctgggcgggcagaccatgggaataaggctaagcacccccccattttggtcaatgtggctgccaaatattctagcgttgtcgatcgggcttgttctgaccattatcagggtaaccaaatgacgctggatcgatatttagtccgccagttcatgcccatttttgtcgtggctatcggaatgttcatgtttgttttgtcactgatcgatctgttcgcgcatntagtccggtatcttaactacgaagtccccttctcccagataatgaagatcagcgcgtactatctgccaaagagtttttcctacgccctgcctatatccctgttattcgcttcggcctatactcttggggatctctatgcgcgtaacgagcttacttcaattttttcatcggggatccccttttggcgtttcagcatgccgttagttatcatcgggtttctcgcttcgattttttcgtttttctttgatgacaatctggttataccgaccttgcgggtaaagaacgagctttcacggcgtttcctgcgccagacaaccgccgagaacaactcagacattgtaatcaaggcgagaaacggagagcttatctattcgattgattattatgattataacgcgaaagttcttaatgggataagtattgtggaacaggactcctcgggtaattttatttctctgatccgcgcgcaaaggggaacatggacaggcgagtactgggattttatcaacccgatgatttattattgggaggaaaactttctgcgaaccaagccccttccccctacggacgcgtatcgtgaagaccctgacatcttcaggcgcaacgccgtcaagccggaagagcttcccgcaatgcaggaaaaattactgataaaagaccttacagccgcggggcttccccacatggaagcccaggctgattattaccaccgattctcatattctacaatatcatttatagtaatggttctttcaatatcaatctcggccatctga

SEQ ID NO: 51998 - protein, 382 aa, Unknown
  Obtained from environmental sample
  DOMAIN (95)...(382): Predicted permease YjgP/YjgQ family
  misc_feature (1)..(382): Xaa is any amino acid
MAGILQEILHAIRGFFVRIPCGRAGADGKKKRPDRGLYLWTYHFGNLLGAASGRADHGNKAKHPPILVNVAAKYSSVVDRACSDHYQGNQMTLDRYLVRQFMPIFVVAIGMFMFVLSLIDLFAHXVRYLNYEVPFSQIMKISAYYLPKSFSYALPISLLFASAYTLGDLYARNELTSIFSSGIPFWRFSMPLVIIGFLASIFSFFFDDNLVIPTLRVKNELSRRFLRQTTAENNSDIVIKARNGELIYSIDYYDYNAKVLNGISIVEQDSSGNFISLIRAQRGTWTGEYWDFINPMIYYWEENFLRTKPLPPTDAYREDPDIFRRNAVKPEELPAMQEKLLIKDLTAAGLPHMEAQADYYHRFSYSTISFIVMVLSISISAI

SEQ ID NO: 51999 - DNA, 1239 bp, Unknown
  Obtained from environmental sample
  misc_feature (1)..(1239): n is a, c, g, or t
atggtaaaaaacttaaatcaccggaaagcaaatataagccttaagcttgtaacgggaaacggaagccccgcggcaaatcaggatgtaaaaatagagcaaaaaagccataaatttttatttggaacaggcggctttgaagcgattgaacttgccggagggaaacttgacggttcttgcttagacgaaacgaaggctgcttttatcagggataaacttgacaaactttttgccttaaacaattacacaaccttgccattttatctgggacgttatgagcctgaggagggcaagccggatgaaaaacgccttaaggccgccgcgcgctggtttaatgagcggaacataaccgtaaagggacatccgctgtgctggcacaccgtctgcgccgactggctgatgaattattccaacgccgacatattaaaaaaagtaatagcgcggattgagcgcgacgtatccgccttcgctgggttaatcaatatatgggacgtaattaacgaagtagtcattatgccggtttttgacaaatatgacaacgccgttacgcgtatatgcaaagaatacgggcaggtgcgtattgtaaaagaggtgtttgaagccgcaaaacgcgcgaatccgaattcggtattgctgttaaacgatttcgacacatcaattgaatatgaaattcttatagacaaatgcctgcaggcgggcattcctatagacgtaatcggaatacagtcgcatcagcatcagggttactggggagcggaaaaaatactcgacgtgctcatgcgtttttcgcgcttcggcctgcccgttcactttacggaaaatacaatcatttcgggggagataatgcccgcgcacatagtagacttgaacgactggcaggtggaaacatggcctacaacccccgaaggggaagaacgtcaaaaaaatgaaatgcttgaaatgtacgaaatacttttcgcccatccgtgcgtgcacgcgattacgtcatggtcgggcactgataacttgtggctgcacgcgcccgcgggcttcctccgcgtggacaacagcgaaaaaccggtatacaaggcgttacgtgacaaaatagaaaacgaatggaccacaaaagaaacaagccggacagacgcggacggcattgtaaaactggaaggctttaagggcgcgtatgaagtttcgtgcatgggaaaaaccgccttatttgagttagataataaagatatgcctgaacttaagcttttatga

SEQ ID NO: 52000 - protein, 412 aa, Unknown
  Obtained from environmental sample
  DOMAIN (67)...(361): Glycosyl hydrolase family 10
  misc_feature (1)..(412): Xaa is any amino acid
MVKNLNHRKANISLKLVTGNGSPAANQDVKIEQKSHKFLFGTGGFEAIELAGGKLDGSCLDETKAAFIRDKLDKLFALNNYTTLPFYLGRYEPEEGKPDEKRLKAAARWFNERNITVKGHPLCWHTVCADWLMNYSNADILKKVIARIERDVSAFAGLINIWDVINEVVIMPVFDKYDNAVTRICKEYGQVRIVKEVFEAAKRANPNSVLLLNDFDTSIEYEILIDKCLQAGIPIDVIGIQSHQHQGYWGAEKILDVLMRFSRFGLPVHFTENTIISGEIMPAHIVDLNDWQVETWPTTPEGEERQKNEMLEMYEILFAHPCVHAITSWSGTDNLWLHAPAGFLRVDNSEKPVYKALRDKIENEWTTKETSRTDADGIVKLEGFKGAYEVSCMGKTALFELDNKDMPELKLL

SEQ ID NO: 52001 - DNA, 936 bp, Unknown
  Obtained from environmental sample
  misc_feature (1)..(936): n is a, c, g, or t
atggctatcgcgcaaagtattaaaaacgcgcttgcagggtcctcgatgatccgcaagatgtttgaagaaggcattcaattaaaaaaacagcacggagaaaaaaatgttttcgatttctctcttggaaatccggatattgagccgccgcccgcttttcacaaagtgtttgtaaaattcgccaagaaagacgaaaaaggctctcacgggtatatgccgaacgccggttatctttttgtcagagaagcgctggcgaaaaaagtatgtaaagagcagaatgtaaatatagacggctctcatatagtcatgaccgttggagccgcaggcgggcttaacacggtctttaagacaatctgcaacccgggcgatgaaattgtcgtatcgcgtccgtactttatggaataccgcgcctacaccgccaaccacggagcaaaacttgtcgaagttgacgctaaggaagattttaatttggacatttccgctatcggcgcggcgttaaacgaaaaaacagccgcagtccttataaattcgcctaacaatccgacaggaagggtttattcatcggaaacgcttgcctcgctttcttccttgcttacggaacacggcaaaaagacgggacgttttccctatcttgtttcagacgaaccctaccgcgaaattgcgtataacgttgacgttccgccgtttttatcatcttacagcgagtcaatcgtcgtaacttcatattcaaaaagcctctccctccccggtgagcgcatcggttttatcgcggtaaaccctgcggtaaacgaaaaaggcgatctccttaacgggcttatctatgcgacaagagtgttgggctttgtaaacgcccccgctttaatgcaaagaatagtcgcctccctcacagaagcgcgtgttgacgttcaatttacgcaagaaggcgggacgcttttttga

SEQ ID NO: 52002 - protein, 311 aa, Unknown
  Obtained from environmental sample
  DOMAIN (34)...(310): Aminotransferase class I and II
  misc_feature (1)..(311): Xaa is any amino acid
MAIAQSIKNALAGSSMIRKMFEEGIQLKKQHGEKNVFDFSLGNPDIEPPPAFHKVFVKFAKKDEKGSHGYMPNAGYLFVREALAKKVCKEQNVNIDGSHIVMTVGAAGGLNTVFKTICNPGDEIVVSRPYFMEYRAYTANHGAKLVEVDAKEDFNLDISAIGAALNEKTAAVLINSPNNPTGRVYSSETLASLSSLLTEHGKKTGRFPYLVSDEPYREIAYNVDVPPFLSSYSESIVVTSYSKSLSLPGERIGFIAVNPAVNEKGDLLNGLIYATRVLGFVNAPALMQRIVASLTEARVDVQFTQEGGTLF

SEQ ID NO: 52003 - DNA, 834 bp, Unknown
  Obtained from environmental sample
  misc_feature (1)..(834): n is a, c, g, or t
atggacgtactgcttaacaggatttttttccccaattcgttcaacgaattgttttccgcgtggaaccagaaccagaccgctcaagtcttcgccggaggcaccgttcttttatggaaacaaagaaacaccataatagacctgccgcccgtcatcatctgccttgataatttacaggaactgcaaaacattacaagaaccgaacattatcttgaaatcggctctatggtaaaattaaataaaataatcagaatgggaaaaatagtgccgcaagttctctgcgactgccttgaaaacataggcggagtccagttaaggaacgtcgctaccataggcggcaatatctgcgccgcggaaaggctgcttgacatatcggcgccccttgtcgccctcgacgctcaatacgagttccggggcgctcaaaactctcgctgggtttccgcttcgcgctttcattcggaagaagaccgcggcgcgcccgggaaaaaagaaattcttaccagaatcaggctgccccttcatcattgggattattctatgtataaaaaatttttctcggaagacatgtataaccacaaaacaataacttttttggcaaaagcacaaaaaaacctcctttccgacataaaagttatctgtaaaggggatacgattatcagaaacaagagcgccgaaggcatactaatcggcagccatctgcccctgcaccggaaaacagcctccgattttatcgaaaactggaaggaatttctgtccggtaacaatgaactggatgaattcttaaaatatgaaataataaactgcatagaaataaatgtttataaccttacagaatag

SEQ ID NO: 52004 - protein, 277 aa, Unknown
  Obtained from environmental sample
  DOMAIN (6)...(173): FAD binding domain in molybdopterin dehydrogenase
  misc_feature (1)..(277): Xaa is any amino acid
MDVLLNRIFFPNSFNELFSAWNQNQTAQVFAGGTVLLWKQRNTIIDLPPVIICLDNLQELQNITRTEHYLEIGSMVKLNKIIRMGKIVPQVLCDCLENIGGVQLRNVATIGGNICAAERLLDISAPLVALDAQYEFRGAQNSRWVSASRFHSEEDRGAPGKKEILTRIRLPLHHWDYSMYKKFFSEDMYNHKTITFLAKAQKNLLSDIKVICKGDTIIRNKSAEGILIGSHLPLHRKTASDFIENWKEFLSGNNELDEFLKYEIINCIEINVYNLTE

SEQ ID NO: 52005 - DNA, 450 bp, Unknown
  Obtained from environmental sample
  misc_feature (1)..(450): n is a, c, g, or t
atggtccgcacggaagccggggtaaggctgattcatatactgcgggaaagtttcggcttgttcggcgcgaaagccggctgcctcaacggtcagtgcggcgcgtgttcggtaatctttaacagcatcgtaacttccgcgtgccttatacccgcgttcagggtaagaggaagcgagattatcacgatagaaggattttcacagacggacgagtacaatgacatattaacgggattcaaggaagtgcatttgggaaattgcgggttttgcgaagcgggaaaaattctttgcacggagacgcttcttgaaagattcccgaaccccacaagggaagacatcattatgagttttgcgggtataaactgccgctgtaccaatatagacagactggtagaagcggtaaattgcataataagcaaacgccagcggagattgtatggacgtactgcttaa

SEQ ID NO: 52006 - protein, 149 aa, Unknown
  Obtained from environmental sample
  DOMAIN (61)...(135): [2Fe-2S] binding domain
  misc_feature (1)..(149): Xaa is any amino acid
MVRTEAGVRLIHILRESFGLFGAKAGCLNGQCGACSVIFNSIVTSACLIPAFRVRGSEIITIEGFSQTDEYNDILTGFKEVHLGNCGFCEAGKILCTETLLERFPNPTREDIIMSFAGINCRCTNIDRLVEAVNCIISKRQRRLYGRTA

SEQ ID NO: 52007 - DNA, 1857 bp, Unknown
  Obtained from environmental sample
  misc_feature (1)..(1857): n is a, c, g, or t
atgcccgcacactccccagtccccagtccccagtccccagtccctctgatatacaaaatggtcgacacctgcggcggcgagtttgaggcgaagaccccctacttctactccattcagaacggaacggaaaacgaggctttgccttttattcagaaaagcgccaaacaacggattgtcgtgcttggctcggggccgatacgcatcgggcagggcatcgagtttgactacgcatgcgtgcattgcgtgtggacgctcaaaagcctgggatacgaagtcgtcgtgattaacaacaaccccgaaacggtgtccaccgactttgacacagccgacaggctttattttgagccgctgtgcgttgacgacgtaatgagcataatagaaattgagaaaccgttaggtgtcatcgtagcgttcgggggcggcacggcgatcaagctgacgaaaaaactgcatgagcgcggcgttaacataatcggcacgtccgccgacagcatagacgtctgcgaggacaggcagcgctttgacgccctgctggaaaatctgcaaataaaacgccccaagggttacggcgtcatgacggaagcacaggcgctggacgccgccgaaaaactcggtttcccggtgctgatgcgcccctcctatgtgctgggcggccagaacatgatcatcgcgttctcaacggatgacatccgcgagtatatggagatcatcctccgctcaaaacaggaaaacccggtgctgattgacaaatatctggaaggaatggagatagaagttgacgcgttatgcgacggcgacccctcgcagggagggcatggcggcgtgtttattccgggcatcatggagcacattgaacgtaccggcatacattcgggcgacagcatagccgtatacccggccctgaatattgacgacgagctggcggaagatatctatcaggttaccaagaaactttgcatggcgctaaacgttaaaggcttggttaatatccaatacatactttacgacaacgatatttacgtaatagaggtcaatcctcgggcgtcgcgcaccgttccctacatcagcaaggtgaccggcgttcccatgtgcgagctcgccaccggcgtgagcgtggggaaaacgctctccgaactcggctacaagcccggtttcgcgaagatccctccctacgtggcggtgaaagtcccggtattctcgtttgaaaagctggccggcgtggatacgcacctcgggccggagatgaaatccaccggcgaggttttggggctcggcaaaaatttgcaagaagccctgtacaaagggctgatagccgccggttacaagatgaagaagaagggcggcgtgttgatcaccgtccgcgacggcgacaagggggagatcgtgggcgtagccgaaaagctcgacaaacgcggattcaccctccacgcgacgcgcggcacggcgcggttcctgaacgataagggattccgcgtcaaagcggtggataaaatcagcgccaatacggaaaacaacaccgccgcgctcttggaaagcgggaaaatcagctacatcatctcaacatccgaaaaaggcagagatccggcgttcgacgacgtgaaaatccgccggaaagcctgctccttaggcgttccctgcctcacctcaatagacaccgcgaacgcgttggccgacagcctcctctccgattacagcgaaataaacaccgaattggtcgatataaacaaattaagggataagcgtatgaaactgtcgttcgccaaaatgcacgggtgcggcaacgactacatctacatcaacgctttagagacggacatcaactcgccggagtcgctctccacgctgctatccaaatag

SEQ ID NO: 52008 - protein, 618 aa, Unknown
  Obtained from environmental sample
  DOMAIN (168)...(349): ATP-grasp domain
  misc_feature (1)..(618): Xaa is any amino acid
MPAHSPVPSPQSPVPLIYKMVDTCGGEFEAKTPYFYSIQNGTENEALPFIQKSAKQRIVVLGSGPIRIGQGIEFDYACVHCVWTLKSLGYEVVVINNNPETVSTDFDTADRLYFEPLCVDDVMSIIEIEKPLGVIVAFGGGTAIKLTKKLHERGVNIIGTSADSIDVCEDRQRFDALLENLQIKRPKGYGVMTEAQALDAAEKLGFPVLMRPSYVLGGQNMIIAFSTDDIREYMEIILRSKQENPVLIDKYLEGMEIEVDALCDGDPSQGGHGGVFIPGIMEHIERTGIHSGDSIAVYPALNIDDELAEDIYQVTKKLCMALNVKGLVNIQYILYDNDIYVIEVNPRASRTVPYISKVTGVPMCELATGVSVGKTLSELGYKPGFAKIPPYVAVKVPVFSFEKLAGVDTHLGPEMKSTGEVLGLGKNLQEALYKGLIAAGYKMKKKGGVLITVRDGDKGEIVGVAEKLDKRGFTLHATRGTARFLNDKGFRVKAVDKISANTENNTAALLESGKISYIISTSEKGRDPAFDDVKIRRKACSLGVPCLTSIDTANALADSLLSDYSEINTELVDINKLRDKRMKLSFAKMHGCGNDYIYINALETDINSPESLSTLLSK

SEQ ID NO: 52009 - DNA, 2220 bp, Unknown
  Obtained from environmental sample
  misc_feature (1)..(2220): n is a, c, g, or t
atgcgagagggagacatctggcgatatctgggacgtctctctgagcggatcgcagcgcgatttaaacgcgagattgagttgctgaaaatcatcttcgccgaaaagaaagaggctaacgtccacctttactttttgaacaacagatttaagaagatcgtcaataatgggacaagcaacggcgaatacaaagtgaccgacgggaaatgggacgggttgaaaaaggcgttggagacggcaattttcgacggcggcaccgacttttcccaaatcgacttaaaaaatatcgcggggaatgagattttattcttctccgacggaatatcaacgttaagcgacgccgatttcataaaaaacgcgaaagccgaccgccctatacactgcttcgtatcatcggcgaaagccgattacagcgcaatgaagttgattgccggcaaatcaaagggcaaattcgtgaatatgaacgcgctctcttccgacaaattaaaaaatgaattgttgaacgaaacgctgcaatttttgggaacggaacacaaaaaatcgatacgcgaggtatatccgagcatcgcgacgccggttcacggcgatttttcggcggcgggcatttccgatacggcgaacgcctatttgacattgctcttcgggttcggcaacaaggttgaaaagcggatagccgtaaaattggacgcgaaaagcgccggcacccaggcggacgtgcataaattatgggcgcagaagaagattacggagctggatttaaattatgagaaaaaccgcgtcgaattgacggagctcggacagcaattcggcattgtcacgcgaaatacgtcgctcattgtgcttgagaccgttgacgactatatactctataaaattgagccgcccgcctccgaaaccgaattgtacgcggaatatcagcgcaaactaaaaagacaggaaacgcggcaacgcgatacggaacgcaatatgctcaacgatgcggcggcggcagccgataatataagaagttggtggaataagacgcttaaaaaatctaacactgccgcagatcgatttgataaccataacgatacgcggggcgactacggacgcgttaccggcatcagggcattctttgacgggattctcggcggattgtatgatttctttgtagatatatttatgccgacgccggagatcgccgtagattttttcgaaaaacttccagaggagcgcgtcgcgcggcttgtcaaggcggaggaaatagacgttacgcttgagaggaagcttgaggaagaggattcggaaaaagattttgatcaacctactattaccattaaaccgattaaacaagataacgattatttgaaaaaattgacagggaaaacatcggaagattatcaactatacttgaagataaggacagattacgcctattccccgaccttttattttgacatggcggattggttttatacacacggcgacaaggaaaccgctctccgcgtgctcacctctatcgccgagttagaatttgaagacgcctcgctctatcggttgctcggctatcggtttaaagaatacggcgagtacgcgctcgaaaagtttgtctgccgaaaagtgatccagtggcggcctatggagccgcagagctaccgcgactacgccctcgccctcgccgataacggcgaaacgcaggcggcgctcgaccatctttacgccatgctcgcgaaaacatatccggcaaacatcagaaaccgcacccgcggaatagaagaagtcgccgtcactgagataaatcatctcatagccaaagacacggccctaaacaagtcaaacatcgacaaaaacatgataatcgacattcccgtagatatccgcgtggtgataaactggaatatgaacagcgccgacatcaacctgcgcataaaagacccgaacaatgaagagtgctcccgcgaccgccgagaaacaagcaccggcggacgactcagcgccgacattaaagacggctacggcccggaacaattcctcttgaaaaaagcggcaaagggaaaataccgcgtctacgtcaactattacggcgacaaccaggtcatcgacgcgggaccgtcaaccgtcatggcggaaatctacaccaaatacgccgacgctacggaaagccgtcaggtcgtttgcgtacagatgtcgaacgcgaagaggcgggacgggaactttgtggagatagcggagtttgagttttga

SEQ ID NO: 52010 - protein, 739 aa, Unknown
  Obtained from environmental sample
  misc_feature (1)..(739): Xaa is any amino acid
MREGDIWRYLGRLSERIAARFKREIELLKIIFAEKKEANVHLYFLNNRFKKIVNNGTSNGEYKVTDGKWDGLKKALETAIFDGGTDFSQIDLKNIAGNEILFFSDGISTLSDADFIKNAKADRPIHCFVSSAKADYSAMKLIAGKSKGKFVNMNALSSDKLKNELLNETLQFLGTEHKKSIREVYPSIATPVHGDFSAAGISDTANAYLTLLFGFGNKVEKRIAVKLDAKSAGTQADVHKLWAQKKITELDLNYEKNRVELTELGQQFGIVTRNTSLIVLETVDDYILYKIEPPASETELYAEYQRKLKRQETRQRDTERNMLNDAAAAADNIRSWWNKTLKKSNTAADRFDNHNDTRGDYGRVTGIRAFFDGILGGLYDFFVDIFMPTPEIAVDFFEKLPEERVARLVKAEEIDVTLERKLEEEDSEKDFDQPTITIKPIKQDNDYLKKLTGKTSEDYQLYLKIRTDYAYSPTFYFDMADWFYTHGDKETALRVLTSIAELEFEDASLYRLLGYRFKEYGEYALEKFVCRKVIQWRPMEPQSYRDYALALADNGETQAALDHLYAMLAKTYPANIRNRTRGIEEVAVTEINHLIAKDTALNKSNIDKNMIIDIPVDIRVVINWNMNSADINLRIKDPNNEECSRDRRETSTGGRLSADIKDGYGPEQFLLKKAAKGKYRVYVNYYGDNQVIDAGPSTVMAEIYTKYADATESRQVVCVQMSNAKRRDGNFVEIAEFEF

SEQ ID NO: 52011 - DNA, 1755 bp, Unknown
  Obtained from environmental sample
  misc_feature (1)..(1755): n is a, c, g, or t
gtggacgacgggaagtcccataaagtggctaacatagtcggccagtgcatgaagtaccatccgcacggcgacgcttctatcggcgacgcgcttgtcgctattgcgaataaagacttgtttattgacaaacaaggaaatttcggcaacatattcaccggcgacccggcttccgccgtccgttacatagagtgccgcttgtcgccgcttgccgtggaatcgctctttaatcctgagatcaccgaatatgtggactcttacgacgggcgcaaccgcgaaccggtcacgctgccggcgaagctgcccgtcctcttggcgctcggcgcggaggggatagcggtggggatgtccaccaaaattcttccccacaatctaatcgaacttctcgaagcgcaagtagcctacctgcgcggcgatcagcatttggtctttccggatttccctaccggcggtctagccgacgtctccgagtacaacgacggcaacggcaaggtgctgcttcgcgcaaaactcgacacaagcgatccaaagcgcattgtcatacgggaattgccgttcggttctacaaccgagtccataatggcctccatagagaacgccgcccgtaagggtaaactgaagatcgccggcatcagcgactacacggcggagaacgtggagatagaggtgcggctggcgcgcggaatccacacgcaagacaccgtagacgccctctacgcctttacggattgcgaatcgtcggtctccgtaaacatgatggtaatcagcgacgaaaaacccgtggtaatgtccgtgactgaggtcatcaaacgaaattcggacaggcttgtggagatactgaccgccgaactgaaactcgaagagcgtaaactgaaagacaagctccacgcaaaaacgcttgagcagatattcatagagaaccgcgtatacaagaagattgaggcgatgaagaccgccgagtcggtagtgcaagcggtctttaacggattggcgccgttccagcgggagatcaaacgcgaggtgaccaacgaggatgtcgatacgttactgaaaattcccatcaggcgcatatccctctatgacatcaatagagcgaaaaaagagatggaggacatcaaaaaccgtcttaaagagatcaagcggcacttgggcgcgattgttgattacacggtagatttcttgggcaagataatcaataaatacaaaccgatgtacaaacgcaagacggagctggtctcgttcaaaaaggtggatgtgcgagaggccgcccagcgcaacctgaaactgcgctacgacaaagacaccgggtatctcggctacgaggtcaacggcaacctgctcttcgacgtgtcgccatacgacagagtcttggtgataaggaaaacaggcgcgttctcggtgataggcgttcccgaaaaactattcgttgacaaagggatgctgcactgcggattcgtggacaaagaccttgtcttcaccgcgatttatagggacgaggagacgaaattcccatacatcaagcgcttcaagatagagcaattccaattgaacaagggctacgctatagtgccggaaaattgcacattgcttagactgacgacagacccaaatgccgtggtaacaatagaatacaaaccaaaaccacgtctgaaggtactggaagaggacttcaaagtaaagaacttcttggtgaaaaacgctaaggccggggggattaggctggcgaataaagagatgaagtcggttaggatggggtga

SEQ ID NO: 52012 - protein, 584 aa, Unknown
  Obtained from environmental sample
  DOMAIN (1)...(401): DNA gyrase/topoisomerase IV, subunit A
  misc_feature (1)..(584): Xaa is any amino acid
MDDGKSHKVANIVGQCMKYHPHGDASIGDALVAIANKDLFIDKQGNFGNIFTGDPASAVRYIECRLSPLAVESLFNPEITEYVDSYDGRNREPVTLPAKLPVLLALGAEGIAVGMSTKILPHNLIELLEAQVAYLRGDQHLVFPDFPTGGLADVSEYNDGNGKVLLRAKLDTSDPKRIVIRELPFGSTTESIMASIENAARKGKLKIAGISDYTAENVEIEVRLARGIHTQDTVDALYAFTDCESSVSVNMMVISDEKPVVMSVTEVIKRNSDRLVEILTAELKLEERKLKDKLHAKTLEQIFIENRVYKKIEAMKTAESVVQAVFNGLAPFQREIKREVTNEDVDTLLKIPIRRISLYDINRAKKEMEDIKNRLKEIKRHLGAIVDYTVDFLGKIINKYKPMYKRKTELVSFKKVDVREAAQRNLKLRYDKDTGYLGYEVNGNLLFDVSPYDRVLVIRKTGAFSVIGVPEKLFVDKGMLHCGFVDKDLVFTAIYRDEETKFPYIKRFKIEQFQLNKGYAIVPENCTLLRLTTDPNAVVTIEYKPKPRLKVLEEDFKVKNFLVKNAKAGGIRLANKEMKSVRMG

SEQ ID NO: 52013 - DNA, 324 bp, Unknown
  Obtained from environmental sample
  misc_feature (1)..(324): n is a, c, g, or t
ttggcgcggaaatttccagggtgttttcccatgctggaaatcatcccgacaatctgcgccgccacaaaagaaaggcaggacagcctgcgggagcttttagataaaacagacgcggtagttattgccggaggaaaagattccgccaacacccgccgcctgctggctatcgcccaagtgtctggcaaaccctgcgccattgtggaaacagccggggatattccacctgattttttcaagtttgaaaccgtgggccttgctgccggggcttctacgccggatacggtaattgacgagattgaacaaacaatgagcaatgagcaatga

SEQ ID NO: 52014 - protein, 107 aa, Unknown
  Obtained from environmental sample
  DOMAIN (1)...(106): LytB protein
  misc_feature (1)..(107): Xaa is any amino acid
MARKFPGCFPMLEIIPTICAATKERQDSLRELLDKTDAVVIAGGKDSANTRRLLAIAQVSGKPCAIVETAGDIPPDFFKFETVGLAAGASTPDTVIDEIEQTMSNEQ

SEQ ID NO: 52015 - DNA, 378 bp, Unknown
  Obtained from environmental sample
  misc_feature (1)..(378): n is a, c, g, or t
atgaattacgataaattaaccattaaagcgcaggaagcgataaatgacgcttccgcgatagcgcagaaagaagatcactcccagcttgaaaccgaacacctgcttctggccctgctaaagcagcaggacggaatcgtggcgccgcttgtcgaaaggattggtacggatgttggccgccttaccgccgatgtcgagaccctgctgaagcagactcccaaagccttcggcgatgcggtccagctgcatttctcctcggcggcatcgaaaatactcgccaaggcggaagccgaagccgccgcgctgaaagacgaatttgtatccaccgagcatatacttatcgcaatcagcgcgggcgaaggaaagcggcggagctgttaa

SEQ ID NO: 52016 - protein, 125 aa, Unknown
  Obtained from environmental sample
  DOMAIN (17)...(69): Clp amino terminal domain
  misc_feature (1)..(125): Xaa is any amino acid
MNYDKLTIKAQEAINDASAIAQKEDHSQLETEHLLLALLKQQDGIVAPLVERIGTDVGRLTADVETLLKQTPKAFGDAVQLHFSSAASKILAKAEAEAAALKDEFVSTEHILIAISAGEGKRRSC

SEQ ID NO: 52017 - DNA, 552 bp, Unknown
  Obtained from environmental sample
  misc_feature (1)..(552): n is a, c, g, or t
atggtatcctcaaccgagggctccgccgtgtacacttgctggaagcggcgttcaagggccgcgtctttttcaatgtgtttgcggtactcgtccagggtggtggcgcctatgcagcgcagttcgccgcgcgccagagccggttttaacaagttggaagcgtctgtcgcgccttccgcggcgcccgccccgaccagggtatgcagttcgtcaataaagagaattatctttccttcggcggcctgtacttcgtgtatcagcgctttcaggcgttcctcaaattcgccgcggaactttgtcccggcgacaagctggcccaaatccagggcgaggagttttttgtctttgaggccctcgggcacgtctccggcgactatgcgacgggcaagcccttcaacaatggcggtcttgccaacgcccggttcgcctatcagtatggggttgttttttgtgcggcgggacagcacctgcatacaacggcgtatttcctcgtcacgccctatgaccgggtctattttttcctgcctcgccagcgcggttaggtctctgcaatag

SEQ ID NO: 52018 - protein, 183 aa, Unknown
  Obtained from environmental sample
  misc_feature (1)..(183): Xaa is any amino acid
MVSSTEGSAVYTCWKRRSRAASFSMCLRYSSRVVAPMQRSSPRARAGFNKLEASVAPSAAPAPTRVCSSSIKRIIFPSAACTSCISAFRRSSNSPRNFVPATSWPKSRARSFLSLRPSGTSPATMRRASPSTMAVLPTPGSPISMGLFFVRRDSTCIQRRISSSRPMTGSIFSCLASAVRSLQ

SEQ ID NO: 52019 - DNA, 342 bp, Unknown
  Obtained from environmental sample
  misc_feature (1)..(342): n is a, c, g, or t
atgcagttcgtcaataaagagaattatctttccttcggcggcctgtacttcgtgtatcagcgctttcaggcgttcctcaaattcgccgcggaactttgtcccggcgacaagctggcccaaatccagggcgaggagttttttgtctttgaggccctcgggcacgtctccggcgactatgcgacgggcaagcccttcaacaatggcggtcttgccaacgcccggttcgcctatcagtatggggttgttttttgtgcggcgggacagcacctgcatacaacggcgtatttcctcgtcacgccctatgaccgggtctattttttcctgcctcgccagcgcggttag

SEQ ID NO: 52020 - protein, 113 aa, Unknown
  Obtained from environmental sample
  misc_feature (1)..(113): Xaa is any amino acid
MQFVNKENYLSFGGLYFVYQRFQAFLKFAAELCPGDKLAQIQGEEFFVFEALGHVSGDYATGKPFNNGGLANARFAYQYGVVFCAAGQHLHTTAYFLVTPYDRVYFFLPRQRG

SEQ ID NO: 52021 - DNA, 1293 bp, Unknown
  Obtained from environmental sample
  misc_feature (1)..(1293): n is a, c, g, or t
atggcgcaccgccttgcgaaattggaccccgcttgcggcggtaaagacgcgccgctcgtcaccacttttcacgccttcgccttgcgtgtgctgcaggagcggtatgagggtcggcgcaatttcaatcggataggtttcaatgacggcaatatattactgcttgacggcaaacggcgccttgagttgatcgcccaaatcagcaacacggcaatgcgtaaaacgctgggtatgggcataatcgaacttagtagcgcactcgaactattattgagcttccccgaaaaagcctccaaaagatggaatgacgaggagttcagcctattggcaaaaatcgagcacgacttttacaacctgcgaaaagcgaacggcctctgggactttgccgatttaatctgcggcggacttgagctgttcgccaagtatccggacatcgctgatgattggggcagacgctacgatgttgttttagtcgacgaattccaagacacaaacccaatgcaaattgatttgcttgacatcctattgcgattcggcgcgagtctatacgcggtcggcgacgacgaccaagcgatatacggttttagaggcgcggacatcagacccatacggaacttcacagcgcgcttcaaagacgcggcaattgtcaaactgcaaatcaattaccgcagcgtaaacgcgatactcgattgcgccaacagactgtgggccgcaaaaccggcggagtacaggaagacgctggtaagcggtctgaaaccccagccgaccggctgccgcaaacccaagacgatgcgcttcggaacgcaagccaaggcgcttgaatggatattgggcagagcgcgcttcattcagcgccgagagaatatacctatagggtctatggccatactctttcgtatcaacgacacgctggcgtccgcggccgatcattacaagagtatgggcttgacagatgataaaatcccgcaactgctgaccgtccacgcgagcaagggcttagagtatcccgcggtcttcttgtgcgacctggaggagggcgtgttcccgcactatagattgcgtaaagagaagcggatccgtacgtggtcggagctgctgaaggcgatagtcaaacccaagccgaaaccggacattgacatatcgcgagattgcgacattgacgaggagttgcgcttattctacgtcggcgtgacgcgggcgcagcgctacctgtttttcgttacggtgtctaggaagcccttttacggcagggagatgaggtttaaggcttcgcggtttttggggttggtgaagtag

SEQ ID NO: 52022 - protein, 430 aa, Unknown
  Obtained from environmental sample
  DOMAIN (1)...(418): UvrD/REP helicase
  misc_feature (1)..(430): Xaa is any amino acid
MAHRLAKLDPACGGKDAPLVTTFHAFALRVLQERYEGRRNFNRIGFNDGNILLLDGKRRLELIAQISNTAMRKTLGMGIIELSSALELLLSFPEKASKRWNDEEFSLLAKIEHDFYNLRKANGLWDFADLICGGLELFAKYPDIADDWGRRYDVVLVDEFQDTNPMQIDLLDILLRFGASLYAVGDDDQAIYGFRGADIRPIRNFTARFKDAAIVKLQINYRSVNAILDCANRLWAAKPAEYRKTLVSGLKPQPTGCRKPKTMRFGTQAKALEWILGRARFIQRRENIPIGSMAILFRINDTLASAADHYKSMGLTDDKIPQLLTVHASKGLEYPAVFLCDLEEGVFPHYRLRKEKRIRTWSELLKAIVKPKPKPDIDISRDCDIDEELRLFYVGVTRAQRYLFFVTVSRKPFYGREMRFKASRFLGLVK

SEQ ID NO: 52023 - DNA, 684 bp, Unknown
  Obtained from environmental sample
  misc_feature (1)..(684): n is a, c, g, or t
atgcacgtgttattgctttgcgacgattattggcatccgggacagataccaattgacggcgttgccccgcttgccgctcagggctttcaattcgacacaatcaccaacgcgaaagagttcaagcccgatatgctttcaaactaccctgtcgtcttgatggcaaaaagcgatcaagtcagccgtgaagacgaaaagacaaaatggaaaaccgaggcagtacagcaagcatttatcgcgtatgtggagaatggtggcggactcttggttgttcatagcggcactgtgacgggtaaggaaacagaagccctgaaccagttgattggctgccattttatcactcatcctaacgcctgtcctgtaaccgtccagcccattaagaggcatcccgttaccgagggtgtaggggttttttgcgaaaccgacgagcactaccgccttgaaattacggcacaggacgcggatgttataatagcgtcttattctccgccccagggggaggagggtaaatatcaggaagacccatatcacaacacccaggcgtggatctgccctgccgggtttgtgcgcagccagggcaaagggcgggtctgcgccctgacgccggggcacctgttgcctgtatggctcaacccccaataccaacgcacccttgccaacgcattgaaatggtgcggcggtgaataa

SEQ ID NO: 52024 - protein, 227 aa, Unknown
  Obtained from environmental sample
  misc_feature (1)..(227): Xaa is any amino acid
MHVLLLCDDYWHPGQIPIDGVAPLAAQGFQFDTITNAKEFKPDMLSNYPVVLMAKSDQVSREDEKTKWKTEAVQQAFIAYVENGGGLLVVHSGTVTGKETEALNQLIGCHFITHPNACPVTVQPIKRHPVTEGVGVFCETDEHYRLEITAQDADVIIASYSPPQGEEGKYQEDPYHNTQAWICPAGFVRSQGKGRVCALTPGHLLPVWLNPQYQRTLANALKWCGGE

SEQ ID NO: 52025 - DNA, 555 bp, Unknown
  Obtained from environmental sample
  misc_feature (1)..(555): n is a, c, g, or t
atgggcagcatagacagcataagcgctgtaatagatcaattactagacataacaaattccctggatatagtaatttcaaacgccgccttaatggaccctatgcattgcaatctgtacgagcctcctatggatttagaagcggtgtggaactcattccgggtaaacgccctgggaccggtatgctttgtagaaaaacttctgccgcttttagatcggggtaaaatgaaacggctctgctttgtatcgagcgaggtatcctgcattgtcttgatgatacatcggggggacagtccttacccctatcctatgagcaaggcatccctcaacatgggggtacgcatgctgcacaatcaattatatccccagtcttacacattccgcctgttccatcccggctggatgaagcggcgtatgcaggtcggctctctttctgaaggggcgctgtatgatcctgattatatcggcgatatagcggcaaaatattttgaaacgccattacgcgatgaacaccgtcttgtgatggtagattattccggttatgaatggacgtattga

SEQ ID NO: 52026 - protein, 184 aa, Unknown
  Obtained from environmental sample
  misc_feature (1)..(184): Xaa is any amino acid
MGSIDSISAVIDQLLDITNSLDIVISNAALMDPMHCNLYEPPMDLEAVWNSFRVNALGPVCFVEKLLPLLDRGKMKRLCFVSSEVSCIVLMIHRGDSPYPYPMSKASLNMGVRMLHNQLYPQSYTFRLFHPGWMKRRMQVGSLSEGALYDPDYIGDIAAKYFETPLRDEHRLVMVDYSGYEWTY

SEQ ID NO: 52027 - DNA, 786 bp, Unknown
  Obtained from environmental sample
  misc_feature (1)..(786): n is a, c, g, or t
atgacagatcggcacgaggcatttgaaattgagcagcagttcttttactcaggcgacaagctggaagtcagttttgacgttaaaaacacaggtgatgcagccggggccgaaatcgcccaggtatacgttgcgccaaagaatacggcaattatgcgggctttaaaggaaattaagggctttgagaaagtttttctgcaaaagggcgaaagccggactgtgaaaatttccctggatacccgttcattctcttactacaacgttcctaaaggaacctgggccatcgaaggcggcgtttatgagattctcgcaggcgcttcaagccgcgacatttctctgcggggcgaagtccaggtggcaggcgatgggtatgaaacgcttttgaaagatcagcgcaagaattcgcctgaatactttaacctgagcgcgaaaggtttaaaagttagcgacgcgtcttttgaagccttgtacgggcaaaagctgccgtcaagcaaacgtgaagcggggcaaatcgatctcaacagtacagtggatgatatcaaacatacagagttaggtaaaaaattagaagcctacgttcgtgaggaaatgtcgaaggcgttcactggagataatcgtgacgatctccgcgttcagattgaaaggaggcttactgaattgcccttgcgcacctttgcaaggtttggcaaaggtaaaaggatgaccccttccatgatcgaagctctggttgatgtgctgaatggtaagccttgttccgatccgaaactgcccggattttttgatagctga

SEQ ID NO: 52028 - protein, 261 aa, Unknown
  Obtained from environmental sample
  misc_feature (1)..(261): Xaa is any amino acid
MTDRHEAFEIEQQFFYSGDKLEVSFDVKNTGDAAGAEIAQVYVAPKNTAIMRALKEIKGFEKVFLQKGESRTVKISLDTRSFSYYNVPKGTWAIEGGVYEILAGASSRDISLRGEVQVAGDGYETLLKDQRKNSPEYFNLSAKGLKVSDASFEALYGQKLPSSKREAGQIDLNSTVDDIKHTELGKKLEAYVREEMSKAFTGDNRDDLRVQIERRLTELPLRTFARFGKGKRMTPSMIEALVDVLNGKPCSDPKLPGFFDS

SEQ ID NO: 52029 - DNA, 732 bp, Unknown
  Obtained from environmental sample
  misc_feature (1)..(732): n is a, c, g, or t
ttgacaatgccaaacgtgataataacaggcgcggacagaggcttagggctgtcgctgtgcaaagaatatttaaacagaggatggatagtatttgccggtaagtatttagatgactattccttattggaagatgagaataaaaaaaatccaaatctgcatatcgtcaaactggatataggttgtatagacagcataaccgctgcaaaagagcaattactcaagataacagattcccttgatatggttatttccaatgcggctttaatgggtcccgtccattgcaatctgtatgaacctccaatggatctggaagcggtatggaactcattacgaatcaatgcactgggaccaatgtaccttgtagaaaaacttttaccgcttttagatcggagtaaaatgaaacggctctgctttgtatcaagcgaagtgtcatgtattgtgcttatgaaacatcggggcgacagcccctttccctatcctatgagcaaggcagctctcaacatgggagtacgcatactacacnaatcattatatcctcaaaggcttcagtttcccgggtgttcccatcccggctggatgaagcagcgcatgcatgacggctcgctatccgaagaagcgctgtacgatccggattatatcggcgatataggggcaaaatattttgagacgccgctccacgatgagcatcgtcttgtaatggtggattattccggctatgaatggacgtattga

SEQ ID NO: 52030 - protein, 243 aa, Unknown
  Obtained from environmental sample
  DOMAIN (4)...(178): short chain dehydrogenase
  misc_feature (1)..(243): Xaa is any amino acid
MTMPNVIITGADRGLGLSLCKEYLNRGWIVFAGKYLDDYSLLEDENKKNPNLHIVKLDIGCIDSITAAKEQLLKITDSLDMVISNAALMGPVHCNLYEPPMDLEAVWNSLRINALGPMYLVEKLLPLLDRSKMKRLCFVSSEVSCIVLMKHRGDSPFPYPMSKAALNMGVRILHXSLYPQRLQFPGCSHPGWMKQRMHDGSLSEEALYDPDYIGDIGAKYFETPLHDEHRLVMVDYSGYEWTY

SEQ ID NO: 52031 - DNA, 828 bp, Unknown
  Obtained from environmental sample
  misc_feature (1)..(828): n is a, c, g, or t
ttgatttgccgttacagggctaaggacgctcgttcatcggtgctgcgggaaacgctgatgccgtggctcgataataccgttggaaaaaatcgctatacataccttgcccatgaaagcatggttacgctttttaattcttcggaaatttggattggcggtttgggggacagggagcaagcggacaagattttagggcatgagtacaacactatttactttaacgaaatttcacagttgagctatgcagctgttactactgcttactctcggcttgctatgagaattaaaggctgtaggaatttgttttactacgactgcaatccgggttcgccgcttcattgggcatataaaatatttgttcttaaaaagacattcctttccggtgaacagttagagaaaccagaactatatcaatcaatgctgcttaatcctgaagataacagagacaacctgccggaagattatataacagatattctcgatgttttgccggaaaaacaaaaggcaaggtttcgggacggcttgtgggtaaaggccgagggcgttatctatgacaagtttgacgagtcaatgattttgcgttcatccgaactgcctgaacgttttgaccgctacgctgccgggcaggattttggattgaatattactttcgtaaaaatcggctggcttggcgatgcggtatacatcatcggcgattatggggctttcaacatgactacccaaagtttcaacgaagaattgggcgcaaggggtttgttggattgtcctgacgggatgggtatgcctgtttattgcgatccggctggcgggaacggatacaggaaataa

SEQ ID NO: 52032 - protein, 275 aa, Unknown
  Obtained from environmental sample
  misc_feature (1)..(275): Xaa is any amino acid
MICRYRAKDARSSVLRETLMPWLDNTVGKNRYTYLAHESMVTLFNSSEIWIGGLGDREQADKILGHEYNTIYFNEISQLSYAAVTTAYSRLAMRIKGCRNLFYYDCNPGSPLHWAYKIFVLKKTFLSGEQLEKPELYQSMLLNPEDNRDNLPEDYITDILDVLPEKQKARFRDGLWVKAEGVIYDKFDESMILRSSELPERFDRYAAGQDFGLNITFVKIGWLGDAVYIIGDYGAFNMTTQSFNEELGARGLLDCPDGMGMPVYCDPAGGNGYRK

SEQ ID NO: 52033 - DNA, 591 bp, Unknown
  Obtained from environmental sample
  misc_feature (1)..(591): n is a, c, g, or t
gtgatgctgcagaaattacaatcccgtttttgggacggctggctttcttattccttcagttgggcaaaataccgcgaccccaacacgggagattccaacctgggcatttcgggcggaacacaggggaatgactggtactttcccgaataccaccgttttcacaacctgaacctcgtctttaatgtcaaacccgcgccccactttaatatttacacccgttttggcctggcatcgggcgcccagcttccgaggcgcgtcggcgaccggcccataagttatccggtatatgtcagcgatggctattttatcgaaagatacgaatggccttccgtacgggatgaaaataaccgtagtacgccgtcaatgcccatggacattaaattttccatctttggaaaaaatgataaagggatgggaaaaacccgttatgagatgtatttcgccatagaaaataccctctctctgctgtatacctcgcggggaaacacccgtttcaatccgaataccggtgaaatagataacggcagcgaatccgcgtcgtatgaaatgcccattccgataccgtcggttgggtttaagttcagttactaa

SEQ ID NO: 52034 - protein, 196 aa, Unknown
  Obtained from environmental sample
  misc_feature (1)..(196): Xaa is any amino acid
MMLQKLQSRFWDGWLSYSFSWAKYRDPNTGDSNLGISGGTQGNDWYFPEYHRFHNLNLVFNVKPAPHFNIYTRFGLASGAQLPRRVGDRPISYPVYVSDGYFIERYEWPSVRDENNRSTPSMPMDIKFSIFGKNDKGMGKTRYEMYFAIENTLSLLYTSRGNTRFNPNTGEIDNGSESASYEMPIPIPSVGFKFSY

SEQ ID NO: 52035 - DNA, 900 bp, Unknown
  Obtained from environmental sample
  misc_feature (1)..(900): n is a, c, g, or t
gtgtacactgctcagtatctttcctccgttgggcccgatgcgttgattgtgcaggactttggcgttctggcaatggcgcgctcggaattcccccaactgaaactgcacgcttctacccagatgaacattgcttccggcaggggggccaatatgctttcccgttacggcgtttcacgggtagtgctggcgcgggaactcggtctggaagaattgcgctcgatacgctcggaaaccaacatggaactggaaattttcgtgcatggcgcgttatgtgtcagcgtttccggcctctgcctgttttcaggctacctcggcggcaagtccgccaaccggggaatgtgcacccaggcctgccgccgcctgtaccaccgcggggaacacggcgattcaaccggggacgggtattactttagccccgccgacttgcagcttttggagcatctgcccgctcttgccgcggcggggataaacgccctaaaaatcgaaggacgaatgaaaagcgccgattatgtgggggcggtagtttccgcctaccgtatggttctggacgcgattgagcagggcgatgaagaaaaaatccaatgcggtattgccgaagggcagaagattctccggggtgattttgcccgcggcaaaactgcctattttttcaacgcggcgcatacggacgacggcgttaattggctgaaccccgcccaggacggcggcacgggtatcagtttgggggtgattgaaaaaatacagggtaaggccggcgaacggcgggccctggtttccggcggtgattttctgccggcgctctgcctgccgcaggggattcgatacggctgcaccgcagagatgactctgaacgggtatcgcacaaactgcaatttgccgaagcagcggcggatggtttaa

SEQ ID NO: 52036 - protein, 299 aa, Unknown
  Obtained from environmental sample
  DOMAIN (4)...(222): Peptidase family U32
  misc_feature (1)..(299): Xaa is any amino acid
MYTAQYLSSVGPDALIVQDFGVLAMARSEFPQLKLHASTQMNIASGRGANMLSRYGVSRVVLARELGLEELRSIRSETNMELEIFVHGALCVSVSGLCLFSGYLGGKSANRGMCTQACRRLYHRGEHGDSTGDGYYFSPADLQLLEHLPALAAAGINALKIEGRMKSADYVGAVVSAYRMVLDAIEQGDEEKIQCGIAEGQKILRGDFARGKTAYFFNAAHTDDGVNWLNPAQDGGTGISLGVIEKIQGKAGERRALVSGGDFLPALCLPQGIRYGCTAEMTLNGYRTNCNLPKQRRMV

SEQ ID NO: 52037 - DNA, 804 bp, Unknown
  Obtained from environmental sample
  misc_feature (1)..(804): n is a, c, g, or t
gtgtaccttatccaaaccaaggcaatgtcaaaacgccataagccggtaattgcccctaacgcggggatgggagggcgggggccgggacatgagaaagcgcctcagccgcagtttccggctgctgctccccgaaaaaccgcaaaaaataaatccgccgtttttcccgatggtttgtatgtcgcgacttcccgtctcaatgacctgtacattatacagtcatcccgtccggcgcgggtgatgctcaccttgacccgcaaaaccattgattatcttctggatgaggacaagccgccgctgccctttaagcccgccgacattattctgatactgaaaccttttttcccgcaagccgccgcgcaggagcttgccgatattatcccttccctggttgaccggggctaccgtcagtttatggtcaataacctggggcatttttccctgttccgcgacatacgctcagaggttcaactgattgccggcccctggctgtatacctttaacgcgtgggcgctttcgtatgtgttgtcgctgggagtagacggctttgtctcgccgctggaaaataaccggcagaattgggaacgaacgattgacacgggaaaccgtcaaatgcggtctttggcttttgtgccggtttttgtctggccccccttgtttaccattcgcgctaatttgggaactttatatgatttcaatacgttttcggataaccggggcgaaaatttttcactggtctgcggccccgaaggctcaaccgtttccccgagaaaccattttccattattgacaaaatccctttcctga

SEQ ID NO: 52038 - protein, 267 aa, Unknown
  Obtained from environmental sample
  misc_feature (1)..(267): Xaa is any amino acid
MYLIQTKAMSKRHKPVIAPNAGMGGRGPGHEKAPQPQFPAAAPRKTAKNKSAVFPDGLYVATSRLNDLYIIQSSRPARVMLTLTRKTIDYLLDEDKPPLPFKPADIILILKPFFPQAAAQELADIIPSLVDRGYRQFMVNNLGHFSLFRDIRSEVQLIAGPWLYTFNAWALSYVLSLGVDGFVSPLENNRQNWERTIDTGNRQMRSLAFVPVFVWPPLFTIRANLGTLYDFNTFSDNRGENFSLVCGPEGSTVSPRNHFPLLTKSLS

SEQ ID NO: 52039 - DNA, 1584 bp, Unknown
  Obtained from environmental sample
  misc_feature (1)..(1584): n is a, c, g, or t
ttgctttttncctatttttcccctcccccacccttnngggnncaaaattttnntttcccccccccccccccccccccccccccccattctaactgcttatatttcagacacttacgcacgttgtctgaaccccgattctcaggattcgcccgatttaccagaacagcaagaacgctcatctacagatgctttaccaagtgtctgttatgcttacttcacatttattcgcataaacgagcgtttcgggttgaactatcggggaaatcctttaatcgggggcatcggggttctgacaatttttcaacaaaggagttcactatgaaaacaaatagccgttttcttttcgcggcaagccttgggcttgctttggctttaatctttggctgctctgacgacagaaacgatggcggtaacagaaacaatggtggtttcaacgcaaccaatttgtgcggaggcgtgagctatgacccgagcgtttatcgctgcgaaatgggagaactcatcggcaaatgcagaggtaaggattattatgttgcttatgagcagtgcgttgacggggttgtggtgaatgtggtgaaatctagtagtagtttgggtatagtgtcaagcagtagcaacacaacacagagcagttcgtccgttgggttaggttcaagttctcaacaacaaagcagttcaagcataatattgagcagtagcagcacaacgcagaatagctcctcatccatttatagttccagtttctttgcaagttcaagctcttcggttcctttgtcttcaagttcaatgccaagcagttcgtctgttgcttctagcagttcttttgttctcagttccagttctgttgcgagttcaagctctgcggtggcttcgtcttcaagctcaaagccgagcagttcgtcagttgcttctagcagttcttttgttctcagttccagttccgttgctggttcaagctctgcggtggcttcgtcatcaagcgttgtgccaagtagttcaagcgttggttgcacagcagcaaataacacttcaacgcaatattgttcaaatggcactatgaaaaattatggttctttgacataccaagggcaaacttataagactgttgtaataggcacgcaaacttggatggcggagaaccttaactacaataccaataccactggtagcatatgttatgacaatagcgaagctaactgcacgacttacggcaggttgtataattgggtaacggcaatggctgtatgcccctctgggtggcatttgcctagcgttgctgagtggagtgcattgatgacagcagttggcaatttatcaactgctggaaccaaactgaaagcggattctcctttgtggaatgaaaatggcaaaggcacggacaattacggcttttccgccctgccgggtggctacggcgataccagtggcagtttcgccgccgtcggcaacgacggcggctggtggagtgctagtgagtacgatagccgcaacgcttaccactggcacatggtctccggcaacggcacaagctactactacctcaataagagctacttgtggagtgttcgttgtctccaagactaa

SEQ ID NO: 52040 - protein, 527 aa, Unknown
  Obtained from environmental sample
  misc_feature (1)..(527): Xaa is any amino acid
MLFXYFSPPPPXXXQNFXFPPPPPPPPPHSNCLYFRHLRTLSEPRFSGFARFTRTARTLIYRCFTKCLLCLLHIYSHKRAFRVELSGKSFNRGHRGSDNFSTKEFTMKTNSRFLFAASLGLALALIFGCSDDRNDGGNRNNGGFNATNLCGGVSYDPSVYRCEMGELIGKCRGKDYYVAYEQCVDGVVVNVVKSSSSLGIVSSSSNTTQSSSSVGLGSSSQQQSSSSIILSSSSTTQNSSSSIYSSSFFASSSSSVPLSSSSMPSSSSVASSSSFVLSSSSVASSSSAVASSSSSKPSSSSVASSSSFVLSSSSVAGSSSAVASSSSVVPSSSSVGCTAANNTSTQYCSNGTMKNYGSLTYQGQTYKTVVIGTQTWMAENLNYNTNTTGSICYDNSEANCTTYGRLYNWVTAMAVCPSGWHLPSVAEWSALMTAVGNLSTAGTKLKADSPLWNENGKGTDNYGFSALPGGYGDTSGSFAAVGNDGGWWSASEYDSRNAYHWHMVSGNGTSYYYLNKSYLWSVRCLQD

SEQ ID NO: 52041 - DNA, 843 bp, Unknown
  Obtained from environmental sample
  misc_feature (1)..(843): n is a, c, g, or t
atggcggggtgttgctcatcttttgagcatgccgtgaagtacacgaaaaaaggccgcatcacgtttaccgtctcctgggcgaggacagcggaaaacgcgctgcggctgacaatgatcgttgcggacagcggcgttggaatcaggcaggcggatctgccgaaactgttcgacgacttcacgcgccttgacgaaaagcgcaacagcgccgttgagggcacggggcttgggctgtccatagcgcgcagcctgtgccgggccatgggcggcgacatcacggcgacgagcgaatacggcaagggctctgtttttgtcgccacggcgatccaggccgtggacgactggagcccgacaggcatcgcaacggtttcggcgtcccgcgcatcgtgcgaggctgccttcagcgcgccggaggccgaggtgctgcttgttgacgatgcccccatcaacctgatggtggccgaaggcttgcttgttccctacggagtgcgcgtttttacgtgctcaaacggacgggaggccgtggagatggtgcagcagcgatcgttcgaccttgtgttcatggatcacatgatgccggaaatggacggcatggaggcgaccattgccatccgcagccttggcgggcggttcgcggagctgcccgtcgtggccttaacggccaatgtcgtatccgacatgagaaaaaaatttttggaaaacggcttcaatgacatgctcgccaaacccatagacatcggcaagctggatgccgcgctgcgcacatggattccagccgtgaaacaacgcggcgcgccctttggcagcggcacatcggaatcagacgcagagccgatccgcggctag

SEQ ID NO: 52042 - protein, 280 aa, Unknown
  Obtained from environmental sample
  DOMAIN (3)...(110): Histidine kinase-, DNA gyrase B-, and HSP90-like ATPase
  misc_feature (1)..(280): Xaa is any amino acid
MAGCCSSFEHAVKYTKKGRITFTVSWARTAENALRLTMIVADSGVGIRQADLPKLFDDFTRLDEKRNSAVEGTGLGLSIARSLCRAMGGDITATSEYGKGSVFVATAIQAVDDWSPTGIATVSASRASCEAAFSAPEAEVLLVDDAPINLMVAEGLLVPYGVRVFTCSNGREAVEMVQQRSFDLVFMDHMMPEMDGMEATIAIRSLGGRFAELPVVALTANVVSDMRKKFLENGFNDMLAKPIDIGKLDAALRTWIPAVKQRGAPFGSGTSESDAEPIRG

SEQ ID NO: 52043 - DNA, 732 bp, Unknown
  Obtained from environmental sample
  misc_feature (1)..(732): n is a, c, g, or t
atgcaaaacaggcataaaatagaaaaactgcagcaccagcagagcatttctttttcgagggaaaccatgctcgcgcaggaacatgagcgctcgcggatagcgagggaattgcatgacacggtggcgcaagaccttttgcggctttcgcttcaaacggaaataattaaaaaagaagcggtatccgaaaaacagagccaactttgcatggcagtagcggaaggccaaacggaattattaaacagaataagaaacatctgcaacgatttacttccgcctgacttccagccaagcggcattgaccatatccgcctgcccgacgctctgcggactctttgcggcgcgtttgaaaagcgcacaggcattgaatgtaacatatcgatacatgacgatgcggatttcagctttcttgacgttgatacgcagttacactgtttccgcattgttcaggaatgtcttgctaatattgaaaaacacgcggaagcaagcaatgtatctgtgcttgtccgcagtaataccgagggggaactgttgttttttgttacggataatggcaagggctttgaaaaaacggacaaggattttttccgcatgatgagggcgaaggggcatttcggcctgtggaatatgcaggaaagagccgcttccatgaacggcgttttcagcatagacagcgaagcgggggaagggacgtcaataaagttaattatatcccccccccccccccccccctaa

SEQ ID NO: 52044 - protein, 243 aa, Unknown
  Obtained from environmental sample
  DOMAIN (29)...(94): Histidine kinase
  misc_feature (1)..(243): Xaa is any amino acid
MQNRHKIEKLQHQQSISFSRETMLAQEHERSRIARELHDTVAQDLLRLSLQTEIIKKEAVSEKQSQLCMAVAEGQTELLNRIRNICNDLLPPDFQPSGIDHIRLPDALRTLCGAFEKRTGIECNISIHDDADFSFLDVDTQLHCFRIVQECLANIEKHAEASNVSVLVRSNTEGELLFFVTDNGKGFEKTDKDFFRMMRAKGHFGLWNMQERAASMNGVFSIDSEAGEGTSIKLIISPPPPPP

SEQ ID NO: 52045 - DNA, 609 bp, Unknown
  Obtained from environmental sample
  misc_feature (1)..(609): n is a, c, g, or t
gtgacacctaacgccctcgacaggctgataactctattttccaaactgccgggcatcgggaaaaaaagcgccggcagaattgcctaccacctgcttgattcaagccccgcccttgcgcaaactttggcaaaagaactctcggggcttcatcaggcgataagacgctgcagtgtctgcggcggttttaccgaagacgatccatgttctgtttgttccgacacggagagagaccattcaatcatctgcgtagttgaaagcgcgcaagatatgcgaattatcgaagactcgcatgagttccccggggtctaccacgttctcggcggattaatcgcgccgctggaaggaataagccccgcaaatctttccatagataaactaattaaccgtcttcgcgccgacgcccccaacggcgcgcgcgtaaaggaattaatcctcgcgctgaaccccacagtcgaaggagacacaacggcgctgtatcttcaaaagacgctaaaagatttccctgtggagatttcccgcctcgcctcgggaatgccagtcggggggaatattgaatacattgacaagcttacgctctcacggagttttagggggcgggtgaaggtgtga

SEQ ID NO: 52046 - protein, 202 aa, Unknown
  Obtained from environmental sample
  DOMAIN (79)...(177): Toprim domain
  misc_feature (1)..(202): Xaa is any amino acid
MTPNALDRLITLFSKLPGIGKKSAGRIAYHLLDSSPALAQTLAKELSGLHQAIRRCSVCGGFTEDDPCSVCSDTERDHSIICVVESAQDMRIIEDSHEFPGVYHVLGGLIAPLEGISPANLSIDKLINRLRADAPNGARVKELILALNPTVEGDTTALYLQKTLKDFPVEISRLASGMPVGGNIEYIDKLTLSRSFRGRVKV

SEQ ID NO: 52047 - DNA, 327 bp, Unknown
  Obtained from environmental sample
  misc_feature (1)..(327): n is a, c, g, or t
atgaatgtgaatccttttgacatattaaaaaacgctcaaaaaatccaggaacagatgagcggttttcaggaaaaactggaaggcatttctgcgacgggagcagccggcggcggtcttgtggagatcgaccttaacggaaaatttgaagttattgatgtacgcatttcccctctaacgatggaaggcggcggagatttaggaatgctgcaagatttagtaatggcagcgtttacggacggaatgacaaaggtaaaggaagcggtaaaccgtgaagccgccgccatgaccggaggcctgaacatacccggttttccgggggtcatgtga

SEQ ID NO: 52048 - protein, 108 aa, Unknown
  Obtained from environmental sample
  DOMAIN (9)...(102): Uncharacterised BCR, YbaB family COG0718
  misc_feature (1)..(108): Xaa is any amino acid
MNVNPFDILKNAQKIQEQMSGFQEKLEGISATGAAGGGLVEIDLNGKFEVIDVRISPLTMEGGGDLGMLQDLVMAAFTDGMTKVKEAVNREAAAMTGGLNIPGFPGVM

SEQ ID NO: 52049 - DNA, 1056 bp, Unknown
  Obtained from environmental sample
  misc_feature (1)..(1056): n is a, c, g, or t
atgcttaccaatcaggcttttaacgctctcctaaaaaccatagaagagccgccgccgtatatcgtttttatttttgcgacgacggaattgcacaaagtacccgcgacgataaaaagccgatgccagcaatttaatttcaggctgataccgattgagaccattcaggggatactgaaaaaaatctgcgccgaaaagggaattgcagccgaagacgacgcattgttttggatagcgagagaatcgacaggcagtatgcgcgacgccttcaccctgtttgatcaaattgcgtctttttccgcaggcagtatccgcagtgatgtaatccgcgaaaaattaggcataaccggtcttgaaaaactgaacgcccttgcggaagcctgcgccgtaaatgattcgcccgccgctttcgcgctgacggatgaaatcctcgggagcggcgtcgccattgagcagtttgtgattgaccttgcgggcttttaccgcagtttgcttttgctaaaaaacggcataacaagggaatcgcttttaggttaccgcccttccctcttttccgcaaaaacccttgaaacctacgactcgattcgtcttgaacaggcgcttgatattctgcttgactgttaccgtaacattcgctattcagtctcgccccgtttcgagcttgagaccgccgtttcaaaattaacatggttaagcaaatgggtttccccaacggaacttaaagaagctgttgacgacgcacgcaatgttttgggtatcgccggaattcatgatccgattggttccgcaaaacatactgccgcaactccaagaaacgaaactccctcggcggcaaacagcagtcatggcggcggtattgccgcacagcctcaatcgtcaggcggacgctcgctgacagacgagtttaaccgcatgattgcaaaaaaagacaaccccgccgccgcaagcgccgacgaagacgacgctccaatgtgggaatcggtgcgtaaaccggaaggcaagaacccgtccgaagttgaaaatgttcttgctatgatacccggcacggttgtcacataa

SEQ ID NO: 52050 - protein, 351 aa, Unknown
  Obtained from environmental sample
  misc_feature (1)..(351): Xaa is any amino acid
MLTNQAFNALLKTIEEPPPYIVFIFATTELHKVPATIKSRCQQFNFRLIPIETIQGILKKICAEKGIAAEDDALFWIARESTGSMRDAFTLFDQIASFSAGSIRSDVIREKLGITGLEKLNALAEACAVNDSPAAFALTDEILGSGVAIEQFVIDLAGFYRSLLLLKNGITRESLLGYRPSLFSAKTLETYDSIRLEQALDILLDCYRNIRYSVSPRFELETAVSKLTWLSKWVSPTELKEAVDDARNVLGIAGIHDPIGSAKHTAATPRNETPSAANSSHGGGIAAQPQSSGGRSLTDEFNRMIAKKDNPAAASADEDDAPMWESVRKPEGKNPSEVENVLAMIPGTVVT

SEQ ID NO: 52051 - DNA, 852 bp, Unknown
  Obtained from environmental sample
  misc_feature (1)..(852): n is a, c, g, or t
atgcaaaagcgtaaaccgatcctggtatttcaaacagactttacatataaagagggctctgtttcctctatgtacggcgtcgtaaaaactgtggatcccgatctggaaataataaacggcacacacgagatcccgcgttatgatatatggagcgcgtcttacaggctttatcagactgtgcggttttggcctgaaggaacaattttcgtttctgtggtagacccgggagtaggtactgcaagaaaagcgtgtgcggcaaggactggaagcggttacacaatcgtaacgccggataacggcacactgacgcatatttacaactctttgggtatagaagaaattcgggagattgatcaggcggtaaaccgcctaaaaggaaaagataccgagggaacttcggtgttccatgggagagacatctttggttattgcgcggcaaaactcgcaagcggcattatcagttttgaagaagtaggaccgtcatactcggcagacgagatagtccgtttccccctgcaagaagcgtcattaaaagacggagtaattgcgggtatcttcgaaatcggcgatccaaacttcggtaatttatggacgaacatccccctgtcgctttttgaaaaagcaaaatttaaatacggggatataattaaagtaaatgtaacgcatgacgatcaaactgtcatggataaagaaataaaatttgaacgatcgtttgggtatgttaagccgaaagaattggtaatctacaccaatgaactcatgtacatatcgcttgcggtctgcatgggtagcgccattgaaggatatggtctcggttatggctccagctggaaagtgaaattcacccgatga

SEQ ID NO: 52052 - protein, 283 aa, Unknown
  Obtained from environmental sample
  DOMAIN (7)...(281): Protein of unknown function DUF62
  misc_feature (1)..(283): Xaa is any amino acid
MQKRKPILVFQTDFTYKEGSVSSMYGVVKTVDPDLEIINGTHEIPRYDIWSASYRLYQTVRFWPEGTIFVSVVDPGVGTARKACAARTGSGYTIVTPDNGTLTHIYNSLGIEEIREIDQAVNRLKGKDTEGTSVFHGRDIFGYCAAKLASGIISFEEVGPSYSADEIVRFPLQEASLKDGVIAGIFEIGDPNFGNLWTNIPLSLFEKAKFKYGDIIKVNVTHDDQTVMDKEIKFERSFGYVKPKELVIYTNELMYISLAVCMGSAIEGYGLGYGSSWKVKFTR

SEQ ID NO: 52053 - DNA, 1332 bp, Unknown
  Obtained from environmental sample
  misc_feature (1)..(1332): n is a, c, g, or t
ttggtttcccacgatcgctatttcctggacgttacggtaaatgaggtctacgaagtttttcaggggaacctaaaacgttatataggcaactacagcacctacgaaaaaacccgttccgccgaacttgaaagccttgttaagcgctatgagcttcaacaggaggaaattgaaaaaaccgaagccctgattcgccgctttaggtacaaggcaaccaaggcagctttcgcgcaggaacttgtcaagcggcttgaaaaaatagagcgcattgaaatcccggaaaacctaaagaaaataaacatcagctttccgccgccgccccattcgccgcgtgtggtacttacgctggaagggctttgtaaaagctacggcgaaaggcaggttctatcatgcctcgatctaacccttgatgccggagagcggctgcttgtggcaggccccaatggcgcgggaaaaactaccttgttaagaattatcgccggaggggatacggattacgagggactggttaaatacggctcgggtatttctgtagggtatttttcgcaggacgcggcggaaaacatttcaggcagccagactatagagcagtacatagagaacgaagcgcccacatacctgattccaaaagtaaggggaatgcttggggcctttcttttccggggcgacgatgtctttaaatctctttcggtattgtcaggtggcgaaaagagccgacttgccatgctcaggatgcttctaaaacctatgaaccttttgatattggacgaaccgactaatcacctggatttgcagagcaaagacatcctgcttgattgccttaaagcttttgaagggacaataatcttcgtttcccacgatcggggttttatggaagccctgtcaacaaagacgctggagctatccattgggagattggcgggcgaagcggaactgaagcggcatcatcgtcttttctatggcaactacgcctattatcttgatcgcatggcaaaggaagaagcaggagaagtaagcgcagttgaaaatcaagaaataaagccccaaaaaagtcagccgccttcagaacgccgggaacaggaaaagcaaaggcaggcccttgtgcggcggcttgagcgtcaggaagcagaaatgctttcggccatggaaaaactggaaaccgaaaagaagcggctagaagaagaactcggcaagccggagatctactcgtcaggcgagaaagccagggctgctaagcttgctttggatgaaacagcggcggctctggaagcaaaatccagggaatgggaaggcattgccgctgagctggaaacggcgagtaaaagcggcctgtaa

SEQ ID NO: 52054 - protein, 443 aa, Unknown
  Obtained from environmental sample
  DOMAIN (114)...(313): RecF/RecN/SMC N terminal domain
  misc_feature (1)..(443): Xaa is any amino acid
MVSHDRYFLDVTVNEVYEVFQGNLKRYIGNYSTYEKTRSAELESLVKRYELQQEEIEKTEALIRRFRYKATKAAFAQELVKRLEKIERIEIPENLKKINISFPPPPHSPRVVLTLEGLCKSYGERQVLSCLDLTLDAGERLLVAGPNGAGKTTLLRIIAGGDTDYEGLVKYGSGISVGYFSQDAAENISGSQTIEQYIENEAPTYLIPKVRGMLGAFLFRGDDVFKSLSVLSGGEKSRLAMLRMLLKPMNLLILDEPTNHLDLQSKDILLDCLKAFEGTIIFVSHDRGFMEALSTKTLELSIGRLAGEAELKRHHRLFYGNYAYYLDRMAKEEAGEVSAVENQEIKPQKSQPPSERREQEKQRQALVRRLERQEAEMLSAMEKLETEKKRLEEELGKPEIYSSGEKARAAKLALDETAAALEAKSREWEGIAAELETASKSGL

SEQ ID NO: 52055 - DNA, 516 bp, Unknown
  Obtained from environmental sample
  misc_feature (1)..(516): n is a, c, g, or t
ttgatggccgagcagaacgagatactgacagacattaaccagataaaagtttcgataaaccatgtcaacgaaatgagtcaggagaacaatcggaatttcgatgccttaaaacaggaaaccgaaaaatttaatgatgccgttggcaacgaaaaacaaaaaattcttattgtagatgacgacagtattcatcttgaaatggtggaatcggtattgcagaatgagtatgaaatatctaccgccaaatccggaaaagaagcattaggcttattctatcagggacttgtacctcaattaatatttttggatttgataatgccggatatggacggatgggatacttacaaaagaataaaagcaataagcggcttacacgataccccaatagcgtttttcacaacttcaaccgatcagaaagacataaaacacgcacaggaaataggggcggttgattacatcaaaaagccctatgacaaagacgacctgttacacagagtggggagaatccttaataaatga

SEQ ID NO: 52056 - protein, 171 aa, Unknown
  Obtained from environmental sample
  DOMAIN (52)...(166): Response regulator receiver domain
  misc_feature (1)..(171): Xaa is any amino acid
MMAEQNEILTDINQIKVSINHVNEMSQENNRNFDALKQETEKFNDAVGNEKQKILIVDDDSIHLEMVESVLQNEYEISTAKSGKEALGLFYQGLVPQLIFLDLIMPDMDGWDTYKRIKAISGLHDTPIAFFTTSTDQKDIKHAQEIGAVDYIKKPYDKDDLLHRVGRILNK

SEQ ID NO: 52057 - DNA, 1161 bp, Unknown
  Obtained from environmental sample
  misc_feature (1)..(1161): n is a, c, g, or t
atgaagtacacaaacattttttcagtacctgtttcccggaaacgtcaaacctccatgcggcgcaggtttattgttttttcctctattttatttctgctcatatttattcccggaagcgtaatttttgccattttaatggacaaaatccagtatgacaacgccggattaaaattgatgcagaccattgaaattgaacggcttaaactggaagcgaccataaacagcgaaattgccattgctctaagaatggctgactctcccataatacagtggtatttccttaaccctgatgacgaagaaatggggcaaattgctataggagaaatggaaggatcccacaaagctcttaaaggcgatattttctggtgcggcgatattgataaagaattttattttaacgtggataatcattatacggttgacgctgaaaatcccgataactattggtacaaaatgactctatatgaaacggaaaaatataatttcaacataaactacaatgcggaattacaacgtaccatgttgtggattaacgcgcctgtttttgacaataatcaaaaacctgccggtatagtgggaacaggtataaatctgtctgatttcatcaatgccatatataacaactattcggaagacgaggaattatatttctttaacgcagccggagaaataaccggcgcaagaaacattaaccttgtcgcggaaaaaataaatataaccggcgaactcggtcaaacaggcaaaaaaatatttgaaaatgtaaaacacataaaaaacggtgagataaaatatattaaaacggcggacaggaaaggaatagccgcttatagctcaattcctgctttggattggtacatagccgttttacatccttttactctcagggaatccctgcaaaccaacatggctgttcttttcggcgtaatgatgatggttattttttctatttttatattctttaatatatttatcattgtaatgctggaaccgctaaatcaggtagtaaaaacaataaatcaaacttttgccgactggggtttaaaacctcatgaaggcgaacaacttaaagatgaagttggaacttttaacgattttttccacttaaccataattgatcaggttaccggtatttacaacaggcggtatcttgacggcagctaa

SEQ ID NO: 52058 - protein, 386 aa, Unknown
  Obtained from environmental sample
  misc_feature (1)..(386): Xaa is any amino acid
MKYTNIFSVPVSRKRQTSMRRRFIVFSSILFLLIFIPGSVIFAILMDKIQYDNAGLKLMQTIEIERLKLEATINSEIAIALRMADSPIIQWYFLNPDDEEMGQIAIGEMEGSHKALKGDIFWCGDIDKEFYFNVDNHYTVDAENPDNYWYKMTLYETEKYNFNINYNAELQRTMLWINAPVFDNNQKPAGIVGTGINLSDFINAIYNNYSEDEELYFFNAAGEITGARNINLVAEKINITGELGQTGKKIFENVKHIKNGEIKYIKTADRKGIAAYSSIPALDWYIAVLHPFTLRESLQTNMAVLFGVMMMVIFSIFIFFNIFIIVMLEPLNQVVKTINQTFADWGLKPHEGEQLKDEVGTFNDFFHLTIIDQVTGIYNRRYLDGS

SEQ ID NO: 52059 - DNA, 846 bp, Unknown
  Obtained from environmental sample
  misc_feature (1)..(846): n is a, c, g, or t
atgggaaaaaaggtggaagcccttattctgggcgaattgcggcggcttgttaccgaaggaatcccccagggggaaattgaagcggcgctgttgtttatggaattttcacagcgggaagtcaagcgctcccacgggcctttttcgctggtgtggatgcggcgcaccctgcgaacatggctgcacgggggcaaaccctgggacggccttttattaacgcgggcgctggaaacgcttaaacgccgccttgccgaaaacagccgttactttgaatcgctgatacaaaaatatctgctgggcaatccccaccgcgcgctggtaatgctggaaccgcaaaaggatttcctgccccaacaggaagcgcggcttgcggaagaattggcaaagatcgaacagggtttgagcgatacagaaaaaaatcgcataacggagaaatccgcggcccttgaaaaaattcagagtgaaggcgacagtcctgaggcgcttgcctccattccccacctgagccgcggagatctttcgcctgaaccggaaataattccccgcggttttgaagacttgcagggaatccccgcgctatgccacgacttgtacaccaacggcattacctatatcgaccttgtctttcctctggacattttgccgccggaagattattcctggctgcctttcttcgcccgcgcggcaatttccgtggggcttcccggcatggattacggcgaagtgtccagcctgctggcccgtaccgtaggcggttttaacgccatactgcacaccggttctgctgttggcgatagcgcctctggcgatagcagtcccattatcaatnntcncgtcgggagaatttga

SEQ ID NO: 52060 - protein, 281 aa, Unknown
  Obtained from environmental sample
  DOMAIN (108)...(281): Peptidase M16C associated
  misc_feature (1)..(281): Xaa is any amino acid
MGKKVEALILGELRRLVTEGIPQGEIEAALLFMEFSQREVKRSHGPFSLVWMRRTLRTWLHGGKPWDGLLLTRALETLKRRLAENSRYFESLIQKYLLGNPHRALVMLEPQKDFLPQQEARLAEELAKIEQGLSDTEKNRITEKSAALEKIQSEGDSPEALASIPHLSRGDLSPEPEIIPRGFEDLQGIPALCHDLYTNGITYIDLVFPLDILPPEDYSWLPFFARAAISVGLPGMDYGEVSSLLARTVGGFNAILHTGSAVGDSASGDSSPIINXXVGRI

SEQ ID NO: 52061 - DNA, 933 bp, Unknown
  Obtained from environmental sample
  misc_feature (1)..(933): n is a, c, g, or t
ttggcgatagcgcctctggcgatagcagtcccattatcaatnntcncgtcgggagaatttgacnttattggccgggactggatcatctaccgcctaaaatgtctggacgaaaaggccgaggcatcgctgaacctggccntgcgtctgataagcgaagcggatttttccgatctaaggcgaatccatgaccttgttatggaaatgaaaaacgaggcgcgttccagccttgcgcctatcggacatcattacgccgctctcagggcaaaccgttatgcgtcggcttccacgcaaatagaggaaacatggaacggcttaacacagctttttttcatccaccgccttgccgagatggacactgcaacaatagccgccaagttaaaaaatctgcgtgaagcgatagcctcaaacggccttatcgccaaccttgccggatcagccgacgcgcttaaatccaacggcagcttggtcgcccagcggttcaaaggctttggccctcccaaaaaccggatacaaggcaaaatggtgcctggcaccttttccagccctgaggttttcacctcgccgtcgctgcaggttggctttgcggccatgacactgagggccgcgaaatttgacaccctgccccagattgcggaaactgtgcttgcccaccaacttaccaccggcgctttatgggaaaatatccgcatgaaaggcggcgcttacggagcctcggcttccagcaacggcattgagcgttgcttctccctgtcaacttaccgcgatcccaacccgctgcgttcgctggatacattctgctcaatactcaaagacagcgccaaaggcgatgtgacaaatgccggggcagatgccggggcagatgccctggaaaaaatgatcatcggctgtactcaaacgaaacccgcccccgcacgccttcggaaaaatctgtaa

SEQ ID NO: 52062 - protein, 310 aa, Unknown
  Obtained from environmental sample
  misc_feature (1)..(310): Xaa is any amino acid
MAIAPLAIAVPLSXXXSGEFDXIGRDWIIYRLKCLDEKAEASLNLAXRLISEADFSDLRRIHDLVMEMKNEARSSLAPIGHHYAALRANRYASASTQIEETWNGLTQLFFIHRLAEMDTATIAAKLKNLREAIASNGLIANLAGSADALKSNGSLVAQRFKGFGPPKNRIQGKMVPGTFSSPEVFTSPSLQVGFAAMTLRAAKFDTLPQIAETVLAHQLTTGALWENIRMKGGAYGASASSNGIERCFSLSTYRDPNPLRSLDTFCSILKDSAKGDVTNAGADAGADALEKMIIGCTQTKPAPARLRKNL

SEQ ID NO: 52063 - DNA, 1347 bp, Unknown
  Obtained from environmental sample
  misc_feature (1)..(1347): n is a, c, g, or t
atgtactaccacataggacgctgtatggctccatgctgcggaaaaataaacgttaaagattattcgctacatgtggaacgcgtgcaaaaattactgtcaggtgaaaccgaagcgttaattatcgatcttacttttaaaatgcacgaggccgccaaagttacgcgattcgagcaagccgcgctaataaggaatacgatcagggcgattgaaaagcttgcgggagaagacagctccgtggaagatctaaacccggaagacagggactacatcgcatgggcggcgaacggggtacttgccacatttaccgtcttttccatgcgcggcggcaaaatgacgggacgggatctttaccgtacgcgctccgccgcggatgaatgggagtcgatggagatttttatcacttcttattatgataattcacatcatccgccgggaaaaatttatatccaaaattatctctcacaaaatatggaattaatacaaaattggtttaaggagaaattcgagtatgagccgcaactactctcccccgcggaaaaacatcatgcggctattatggcgatggcaaagcagaacgccgaggaagatttgcggaaaagattaaaagaaagaggcgcgggacccgctattgatgaattgacgcgagtgttaggtttgaaatccagaccggagcggattgaagggtttgatatcgcgcaacttgacgggaaacatcctgtcgcttctttaatttcatttaagaacggggttcccgaccgtaaaaattaccgttatttcaaactgcgtacggtgattggaatagtagatgacttcgcggccatgcgagaagttgtcaggcggcgttattcgcgccttatccgcgaaggaaaggaacttcccgatttaatacttgttgacggcggtatcgggcaggtgaacgccgcaaagggagtgttagatgaactaggcgcagattgcggtcttgttgggcttgccaagcgcgaggaagaactatggcttcccgcggcgaaagaaccgctggttttatcaagacaatcggaagcgttaaaaattttacagcatgtacgcgacgagtgccaccgcttcgcgacaggcttcaatcaacggcttagatcaaaagaccttttcttcccgatattggaatcagtggaaggagtgggtcccaaacgcgcggcggcaattatgaatgcctatgaatcaattgcgaatatcgccgccgcagatattaaagaaatatcggacgttgcagtattagcgaaaatacggcgcgcgcggtacgagccgtggcaaagttggcggcggaaaattcttaagaatttttaccacgaacaaacacgaacaccgtaa

SEQ ID NO: 52064 - protein, 448 aa, Unknown
  Obtained from environmental sample
  DOMAIN (37)...(72): UvrB/uvrC motif
  misc_feature (1)..(448): Xaa is any amino acid
MYYHIGRCMAPCCGKINVKDYSLHVERVQKLLSGETEALIIDLTFKMHEAAKVTRFEQAALIRNTIRAIEKLAGEDSSVEDLNPEDRDYIAWAANGVLATFTVFSMRGGKMTGRDLYRTRSAADEWESMEIFITSYYDNSHHPPGKIYIQNYLSQNMELIQNWFKEKFEYEPQLLSPAEKHHAAIMAMAKQNAEEDLRKRLKERGAGPAIDELTRVLGLKSRPERIEGFDIAQLDGKHPVASLISFKNGVPDRKNYRYFKLRTVIGIVDDFAAMREVVRRRYSRLIREGKELPDLILVDGGIGQVNAAKGVLDELGADCGLVGLAKREEELWLPAAKEPLVLSRQSEALKILQHVRDECHRFATGFNQRLRSKDLFFPILESVEGVGPKRAAAIMNAYESIANIAAADIKEISDVAVLAKIRRARYEPWQSWRRKILKNFYHEQTRTP

SEQ ID NO: 52065 - DNA, 927 bp, Unknown
  Obtained from environmental sample
  misc_feature (1)..(927): n is a, c, g, or t
atgctttccggtgaaatgcagaagtaccttgaccttgaaaaagcgcttgagcggcgagtagtcggccaggatcaggcgcttgccgctgttgccgacgctatcaggaggaacaaggccggcctctccgacgccgcgaaacctttgggcagtttcctgtttttagggcccaccggcgtcggcaaaactgaattggcgaaaacccttgcggactttttatttaacgacgagaaagcccttgccagaatcgacatgagcgaatacggggagaaacattctgtcagccgccttataggcgctccgccgggttatgtgggctacgagcagggcggtcagcttaccgaaatagtgcgcaggcggccctacagcgtggttctttttgacgaaatagaaaaagcccatccggaagtgtttaatgtttttttgcagattcttgatgacggacggcttacggacggacagggccgtatcgttgattttaaaaatgtcataatcattatgacaagcaatatcggctcggatttgattcttgaggaggaaaataccgcgtcaataagggattcccttctggaattgctcaagcggagtttcaggccggaattcctgaaccgcatcgacgagactgtaatcttcaaccgtcttggcaaaaacgaaattggcaaaatcgttgacattcagcttgatcgccttgtgcgccggcttgccgagcgaaaaattacacttaacatatcaggcgcggcaaaaaaattcctcgccgaacgaggctatgatccaatgtacggggcgcggcccctcaaacggaccattcaggcgggactggaaaaccctttggcgaaattcgtcatttccggaaaaatccacgaaggcgatgctgttaccgcggacaaaaaaggcgaaggactggcttttcaggtaacaggtaacaggtaa

SEQ ID NO: 52066 - protein, 308 aa, Unknown
  Obtained from environmental sample
  DOMAIN (3)...(242): Torsin
  misc_feature (1)..(308): Xaa is any amino acid
MLSGEMQKYLDLEKALERRVVGQDQALAAVADAIRRNKAGLSDAAKPLGSFLFLGPTGVGKTELAKTLADFLFNDEKALARIDMSEYGEKHSVSRLIGAPPGYVGYEQGGQLTEIVRRRPYSVVLFDEIEKAHPEVFNVFLQILDDGRLTDGQGRIVDFKNVIIIMTSNIGSDLILEEENTASIRDSLLELLKRSFRPEFLNRIDETVIFNRLGKNEIGKIVDIQLDRLVRRLAERKITLNISGAAKKFLAERGYDPMYGARPLKRTIQAGLENPLAKFVISGKIHEGDAVTADKKGEGLAFQVTGNR

SEQ ID NO: 52067 - DNA, 1137 bp, Unknown
  Obtained from environmental sample
  misc_feature (1)..(1137): n is a, c, g, or t
gtggaccgtaggcttgcgtactacaatgagtttggagaactagtgaaaacactccacgaaaatgggatttctgtaattcttgacggggtttttaatcataccattatggatttttttgccttccaagacattaaagaaaaaaaggagaactcccaatataaaaattggtatttaaatataaatttttttcaaaacaatgagtataacgatggtttttcttatgaagggtgggccggacataaaagccttgcaaaattaaatcttgattgccgtgacgttcgcgatcatattttaggcgctgtaaaatactggatagatgaatttgacattgacggcttacgattagacgctgccaatgttatttctgttaattttttaagagagttgtcttcctttgtcaaaaagataaacccctcgttttggctcatgggagaaatcgttgcgggcgattaccgtagtctggtacacgaaggctgtcttgattcagtaacaaattatgagttatataaaagcctttggtcgagctttcaaaaccaaaacatttatgaactttcaagtacattaaaaaagcaattttccaataacggtctatataaggaccttgctttgtataattttacggataaccatgatgtaaaccgtatcgcgtcattattaaatgatcaagccaatctttttccgttatatggcgccttattttgtgtgcccggtattccttccatttattatggcagtgaatatggcgtttatgggaaacgggatgagtacagtgattataacttacgtcccgcgtgggatgataactggtcagaaacaaatttgggaaaagacctttttagggaaatatgccgtttttccaagatacgccgtgaatcagaggcgttaaaaaccggtagttacagtgagcttttggtaaattatgatcaaataatctctttttttagagagacagataatgaaacaattattgtgattataaacgcggcgcaggaaaagaaggaatgtattttaaataatacaaaaatcgggaattcgaattggatagatttgctttcggaggaaaggttcacggctaaaaataatattcttgaactattattataccctacatggttaagaatattgagaaaattatga

SEQ ID NO: 52068 - protein, 378 aa, Unknown
  Obtained from environmental sample
  DOMAIN (2)...(289): Alpha amylase, catalytic domain
  misc_feature (1)..(378): Xaa is any amino acid
MDRRLAYYNEFGELVKTLHENGISVILDGVFNHTIMDFFAFQDIKEKKENSQYKNWYLNINFFQNNEYNDGFSYEGWAGHKSLAKLNLDCRDVRDHILGAVKYWIDEFDIDGLRLDAANVISVNFLRELSSFVKKINPSFWLMGEIVAGDYRSLVHEGCLDSVTNYELYKSLWSSFQNQNIYELSSTLKKQFSNNGLYKDLALYNFTDNHDVNRIASLLNDQANLFPLYGALFCVPGIPSIYYGSEYGVYGKRDEYSDYNLRPAWDDNWSETNLGKDLFREICRFSKIRRESEALKTGSYSELLVNYDQIISFFRETDNETIIVIINAAQEKKECILNNTKIGNSNWIDLLSEERFTAKNNILELLLYPTWLRILRKL

SEQ ID NO: 52069 - DNA, 384 bp, Unknown
  Obtained from environmental sample
  misc_feature (1)..(384): n is a, c, g, or t
atggctgatataatccccactgaagacacgatttatcaaagcatccgtactgttcttaccgccgcacggcaaaaggtgtataccgcagtaaattccgctatggtcgaaacctattgggatatagggcggcaaatcatggaagcccaggaagggcaacgggctgagtatgggaccggattattgaaatatttatccggtcgtttaaccgtagaatttgggaaaggttttgatgaaactaaccttcgtaaaatgcggcaattttttcaaacctttccaattcgagacacactgtgtctcaatttaagctggtctcattaccggctattaatgaaggttagaaatgaggttgaacgtgagttttaccttaaagaatgtatcgggtga

SEQ ID NO: 52070 - protein, 127 aa, Unknown
  Obtained from environmental sample
  DOMAIN (11)...(126): Protein of unknown function (DUF1016)
  misc_feature (1)..(127): Xaa is any amino acid
MADIIPTEDTIYQSIRTVLTAARQKVYTAVNSAMVETYWDIGRQIMEAQEGQRAEYGTGLLKYLSGRLTVEFGKGFDETNLRKMRQFFQTFPIRDTLCLNLSWSHYRLLMKVRNEVEREFYLKECIG

SEQ ID NO: 52071 - DNA, 1107 bp, Unknown
  Obtained from environmental sample
  misc_feature (1)..(1107): n is a, c, g, or t
atggaaacaacagaatcaaccagtctcttatacagagacataataggggtacaaaccccatgggcaataacagccgtaaagaaggatgagcagaagagaaaaataaccatcaaaattgaacatgctcgggaacataaaatatcctgtcctgcatgcggcgagaggacaaaaacatacgatcaccggataagggtattaagatatttggatacctgccaatatgaaacatttcttgaagtacacatacccagggtgaaatgtaaagaagacggggtgcagcaaatagatataccgtttgcggagaaacattcccggtttaccagccgttttgagatggccgtgctggtatggcttgaaagcagccctatatcaaaagtagcggagaacttccatttgagctgggatgaagtggacgggataatgcagagggcggtacaacgggggcttgcccggcgggagcggcagaaagtgagcaacatcgggatagacgaaacgtcacgtcagaaagggcataactatgtaacgataatactggacaaagaccgggactgtgtaatagacgtgcttgacgaccggaaggcggaaacggtggaaacatggcttaatacgcagaaaagcgccgatttaagcgaattagagagcatttccatggatatgtgggatccgtatataaaagcggtacgagcggcgatacccgaagcggaccagaagatagcgttcgaccggtttcatgtgagcaagcatataaacgaggcgctggataaagtaaggcggagggaacaccgtgcgttcatggaacaagcaggagagagtccgttaagtaaaagccggttccaatggctgacaaactcaaaccggactgataaccgcagcgggaagcggaaagcgttcatgagtttgtcacggctgaatctggagacagcgagggcatggaggataaaggaggccgccaacagcctgtgggaatatgtgtacatgaatgtagcggaggcggcgtggaagaagttgctgtggtggataagccactgccggataccagaaatgatccaggtcggcaagactatacaaaactatttctggggaatactaaacgcaatacggctttag

SEQ ID NO: 52072 - protein, 368 aa, Unknown
  Obtained from environmental sample
  DOMAIN (159)...(260): Transposase
  misc_feature (1)..(368): Xaa is any amino acid
METTESTSLLYRDIIGVQTPWAITAVKKDEQKRKITIKIEHAREHKISCPACGERTKTYDHRIRVLRYLDTCQYETFLEVHIPRVKCKEDGVQQIDIPFAEKHSRFTSRFEMAVLVWLESSPISKVAENFHLSWDEVDGIMQRAVQRGLARRERQKVSNIGIDETSRQKGHNYVTIILDKDRDCVIDVLDDRKAETVETWLNTQKSADLSELESISMDMWDPYIKAVRAAIPEADQKIAFDRFHVSKHINEALDKVRRREHRAFMEQAGESPLSKSRFQWLTNSNRTDNRSGKRKAFMSLSRLNLETARAWRIKEAANSLWEYVYMNVAEAAWKKLLWWISHCRIPEMIQVGKTIQNYFWGILNAIRL

SEQ ID NO: 52073 - DNA, 873 bp, Unknown
  Obtained from environmental sample
  misc_feature (1)..(873): n is a, c, g, or t
atgaataaaaattttccgtttacctttttgcgtttgtttttggtatttttcgccggcgcgctgatggcttttaatataagaacatttgttcacgcgggcggcattattcccggcggatttaccggactttccctgctgcttcaggaaatatgcatgcgttacgggaaattccatctgcctttcagcgtgccgttttacattcttaactcaatacccgcggcgatatgttttaaattcatcggcaggaaatttaccctctattctttgctctccattgttactaccggcttgcttaccgattggctgccttccatgttcatcgatataattaaactgcacgacattttgctttcatctgtgttcggcggttttataaacggattggcaatagctatctgtctttatgccggagccacatccggcggaaccgattttatagcgattattatttcggatagataccacaaggacgcgtggcattatatttttatagggaactgtgttattctggcgcttgcgggatttcttttcgacatagacaaggctttgtactccgtaattttccagttcgcaactactatggcgctggagaagctttaccggaattaccagcaaaggacgcttcttattatcacaaacaagccggatttaattttttcggttatcaatgagaaaacacaccacggcgctacctgttttgacggctttggcagttacgaaaagaaaagcaggactctgctttattctgttgtaaccgcaagtcagataaaagctcttattcccgcaataagaaaaattgataaagaagcgtttatcaatgtgctaaagaccgatcagcttaacggacggttttatcaacagccttttgattaa

SEQ ID NO: 52074 - protein, 290 aa, Unknown
  Obtained from environmental sample
  SIGNAL (1)...(23)
  DOMAIN (11)...(99): Uncharacterized BCR, YitT family COG1284
  misc_feature (1)..(290): Xaa is any amino acid
MNKNFPFTFLRLFLVFFAGALMAFNIRTFVHAGGIIPGGFTGLSLLLQEICMRYGKFHLPFSVPFYILNSIPAAICFKFIGRKFTLYSLLSIVTTGLLTDWLPSMFIDIIKLHDILLSSVFGGFINGLAIAICLYAGATSGGTDFIAIIISDRYHKDAWHYIFIGNCVILALAGFLFDIDKALYSVIFQFATTMALEKLYRNYQQRTLLIITNKPDLIFSVINEKTHHGATCFDGFGSYEKKSRTLLYSVVTASQIKALIPAIRKIDKEAFINVLKTDQLNGRFYQQPFD

SEQ ID NO: 52075 - DNA, 939 bp, Unknown
  Obtained from environmental sample
  misc_feature (1)..(939): n is a, c, g, or t
ttgtcgcggggtcttgccgcgacgaagctggctcgccgaaacatgctcatcttaaaattaaccaaccccaaaggcgaggttaaatatgtcacaggcgctcttccctcggcgtgcggcaagacaaaccttgccatgttacagcccacccttcccggctggaaagtcgagactgtcggcgacgacatcgcctggatgaagttcggggaggacggcagactatacgcgatcaatcctgaagcgggattcttcggcgttgccccgggaacaagcgatcaatcaaactacaacgcgatgagagcaattgagaaaaactcaatctttacaaactgcggtcttaccgaagacggagacatctggtgggaacagatcggtcacggcgcccccggcaaaacaatcatagactggaagggaaatgaaaaacccgctccccagaacgacaaagccgtgaagggcgaagagatcgcccatcccaacgcccgctttacggcgcccgcgaaacaatgccccgtaatcgcctccgagtgggaagacccgaaaggcgtgccaatcagcgcgttccttttcggcggacgccgcgcgtcaactattcctctcgtaaaccagagcaagaactgggtacacggcgttttcatgggttcgatcacaggctctgaaatcacagccgcggctctcgatcttaaagaaggttccgtacgccgcgacccgttcgccatgctgccgttctgcggttaccacatgggcgactacttcagccactggctcaaactcggcaagaaagcgcagggaggaaggacacggcgacaaacttccgaagattttctttatcaactggttccgcaaagacaaagacggacatttcatgtggcccggttacggcgagaactcccgcgtactcgcgtggatcttcgaccgctgcgacggcaaagacaactacgttga

SEQ ID NO: 52076 - protein, 312 aa, Unknown
  Obtained from environmental sample
  DOMAIN (1)...(311): Phosphoenolpyruvate carboxykinase
  misc_feature (1)..(312): Xaa is any amino acid
MSRGLAATKLARRNMLILKLTNPKGEVKYVTGALPSACGKTNLAMLQPTLPGWKVETVGDDIAWMKFGEDGRLYAINPEAGFFGVAPGTSDQSNYNAMRAIEKNSIFTNCGLTEDGDIWWEQIGHGAPGKTIIDWKGNEKPAPQNDKAVKGEEIAHPNARFTAPAKQCPVIASEWEDPKGVPISAFLFGGRRASTIPLVNQSKNWVHGVFMGSITGSEITAAALDLKEGSVRRDPFAMLPFCGYHMGDYFSHWLKLGKKAQGGRTRRQTSEDFLYQLVPQRQRRTFHVARLRRELPRTRVDLRPLRRQRQLR

SEQ ID NO: 52077 - DNA, 1419 bp, Unknown
  Obtained from environmental sample
  misc_feature (1)..(1419): n is a, c, g, or t
atgtccataaagaaatttcttggctttggcttcttccttctcctttttgccgcggcctttgtttttggccagtccgaacagcgttattctaaaggcgctattttaaacgaggaagcgtacagcaagcttcccaaaaaagcggcccttacgacccgcgcttacgaagggctgccaaaaaccttttccctgaaacagtacgcacccctgcccggggaccagaccaattacggaacctgcgtcgcgtgggcttcggcatacgcggcaaggacaatctccgagtctgtggcgctgaaccgcagaaatcaaaccgagacaacccagaacgtcttttctccggtttatgtctaccggaatatcaggcccgacgatcccgaatgtcagcgcggcgcccagattttcgacgccctggatttgatgcgggactcgggcgcggtcaggatgttggacattgagcgttccatggcttttcccagggtcgatctttccaattacagggaaagcaggaaataccccatcggcggttacgtcaccttgttttccaaggaagacaaacagaagcccgcccttatcacgcggattgtgaagaaaagccttgtcgagggaagacctgtcattatcggtatgaacactccggattcgtttattgaagcgaaaaatatttgggagcccagggacaatcccggtatgtattacggcggccacgccatgtgcgtggtgggctatgacgatgacaagggcgcttttgagattctcaacagttggggaaggaagtgggggaacgggggatttatctgggttacctacaaggcctttgtggattttgtaatggaaagctacgagatgatagaaaatctcgcgatctacagcgacacggtaaaatacgagggcttcagccgtatagagatactcgggcagggcgcgcctaagcttgcggaactcgtcctttctccggaggggtattacaagaccgccgaatcgtttaccgagggaacccagttccgctttgtcgtaggggccggcgagagcgcctatgtgtattccttcgcggtcacaaagcccgcgcgggacaacaatttttcttcacctgtcctgctgttcccgcagaccggcatctcgccgcttctcaattaccgtgacagcgccgtggcgctgcccggcgaggacaaggtcctggccctggacgcggaagcgggcatggagtatctgataacgctttactcgaaacagcccttggacctgcaagccattatgaggcgctttgtttcaaccaaaggaactctcggggaacgcctcgcgacagccacgggcagcaaccccttgctctctctttcgtataacgccaaagaagcggcctttaccgcaacgacggataactcccgcgccgtagccgccctggttgtggcaatagaacacaaataa

SEQ ID NO: 52078 - protein, 472 aa, Unknown
  Obtained from environmental sample
  SIGNAL (1)...(23)
  misc_feature (1)..(472): Xaa is any amino acid
MSIKKFLGFGFFLLLFAAAFVFGQSEQRYSKGAILNEEAYSKLPKKAALTTRAYEGLPKTFSLKQYAPLPGDQTNYGTCVAWASAYAARTISESVALNRRNQTETTQNVFSPVYVYRNIRPDDPECQRGAQIFDALDLMRDSGAVRMLDIERSMAFPRVDLSNYRESRKYPIGGYVTLFSKEDKQKPALITRIVKKSLVEGRPVIIGMNTPDSFIEAKNIWEPRDNPGMYYGGHAMCVVGYDDDKGAFEILNSWGRKWGNGGFIWVTYKAFVDFVMESYEMIENLAIYSDTVKYEGFSRIEILGQGAPKLAELVLSPEGYYKTAESFTEGTQFRFVVGAGESAYVYSFAVTKPARDNNFSSPVLLFPQTGISPLLNYRDSAVALPGEDKVLALDAEAGMEYLITLYSKQPLDLQAIMRRFVSTKGTLGERLATATGSNPLLSLSYNAKEAAFTATTDNSRAVAALVVAIEHK

SEQ ID NO: 52079 - DNA, 630 bp, Unknown
  Obtained from environmental sample
  misc_feature (1)..(630): n is a, c, g, or t
ttgggcatctgcactatgattttaaggaatacaaggatgccctgttttactgggagaaaaatgcttaagataaatcccgcgaatgtggatataagggtgctgacttcaataggaaattgccaccgcaaattgaaaacatttgccgatggcatacccttttttgaaaaagcactgcaaaaagaaggggataatttttacgcggttttcggtcttgccgactgttaccgtggtttgaaccagcaggaacagtccttaaaatactggaacaacattcttgagcaggatcccaggaacaaggttatactgacgcgcgccggcgacgcataccgcaatatgggagattttgaaaaagctcaaaactactatgaacgcgctctgaatattgagtttgacatatacgccgtcatgggccttgcgttgatcgccaaaatacaggggcggtatgacgaggcgggcacttccctacggcggcttatacagcaggactccaaagactaccgcatatttattgagcttgccgactgctgcctgaaaaaaggcgacaaaaaccaggcgattgaagtgctggaagaattccagcgtctgggcatacgcaacgcccagatcagcgaaatgcttgaaggcttgtaa

SEQ ID NO: 52080 - protein, 209 aa, Unknown
  Obtained from environmental sample
  DOMAIN (65)...(98): Tetratricopeptide repeat
  misc_feature (1)..(209): Xaa is any amino acid
MGICTMILRNTRMPCFTGRKMLKINPANVDIRVLTSIGNCHRKLKTFADGIPFFEKALQKEGDNFYAVFGLADCYRGLNQQEQSLKYWNNILEQDPRNKVILTRAGDAYRNMGDFEKAQNYYERALNIEFDIYAVMGLALIAKIQGRYDEAGTSLRRLIQQDSKDYRIFIELADCCLKKGDKNQAIEVLEEFQRLGIRNAQISEMLEGL

SEQ ID NO: 52081 - DNA, 672 bp, Unknown
  Obtained from environmental sample
  misc_feature (1)..(672): n is a, c, g, or t
gtgattttggactggtatcccttatggaattccgtacgcatagcggccataagctctgttttagtttttttccttggattgtgttgcgcctactatatcgctaaacttccgcgtcttgtcaaagggcttcttgatgtgattttgacattgcctctggttctaccgcctacagtgatgggctatcttctgttgctgcttctgggcgtaaggcgtccgttaggtgttttctttctgcaattcggaatcagattcgttatgacctggtacggcgggatattgactgcggctgtggctgcgttcccgctcatgtaccgcacggcgcggggcgcttttgaaggttttgataatacattagcccatgccggacaaacactgggccttccggactcgtatattttctggcgtatccgtatgccttactgccgtcaggggatactggcaggagtagtgcttgcctttgcccgcgctatgggcgaatacggagccacaagcatgttgatcggctatacgcccggtaaaaccgcgaccataagcacgaccgtataccagatgtggcgtaccggcaacgatgcgagcgcgtttggctgggtgctgattaatatccttatatctatggctgtgctgtcaggagtcagcctgctggaacgaaaaaattattataaggcccgctga

SEQ ID NO: 52082 - protein, 223 aa, Unknown
  Obtained from environmental sample
  DOMAIN (8)...(222): Binding-protein-dependent transport system inner membrane component
  misc_feature (1)..(223): Xaa is any amino acid
MILDWYPLWNSVRIAAISSVLVFFLGLCCAYYIAKLPRLVKGLLDVILTLPLVLPPTVMGYLLLLLLGVRRPLGVFFLQFGIRFVMTWYGGILTAAVAAFPLMYRTARGAFEGFDNTLAHAGQTLGLPDSYIFWRIRMPYCRQGILAGVVLAFARAMGEYGATSMLIGYTPGKTATISTTVYQMWRTGNDASAFGWVLINILISMAVLSGVSLLERKNYYKAR

SEQ ID NO: 52083 - DNA, 1041 bp, Unknown
  Obtained from environmental sample
  misc_feature (1)..(1041): n is a, c, g, or t
atgctctcggtggatatccggaaaaaattgggcgcgttcagcctgaatgtgtcgtttaacacggatgaaggcgtgacggggattctgggcgcgtccggctgcggcaaaagcatgacgctgcgctgtattgccggcgttgacaagcccgatcaggggcgcataacgcttgacgatgtgaccttgttcgacagcgaaaagggtattaatctgcctcctcaggaacgtaaagtgggttaccttttccagaattacgcgctgttccccaacatgactgttgaaaaaaatatcctgtgcggcctgtaccatgagaaggataaagcggaacgaaagcgtgtgttggacgacacgattcacctgctcaggctggaggggctggaaaaacacctgccgcaccagctttccggcggccagcagcagcgagcggccctggcgcggattctggcgaacaagccccggctcttaatgcttgacgagccgttttccgccctggacagccatttgcgcggccaactgcgaatccagatgaaaaagcttcttgagcgttacggcggctcgaccctgatggtgacgcataacagagatgaggcatataatttatgcggacatatcgcgctaatggacgcgggttcaatcctggcgctgaagccgaccaaggaactgtttgccaaccccgaatcggtggcgggggcaatgataacgggctgtaaaaatatctgttcggcaagaaagacaggcgaatatgagcttgaagtcccggattggggcataaggcttgttacggcgcggcctctgcgcgaggatctgtgcgccgttggaatccgcgcccattattttgatcctgaaatcaggcaaaaccgtttcccggtgcgattcaccggagagatggaggagccttttgagtttagcctgcaattccgttatgagaatcaagcggataatactcaggatattttgtggctgtttcccaaagaaaagaaaagagcggacattccggcaatgctgggggtagaacctgaaaatgtgctgccgctttacaaatga

SEQ ID NO: 52084 - protein, 346 aa, Unknown
  Obtained from environmental sample
  DOMAIN (23)...(209): ABC transporter
  misc_feature (1)..(346): Xaa is any amino acid
MLSVDIRKKLGAFSLNVSFNTDEGVTGILGASGCGKSMTLRCIAGVDKPDQGRITLDDVTLFDSEKGINLPPQERKVGYLFQNYALFPNMTVEKNILCGLYHEKDKAERKRVLDDTIHLLRLEGLEKHLPHQLSGGQQQRAALARILANKPRLLMLDEPFSALDSHLRGQLRIQMKKLLERYGGSTLMVTHNRDEAYNLCGHIALMDAGSILALKPTKELFANPESVAGAMITGCKNICSARKTGEYELEVPDWGIRLVTARPLREDLCAVGIRAHYFDPEIRQNRFPVRFTGEMEEPFEFSLQFRYENQADNTQDILWLFPKEKKRADIPAMLGVEPENVLPLYK

SEQ ID NO: 52085 - DNA, 906 bp, Unknown
  Obtained from environmental sample
  misc_feature (1)..(906): n is a, c, g, or t
atgcggccaatgcctcacctattacgggcttaccgaaaagctggctgtggggaaggtcaccaatatgatggagattgtggagtttttgacttcatcaaggcggacggtaaccatttaacaaaagaagaaagaaaaatgaaaaaagaaaaaagtaacataaaagaagagaggaagaaaaaaagggatgcttttctacctcttccttttttcttttgtaatgggagcgttgtggccgttgtgggttgtgggggtaaaacttctattattgagcttatggctgatgggcttcgtgataagaaggttttgatttcgactactactaaaatatttccgcccaaaatgagggatgttgtgttatgcgaaacattggagcaatgcgaagggcatgaggcgcggacgggcgttcagtgtatgggacttatgaacagcgccggcgggaagctggaggcgctgcctgacgcgttcctctcggcaataaaaacgcgctatgacattgtgtttctggaagctgacggttcgagggggctgccctgcaagggctggctggcaaatgagcctgtggttccccattactgcacgcacacggtgggactgatcacaatgggcgctcttggcaagccggccggagaaaacacagtccaccgcctgccggagtttttcgccctgactggggtaggggaggggcagacgatcagcccggcggcgctggaggcaatggtctgcgcccccaacgggatgttcaaaaacagcgcgggacagaagtatgttattgttaatcaggcagaggatgaagaatcctcccgtaacgcccaggcgtttttgcggacaataaaagaaaaatatccgaaccgttttgagaaactgctttatggcagcgttcatcgtgacgcgtggcgggaaatgtaa

SEQ ID NO: 52086 - protein, 301 aa, Unknown
  Obtained from environmental sample
  misc_feature (1)..(301): Xaa is any amino acid
MRPMPHLLRAYRKAGCGEGHQYDGDCGVFDFIKADGNHLTKEERKMKKEKSNIKEERKKKRDAFLPLPFFFCNGSVVAVVGCGGKTSIIELMADGLRDKKVLISTTTKIFPPKMRDVVLCETLEQCEGHEARTGVQCMGLMNSAGGKLEALPDAFLSAIKTRYDIVFLEADGSRGLPCKGWLANEPVVPHYCTHTVGLITMGALGKPAGENTVHRLPEFFALTGVGEGQTISPAALEAMVCAPNGMFKNSAGQKYVIVNQAEDEESSRNAQAFLRTIKEKYPNRFEKLLYGSVHRDAWREM

SEQ ID NO: 52087 - DNA, 615 bp, Unknown
  Obtained from environmental sample
  misc_feature (1)..(615): n is a, c, g, or t
atgattacgcttaacatgctcggcaagccgtgtccaataccggttgtcgaggcgaaaaaggccctgttacagggtcaggacgttatggtgctggttgacaacgccattgccgtgcaaaatctggaaaaaatggcagccggattagggcatggtttctcctatgagcaaaagggagaagcggagtataccgtggcaatcatggtaaagaatttcggcgcccaaccggcttcgtgtcaggcgatggcgcctgcggccgaggcggtgcctggaaatacgtctggcggtcaaattttccttattacaggcgatcaaatcggtataagcgccggggagccggggaaaaaattaatgcaaacttttttatactcattggcgcagcttcctaaagcgccggagattattctgctgataaacgccggggttaaactcgccgcacagggttcggaagcgcttgataatttgaagacccttgccgaacatggcgcggatatacgctcatgcggccaatgcctcacctattacgggcttaccgaaaagctggctgtggggaaggtcaccaatatgatggagattgtggagtttttgacttcatcaaggcggacggtaaccatttaa

SEQ ID NO: 52088 - protein, 204 aa, Unknown
  Obtained from environmental sample
  DOMAIN (1)...(66): SirA-like protein
  misc_feature (1)..(204): Xaa is any amino acid
MITLNMLGKPCPIPVVEAKKALLQGQDVMVLVDNAIAVQNLEKMAAGLGHGFSYEQKGEAEYTVAIMVKNFGAQPASCQAMAPAAEAVPGNTSGGQIFLITGDQIGISAGEPGKKLMQTFLYSLAQLPKAPEIILLINAGVKLAAQGSEALDNLKTLAEHGADIRSCGQCLTYYGLTEKLAVGKVTNMMEIVEFLTSSRRTVTI

SEQ ID NO: 52089 - DNA, 1176 bp, Unknown
  Obtained from environmental sample
  misc_feature (1)..(1176): n is a, c, g, or t
atgcggacggatagcgcttatggacgccggagcgattttaacgttaaagccgacgaaagaattgttcagggaaaaagtgactgtcacttacgagagaatagagggggtgtaatgatggcagaaaagatcgaaagcttgcttgcgaattgcaccagcgggggatgcggggcgaagattgggccgggggagctttccgctttgctggataaaattccggcggtcagagacgagcgcctgctggtcggatttgactgttctgacgacgcggctgtctacgcgctggacgacgataaggctatagtatcgaccgttgattttttctccccgatgattgacgatccttttgttttcgggcagatcgcggcggccaacgcgttaagcgatatttacgcgatgggagcgtcgccgtttctggccctgaaccttgtctgctttccggaaaaattcccgaaaaccatactcgccgaaatacttgccggaggggccgataaaattaccgaagccggggcggtattgggcggcggccactcgatctacgataaggaaaccaaatacggccttgccgtcaccggttttgtcgagagaaaaaatattatccgcaacaacacgccgcgcgtcgggtacagcctgattctgacaaaacccctgggagtgggcattgtcatggccgcccaaagagtcggcatggcaagcgcggacgccgtgcaaaaagccgtgaacagcatgcggaggctgaaccgttatgccgcggaaaagatgcgaggttttaatatgagcgcctgtaccgacgtgactggttttggactgctctgccatttactggaaatgtgcggcaatagcgtctccgcggagatttggcctgatagtctgccggttatcagggaagccgcaggctacgcggatgattttctgcttacagccgcggcccagcgcaaccggaaccatttttgcaaacaggcaggtgaaaccctacgggtttcacttgtagaaaaactgcccttcgccctgcaggagttgatgtttgatccccaaacctcgggcgggctgttgatctgtgtcgatgccgaacaatcccaacagttgttaaacgctattcaaaaagacgatcccgaggcgcggataatcggacgtataatagaacatcaggatgaaataataatttttggaggtaaataa

SEQ ID NO: 52090 - protein, 391 aa, Unknown
  Obtained from environmental sample
  DOMAIN (51)...(194): AIR synthase related protein, N-terminal domain
  misc_feature (1)..(391): Xaa is any amino acid
MRTDSAYGRRSDFNVKADERIVQGKSDCHLRENRGGVMMAEKIESLLANCTSGGCGAKIGPGELSALLDKIPAVRDERLLVGFDCSDDAAVYALDDDKAIVSTVDFFSPMIDDPFVFGQIAAANALSDIYAMGASPFLALNLVCFPEKFPKTILAEILAGGADKITEAGAVLGGGHSIYDKETKYGLAVTGFVERKNIIRNNTPRVGYSLILTKPLGVGIVMAAQRVGMASADAVQKAVNSMRRLNRYAAEKMRGFNMSACTDVTGFGLLCHLLEMCGNSVSAEIWPDSLPVIREAAGYADDFLLTAAAQRNRNHFCKQAGETLRVSLVEKLPFALQELMFDPQTSGGLLICVDAEQSQQLLNAIQKDDPEARIIGRIIEHQDEIIIFGGK

SEQ ID NO: 52091 - DNA, 708 bp, Unknown
  Obtained from environmental sample
  misc_feature (1)..(708): n is a, c, g, or t
atgctctcggtaaatattcaaaaagaccttgacgcgttcaaactggatgtgtcgtttaacacggcggaaggagtgacggggattctaggcgcgtctggctgcggcaaaagcatgacgcttcgctgtattgccggcattgacagaccggatcatgggcgcataacgcttgacgatacagtattgtttgacagcgaaaaaggtatcaatcttaagccgcaggaacgaaaagtgggctacttgttccagagttacgcgctgtttccaaacatgacggttgaaaaaaatatattatgcggcctgtaccatgagaaggacaaggcgaaacgcgggcagttgttaaacgacacaattagcctgcttaagctggaggggcttgaaaaacatcttccgcgacagctttcgggcggtcagcagcaacgcgcggcgctggcgcggattctggtaaataagccacggctattaatgcttgacgagccctttgcggctcttgacagccatttacgcgggcaactgcgaatccagatgaaagagctccttgagcgttacagaggctcggccctgatggtgacgcatacnagcgacgaagcctgtgatttatgcggacggatagcgcttatggacgccggagcgattttaacgttaaagccgacgaaagaattgttcagggaaaaagtgactgtcacttacgagagaatagagggggtgtaa

SEQ ID NO: 52092 - protein, 235 aa, Unknown
  Obtained from environmental sample
  DOMAIN (23)...(209): ABC transporter
  misc_feature (1)..(235): Xaa is any amino acid
MLSVNIQKDLDAFKLDVSFNTAEGVTGILGASGCGKSMTLRCIAGIDRPDHGRITLDDTVLFDSEKGINLKPQERKVGYLFQSYALFPNMTVEKNILCGLYHEKDKAKRGQLLNDTISLLKLEGLEKHLPRQLSGGQQQRAALARILVNKPRLLMLDEPFAALDSHLRGQLRIQMKELLERYRGSALMVTHTSDEACDLCGRIALMDAGAILTLKPTKELFREKVTVTYERIEGV

SEQ ID NO: 52093 - DNA, 318 bp, Unknown
  Obtained from environmental sample
  misc_feature (1)..(318): n is a, c, g, or t
ttggnnccatgcaatcgagagctggccgccaattcgtatatcttttggcgtatccgtatgccgtattgccgtcaggggatattggctggagtggtgcttgcattcgcccgcgccatgggcgaatacggggctacaagcatgttgattggctatacgccgggaaaaacagcgaccatctccacaacagtataccagatgtggcgtaccggcaatgacgcgggagcgcttggctgggtgttgatcaatatccttatttccatggctgttctattgggagtcaacctgctggaacgaagaaataacaaggcagtccgctga

SEQ ID NO: 52094 - protein, 105 aa, Unknown
  Obtained from environmental sample
  misc_feature (1)..(105): Xaa is any amino acid
MXPCNRELAANSYIFWRIRMPYCRQGILAGVVLAFARAMGEYGATSMLIGYTPGKTATISTTVYQMWRTGNDAGALGWVLINILISMAVLLGVNLLERRNNKAVR

SEQ ID NO: 52095 - DNA, 1326 bp, Unknown
  Obtained from environmental sample
  misc_feature (1)..(1326): n is a, c, g, or t
ttggggcggcttaataaatatttagggggtgtgtttatggacgaacttttgaaagccattagaaaaaaactggctgacatgaagaaaatcgatagtaccggatttaccgatccggctaaggcggcggagtattttcaagataaggaaatacttcttgaagaaatggcgaaaacgcttgaaacagttacatctaatcagacaacgcagattgcggcattggaagggactatcaagagtttgcgtgaagaattgaaaacgcaggttaagtacccgaaagaattaacacggcgtgaacttcttttncatctcggcaagggtattgcggcggcgtggtcgggtaatcataagacgttggcggaacttgctttctcgcctaatttgaaaagcgaaaattggactaaccctaaagatgtttcttggggtgaaaagggctggacggtttcaaaggctgctttgggcgatccgatggggaatatgtcgcctaataacgaacagtatttgataaaccccatctatgaaactgaaattatgtccgaggttgccaaaaaatccgtgatgatgccccttgtccgccatcgcccgatgatggggccgtctatcttccttccgacaagagaccggggcggggttcagcttaactggcttacagcttacggtcaaaaaattgaggggagcaagcctaaaggggcagagcgtgtagaattaaaagcctacacattggcgggatatattccgtggttcgatgaattcgaggaagatgtctttgtcgatttgggggctaggttcgtggatgagtttttggaaacctatgggcaggaatttgacaggcaatgcctaacagccgataacgatccgttcacaggggctatgaagtgcgccgatgttaccgaggtagcaatcaagggaaacagcattgacgatctgacatggaaggatttccaagatgcggtctataaggttccggcagaggagcgcaaagattgcagttggttcctgaatgaaacggtattaaaccatatcgccagtattgaagatgctaatggtcgcccgatatggcgggggccgacagaggcaatgccggggcggttggatttgtacccttatcacgaggtttccatcctcccccagatggcggacattgaggaagataccccttttgcggtattcatgaatccgaagcgcatccagcatggcaacaggcggggcatcgagcttaaaaagtttgatggaactacagaaagtcttgaatatggggaactgtttttgaggttccgcaagagggacggatttttagttaccagaccgaaagggaacatggtcatttga

SEQ ID NO: 52096 - protein, 441 aa, Unknown
  Obtained from environmental sample
  DOMAIN (164)...(441): Phage capsid family
  misc_feature (1)..(441): Xaa is any amino acid
MGRLNKYLGGVFMDELLKAIRKKLADMKKIDSTGFTDPAKAAEYFQDKEILLEEMAKTLETVTSNQTTQIAALEGTIKSLREELKTQVKYPKELTRRELLXHLGKGIAAAWSGNHKTLAELAFSPNLKSENWTNPKDVSWGEKGWTVSKAALGDPMGNMSPNNEQYLINPIYETEIMSEVAKKSVMMPLVRHRPMMGPSIFLPTRDRGGVQLNWLTAYGQKIEGSKPKGAERVELKAYTLAGYIPWFDEFEEDVFVDLGARFVDEFLETYGQEFDRQCLTADNDPFTGAMKCADVTEVAIKGNSIDDLTWKDFQDAVYKVPAEERKDCSWFLNETVLNHIASIEDANGRPIWRGPTEAMPGRLDLYPYHEVSILPQMADIEEDTPFAVFMNPKRIQHGNRRGIELKKFDGTTESLEYGELFLRFRKRDGFLVTRPKGNMVI

SEQ ID NO: 52097 - DNA, 1275 bp, Unknown
  Obtained from environmental sample
  misc_feature (1)..(1275): n is a, c, g, or t
atggatatggagaacataccattcgacatgcacgaggtgttcgccctctgccgctcggcgaccattccaaaggccatggagaaggggctactgctccacttctacgccgaacctgtcatcaacaagaggctcttgggcgaccccacgaggctgcggcagatcttcatcaacctcatctccaacgcggtgaagttcacgaacagcggcgtcgtaaaagtattagccacaattatgtcaattaccgccgacaccatcgccatgcgcttcgaggtgaaagattcggggataggcatgaccgccgaggaaataaagagggtgatggaaccgttcacgcaagccgaccacagcaccacgcgaaagtacggcggcacagggctcggtctctccatcgtgaacagcctcgtggagatgatgggcggaaagctgcaagttaaaagcacccccggcatcggcagcaagttcagcttcgacctgaccttcggcatggtcgacgccgctaatagcgcggcgggcaagcccaagtccgacgacgacttggagaaaccggatcttgacggggagatcttggtctgcgaggacaaccacatgaaccaagaggtcatacgcaaacacttgcagagagtaggcctgcggatcacgatagcctgcaacggcaaggagggcgtggacatcgtcaaagagcgcgcgggtcgcggggaaaaacccttcgacctgatctttatggacataaacatgccggtaatggacgggcttgaggccgcggcgctgatgacggatttgggcgtgaagacccccatagtggccatgaccgcgaatgtcctgtcgagcgacaaggaactctacgagcggagcaacatgcacgactgcataggaaagccattcacgtcgcaggaactgtggcactgcctgctcaaatacattacgccggtcggcaaacagcaagagaagcaacaaggcaagggcggcgaagggtatggagacgacatccttcaggagatgcgggcaatatttgttgacgacaaccaaaacaccttcgcggaattcaaggaggcgatatacgctaacgacatcccgaaggcgcatagaatagcgcacacgctgaaaagcaacgcgggcacaatcggcaagccggcgctgcaagcggcggcgcttgacgccgagaaacatcttgccggcggagaaaatctgatgacgccggagtgccttaaaacgctggaaacggagcttaatgcggtgcttgcggaattagagccgttgcgtaacgttgattcttaa

SEQ ID NO: 52098 - protein, 424 aa, Unknown
  Obtained from environmental sample
  DOMAIN (332)...(415): Hpt domain
  misc_feature (1)..(424): Xaa is any amino acid
MDMENIPFDMHEVFALCRSATIPKAMEKGLLLHFYAEPVINKRLLGDPTRLRQIFINLISNAVKFTNSGVVKVLATIMSITADTIAMRFEVKDSGIGMTAEEIKRVMEPFTQADHSTTRKYGGTGLGLSIVNSLVEMMGGKLQVKSTPGIGSKFSFDLTFGMVDAANSAAGKPKSDDDLEKPDLDGEILVCEDNHMNQEVIRKHLQRVGLRITIACNGKEGVDIVKERAGRGEKPFDLIFMDINMPVMDGLEAAALMTDLGVKTPIVAMTANVLSSDKELYERSNMHDCIGKPFTSQELWHCLLKYITPVGKQQEKQQGKGGEGYGDDILQEMRAIFVDDNQNTFAEFKEAIYANDIPKAHRIAHTLKSNAGTIGKPALQAAALDAEKHLAGGENLMTPECLKTLETELNAVLAELEPLRNVDS

SEQ ID NO: 52099 - DNA, 834 bp, Unknown
  Obtained from environmental sample
  misc_feature (1)..(834): n is a, c, g, or t
atgcctcttttcaaaattaacgacgagactatcaggctggcggcggcgcgtattgtccagggcgggcttgtggcttttccgacggaaactgtttacggacttggggccgacgcgtttaaccccgacgccctggccctgatctttgaaatcaagaacaggccccgattcgacccgctgattgtccatatcgccgcgcttaacacgattgaaaaagtcgccgatctttccatgctggacacggatgtaagaaaaaaacttgacgcgttaactgaaaaattctggcccggcccccttactttaattctgccaaaaaaacaaaccgttcccgaccttgcgaccggcggcctttctacggtggccgtgcgtcttccctctctcgcttcggcaagacagctcatagctttttcaaccggcgcggtggcggccccaagcgccaatccttttggctgtttaagccccacaagcgcggagcatgtgcttgcaatgcttggcgataaagttgagattatcctcgacggcggccccacgcaggtggggcttgaatctaccgttcttgatatttgcggcccgcgcatactcagacccggcggcgttccaaaggaagcgatagaggcccttatcggtgcccttgccgaaaaccaggcgttaggtgaaagcgccgtttccccaggtatgatgaaaaaccattatgccccgcgcgcctgtcgggaagtatacgattttgaaccctgnagtcaaatacccgccgataataacagcgcttttctctttttgacagcgcttcatataaactgtggcaaaaaaaacagaaactgccgctggataaaacattaa

SEQ ID NO: 52100 - protein, 277 aa, Unknown
  Obtained from environmental sample
  DOMAIN (15)...(196): yrdC domain
  misc_feature (1)..(277): Xaa is any amino acid
MPLFKINDETIRLAAARIVQGGLVAFPTETVYGLGADAFNPDALALIFEIKNRPRFDPLIVHIAALNTIEKVADLSMLDTDVRKKLDALTEKFWPGPLTLILPKKQTVPDLATGGLSTVAVRLPSLASARQLIAFSTGAVAAPSANPFGCLSPTSAEHVLAMLGDKVEIILDGGPTQVGLESTVLDICGPRILRPGGVPKEAIEALIGALAENQALGESAVSPGMMKNHYAPRACREVYDFEPXSQIPADNNSAFLFLTALHINCGKKNRNCRWIKH

SEQ ID NO: 52101 - DNA, 483 bp, Unknown
  Obtained from environmental sample
  misc_feature (1)..(483): n is a, c, g, or t
atgcgcgggccgcaaatatcaagaacggtagattcaagccccacctgcgtggggccgccgtcgaggataatctcaactttatcgccaagcattgcaagcacatgctccgcgcttgtggggcttaaacagccaaaaggattggcgcttggggccgccaccgcgccggttgaaaaagctatgagctgtcttgccgaagcgagagagggaagacgcacggccaccgtagaaaggccgccggtcgcaaggtcgggaacggtttgtttttttggcagaattaaagtaagggggccgggccagaatttttcagttaacgcgtcaagtttttttcttacatccgtgtccagcatggaaagatcggcgactttttcaatcgtgttaagcgcggcgatatggacaatcagcgggtcgaatcggggcctgttcttgatttcaaagatcagggccagggcgtcggggttaaacgcgtcggccccaagtccgtaa

SEQ ID NO: 52102 - protein, 160 aa, Unknown
  Obtained from environmental sample
  misc_feature (1)..(160): Xaa is any amino acid
MRGPQISRTVDSSPTCVGPPSRIISTLSPSIASTCSALVGLKQPKGLALGAATAPVEKAMSCLAEAREGRRTATVERPPVARSGTVCFFGRIKVRGPGQNFSVNASSFFLTSVSSMERSATFSIVLSAAIWTISGSNRGLFLISKIRARASGLNASAPSP

SEQ ID NO: 52103 - DNA, 789 bp, Unknown
  Obtained from environmental sample
  misc_feature (1)..(789): n is a, c, g, or t
atgatctggacaaattgggaatcagccggatatacgcccaactcgcccccgaggaaggccttggcagggcgattaatgatcggctgcttaaagcaaaaagcggggactagggactgggtttttgttcgtaagcatagcgtggaactttcacgattagattgcgaaccaaagcattgctcattgctcattcagtccccagtccctattccctggtccctatattgcgtaagccccccatgtctggtatccttaacatcggaggccgtcttgagtcagcatatagtatcggcgctggtggaaaaccgcgcgggaacattgagcagggtatcggggcttttcagccgcagaggttataatattgacagcctgactgtaggagtaacggacgacccttctgtttcacggatgacaatcgcgatcaacggcacaggtcagaaatccgacaagcgggtgctggaacagattgtcaaacagctcgaaaaactggtcgacgttattgccgtaagggaactggaaaacgactcatgcctgcgccgcgagataatgctggtcaagataaagacagacgagaaaacccgccctgccgttatggaaataaccggcattttcagggcccgggtagttgatgtttcccccgaaacaatcaccgtggaagcgaccgggaatatggagaaacttaacggccttttactgctcctgcgtccctacggcatccttgagcttgcccgcaccggaatggtcgcgcttgagcgcggaaccagcgttttatccgtaggaaccaacccctaa

SEQ ID NO: 52104 - protein, 262 aa, Unknown
  Obtained from environmental sample
  DOMAIN (93)...(171): ACT domain
  misc_feature (1)..(262): Xaa is any amino acid
MIWTNWESAGYTPNSPPRKALAGRLMIGCLKQKAGTRDWVFVRKHSVELSRLDCEPKHCSLLIQSPVPIPWSLYCVSPPCLVSLTSEAVLSQHIVSALVENRAGTLSRVSGLFSRRGYNIDSLTVGVTDDPSVSRMTIAINGTGQKSDKRVLEQIVKQLEKLVDVIAVRELENDSCLRREIMLVKIKTDEKTRPAVMEITGIFRARVVDVSPETITVEATGNMEKLNGLLLLLRPYGILELARTGMVALERGTSVLSVGTNP

SEQ ID NO: 52105 - DNA, 435 bp, Unknown
  Obtained from environmental sample
  misc_feature (1)..(435): n is a, c, g, or t
atgaatgcgcttgaaataaggacgatttttactcttaccttattcaaccatagtatacccattaccgaaacggtggtaatttcatgggttgtaatggtcattcttgtcatcggggcgctcatcctgacgcgcaggcttaaagaagttcccacgggcccgcaggcgatcctggaaatcggggtcgaatccctgaacaattacgcgaaaaaccagttcggccctttcgcaaagtaccttggcccctatatgggggcgctctttttgttcctgcttatcgcgaatatcatccctgtcctgtcgcccgtggaatttaaggccttcgggcgtgagtttatcccacctttcccgatccggccccccacaagggacataaatgtaacggcggctcttgcggtaatttcaattacgcttcttctgtctctcggccgattctga

SEQ ID NO: 52106 - protein, 144 aa, Unknown
  Obtained from environmental sample
  misc_feature (1)..(144): Xaa is any amino acid
MNALEIRTIFTLTLFNHSIPITETVVISWVVMVILVIGALILTRRLKEVPTGPQAILEIGVESLNNYAKNQFGPFAKYLGPYMGALFLFLLIANIIPVLSPVEFKAFGREFIPPFPIRPPTRDINVTAALAVISITLLLSLGRF

SEQ ID NO: 52107 - DNA, 1200 bp, Unknown
  Obtained from environmental sample
  misc_feature (1)..(1200): n is a, c, g, or t
atgcgctccgaaaggcttctcagcaggcggcatacactgcggcatcagggcaaaatcgaaaaagctcgacctggctttgctgtattccgaagagccctgcacagccgccgcgatgtttacgaccaacaggttaaatccgcctgcgttttggtgagccaggaacacgtctcaggcggcgttcttcgtgctgtgattgccaattcggggaacgccaacgcctgcacgggcgagggcggccttgccgtggcgcgcaaaatggcgagccttgcctccggccttttcggcataaaccctaaagaagtagcggtggcttccaccggggttatcggcgtgcctcttccgatagagcctattgaaagtggcatggcttctcttcgcgattcgctaaaaaacagcgaggaaggtcatttgacggcccttgaagctatcatgaccacggacatacgcaaaaaagacggggcggtggagatagcaatagacggcaagagcgtaaaaatcggcggaatgttaaaggggtcggggatgatacaccctaacatggcaaccatgctctgctttatcactacggacgccgccatttccagggaagcccttgacgcctgcctgcgcagtgcggtacgccgctcctttaaccgcgtttcggtggacggcgacacctcaaccaacgacatgattattattatggcaaacggcgaggccggaaattcgccgataaaagccgggacgccagcctatgaagtattttcccgggcgctggaaagcttctgcgtcgatcttgcccgcaagatggcaagggacggcgagggcgcgacaaagctggtgacagtcaccgttcatggggcaagagatgaagatgccgcaaaaactctcgttaaatccgtcgtttcttccagcctggtaaaaaccgcctgctttggctcggatgccaactggggacgcatcctctgcgccatgggctactccggcgcggactttaacccgaacgaggtagacgtgagcttcgcgagtgaaggcgaggaaatcgccgtatgccggggaggcgaaccgctgcctttctccgaggaggacgccaaaaggatactcaagcgcgaagagatcgaaatccgcataaaagccgggaagggttcaggcagagcgacggcctggggctgcgatttgacttacgattacgtcaagataaacggggactaccgctcatga

SEQ ID NO: 52108 - protein, 399 aa, Unknown
  Obtained from environmental sample
  DOMAIN (19)...(399): ArgJ family
  misc_feature (1)..(399): Xaa is any amino acid
MRSERLLSRRHTLRHQGKIEKARPGFAVFRRALHSRRDVYDQQVKSACVLVSQEHVSGGVLRAVIANSGNANACTGEGGLAVARKMASLASGLFGINPKEVAVASTGVIGVPLPIEPIESGMASLRDSLKNSEEGHLTALEAIMTTDIRKKDGAVEIAIDGKSVKIGGMLKGSGMIHPNMATMLCFITTDAAISREALDACLRSAVRRSFNRVSVDGDTSTNDMIIIMANGEAGNSPIKAGTPAYEVFSRALESFCVDLARKMARDGEGATKLVTVTVHGARDEDAAKTLVKSVVSSSLVKTACFGSDANWGRILCAMGYSGADFNPNEVDVSFASEGEEIAVCRGGEPLPFSEEDAKRILKREEIEIRIKAGKGSGRATAWGCDLTYDYVKINGDYRS

SEQ ID NO: 52109 - DNA, 1035 bp, Unknown
  Obtained from environmental sample
  misc_feature (1)..(1035): n is a, c, g, or t
atgccggggaggcgaaccgctgcctttctccgaggaggacgccaaaaggatactcaagcgcgaagagatcgaaatccgcataaaagccgggaagggttcaggcagagcgacggcctggggctgcgatttgacttacgattacgtcaagataaacggggactaccgctcatgaagtaccaaagcgcggacatagccgagattctgatccacgcactgccgtatatccagcaattcagcggcaagaccgtggtggtcaaatacggcggcaacgcgatgatcaacgaagagcttaaagccgctgtcattcaggacgttatcctcatggcttgcgtcgggatccgtaccgtgctggttcacggcggcgggcccgagattgacgccatgctaaaaaaaaccgggaaggaaagccgctttatcaacggcttgcgctacaccgacggtgaaaccatggagatcgtccagatggttctctgcggcaagctgaacaaggacatctgttccttaatccagcacgcggggggcagggcagtcggcctgtgcggcatcgacggcgcgctgctccaggcccgccgccgaaaaggcggggaagacctcggccttgtaggcgacgtggaaaccgtggacgccacgatactcaactccgcgctggacgacgggatcatcccggtggtttcttccgtggcctacggcatcggcgaagacgagggctgctcgctcaacgtcaacgcggacacagccgccgcgaaaatcgccggggcccttaaggcggaaaagctcatgcttatgaccgacgttcagggcatactccgcaacgtccaggatccggcctctttaatcaggcaggttaatcgatctgaactggaagcgcttaaacgagacggcatagtcaacaagggcatgatcccaaaggttgactgctgcctccttgccatggacggaggagtcaagaaaacccatattattgacggccgcctgccccatgtccttttgatcgagcttttcaccgacgaaggcatgggtacaatgatagaataa

SEQ ID NO: 52110 - protein, 344 aa, Unknown
  Obtained from environmental sample
  DOMAIN (81)...(322): Amino acid kinase family
  misc_feature (1)..(344): Xaa is any amino acid
MPGRRTAAFLRGGRQKDTQARRDRNPHKSREGFRQSDGLGLRFDLRLRQDKRGLPLMKYQSADIAEILIHALPYIQQFSGKTVVVKYGGNAMINEELKAAVIQDVILMACVGIRTVLVHGGGPEIDAMLKKTGKESRFINGLRYTDGETMEIVQMVLCGKLNKDICSLIQHAGGRAVGLCGIDGALLQARRRKGGEDLGLVGDVETVDATILNSALDDGIIPVVSSVAYGIGEDEGCSLNVNADTAAAKIAGALKAEKLMLMTDVQGILRNVQDPASLIRQVNRSELEALKRDGIVNKGMIPKVDCCLLAMDGGVKKTHIIDGRLPHVLLIELFTDEGMGTMIE

SEQ ID NO: 52111 - DNA, 819 bp, Unknown
  Obtained from environmental sample
  misc_feature (1)..(819): n is a, c, g, or t
atggataaagaaaccgaacaatttttaaaaaatcaggcaaaagaaatccgcaaattaactattgaggaaatcggaaatttgggatcagggcatattgggggagcgatgtccatcgtagaccttttgaccctgttgtatttccaccgcatgaaagttgatcctaaaaatccccgttgggaagagcgcgatcaactggttgtttcaaaggggcactctggacccgccgtctacgcgacgctggcgctcaagggctttttcccgatggactggcttaaaaccctgaacaagggcggaaccaaattgccaagccactgcgaccgcaacaagactcccggcatcgacatgacaaccggctctcttgggcagggtttttccgcagctatcggcattgccgtaggcttgcgaatggataaaaaagcttcgaccgtgtatacaattatcggagacggcgagtccgacgaaggacagatttgggaaggcgcgctctttgcgggcttccataaactttccaaccttgtcgcctttaccgactacaacaaacaacagcttgacggctttacaaaagatattcttgatcttggcgatcttgcctccaagtgggccgccttcggctggttcacgcaggaagtagacggacacgatgtcgccgctcttgacgccgcgattgaaaaagcgctggctcaaaaagaaaagccgtccatgatcgttatgaacacgatcaagggaaagggctgtaacttcgcggaaggcgtcgagaaaaatcacagcatggcctttgacatggaaaaagccaaagaagccatcgcggcattagcctga

SEQ ID NO: 52112 - protein, 272 aa, Unknown
  Obtained from environmental sample
  DOMAIN (97)...(237): Thiamine pyrophosphate enzyme, C-terminal TPP binding domain
  misc_feature (1)..(272): Xaa is any amino acid
MDKETEQFLKNQAKEIRKLTIEEIGNLGSGHIGGAMSIVDLLTLLYFHRMKVDPKNPRWEERDQLVVSKGHSGPAVYATLALKGFFPMDWLKTLNKGGTKLPSHCDRNKTPGIDMTTGSLGQGFSAAIGIAVGLRMDKKASTVYTIIGDGESDEGQIWEGALFAGFHKLSNLVAFTDYNKQQLDGFTKDILDLGDLASKWAAFGWFTQEVDGHDVAALDAAIEKALAQKEKPSMIVMNTIKGKGCNFAEGVEKNHSMAFDMEKAKEAIAALA

SEQ ID NO: 52113 - DNA, 939 bp, Unknown
  Obtained from environmental sample
  misc_feature (1)..(939): n is a, c, g, or t
atggcagaacaaaaagaaatgcgaatggcctatgttgatacattgatggcattggcggaaaaaaataaaaatatagtcgtattggaatcggatttgatgagttgtacaaacacgggcattttcaaaaaaacataccccgaccgttttataaactgcggtatcgcggaagcgaatatggtcgggattgcttcgggactttccactctgggaaaaatcccgtttgcggcgggcttcggctgtttttcatcgcggcgggtattcgatcaatttttcctttccgccaattacgcgcgtcttaacgtaaaattgacaggaaccgacccgggcgtaaccgccgcttttaacggcggaacccacatgccctttgaggaacttgccctgatgagggttgtccccggtttaacggtcattgaaccgtcggacccggcttcatgcgccgcctttgtccgtcttatggcggaagaatacggctgtcattatctgcgtattccgcgcaaacctgttccgtacctgtatcctgaaaccgaaactttcaagttcggcaaggcaaaagttttaaaagagggaaaggacgtttgctttatcgcgctgggcagccttatggtgaaccagtcgctgaaagccgccgaaacccttgccgcctccggcataagcgcgggagtgctggacgttcttacgttaaaaccaattgaccgtgacgcgatacttgaacaggcgggaaaagcgcgcgcggttataagcgcggagaacgcccaaatagcgggaggcctcggcagcgcggttgcggaaatactcgcggagaacggatgcaggtgcaaattcgcgcgaatcggcatacgcgacgagttcggagaggtgggcacgcaggactatcttgttgaccgttacggtcttgacacgggaagccttgtaaaaaaagcgcaagagcttcttgcgtga

SEQ ID NO: 52114 - protein, 312 aa, Unknown
  Obtained from environmental sample
  DOMAIN (5)...(171): Transketolase, pyridine binding domain
  misc_feature (1)..(312): Xaa is any amino acid
MAEQKEMRMAYVDTLMALAEKNKNIVVLESDLMSCTNTGIFKKTYPDRFINCGIAEANMVGIASGLSTLGKIPFAAGFGCFSSRRVFDQFFLSANYARLNVKLTGTDPGVTAAFNGGTHMPFEELALMRVVPGLTVIEPSDPASCAAFVRLMAEEYGCHYLRIPRKPVPYLYPETETFKFGKAKVLKEGKDVCFIALGSLMVNQSLKAAETLAASGISAGVLDVLTLKPIDRDAILEQAGKARAVISAENAQIAGGLGSAVAEILAENGCRCKFARIGIRDEFGEVGTQDYLVDRYGLDTGSLVKKAQELLA

SEQ ID NO: 52115 - DNA, 567 bp, Unknown
  Obtained from environmental sample
  misc_feature (1)..(567): n is a, c, g, or t
ttgcgtgagttaatgaattttgtagccattgattttgaaaccgcaatgtactcacaagagagcgcctgctccgtgggtcttgtaaaatttcaggatggaaaagcaacggacacttactattcgcttattagaccgccaaaactctacatacgccccgactttaccgagattcacggacttactgttgacgatgtaagggacgctcccacattcataaatatctgggacagtgacataaaaccgtttatcggcgattatccgcttgcggcgcataatgccgcatttgacatgggcgtacttggcgctgttcttgactggtacgatttggacataccaagactgctgtatttttgcacatgcaatcttgcacgtaacacatgggcgggattaaaatcatattcacttacaaatcttgccaattatttcggcattgtttacaacgcgcacaacgcgcttgaggacgctatgacctgcggaaagttggtacaaatggctgcggaaaaattcggctgtacgaatgttgaagaactgctggaaagcgcccggttaaaaatgaaagtgctgtaa

SEQ ID NO: 52116 - protein, 188 aa, Unknown
  Obtained from environmental sample
  DOMAIN (7)...(162): Exonuclease
  misc_feature (1)..(188): Xaa is any amino acid
MRELMNFVAIDFETAMYSQESACSVGLVKFQDGKATDTYYSLIRPPKLYIRPDFTEIHGLTVDDVRDAPTFINIWDSDIKPFIGDYPLAAHNAAFDMGVLGAVLDWYDLDIPRLLYFCTCNLARNTWAGLKSYSLTNLANYFGIVYNAHNALEDAMTCGKLVQMAAEKFGCTNVEELLESARLKMKVL

SEQ ID NO: 52117 - DNA, 1755 bp, Unknown
  Obtained from environmental sample
  misc_feature (1)..(1755): n is a, c, g, or t
ttgcaggcaaaaacccgaaaaaataaaaaaacaatggacgagctaaaaacaagtcctatgcttgaacagtacaggcgcataaaaaaacaacaggaaggaaatatattatttttccggcttggtgatttttatgaaatgttcgcccaagatgccgtagaagtttccgccttattaaaccttacccttacaagccgcaacgggcttccgatgtgcggcgtaccgtatcatgcggcaaaatcttatatagccagattattaaaactgggaaaaaaaatcgctatttgcgaacagctttccgccccgggaaaacaaaaagttatcgagcgcgaagttgtagaaataattactcccggaacaaccgtagacgatgattttcttgataaaggaagctccaattatctttgctgtcttgcctcaggcggcaattcaaacgggctttctttttcatatatcgatctttcaacgggagattttttttcgacaagtttttcaagcgaaggaatacttcgtcaggaacttgaacgcttgtccgtaaaagaactgcttgttcaggaatcacttttagaagaacaaaaagaaatagcgtccgctatttacgaccgcccgtccgtcgtgttgaaccgctgggctgactggttttttgatccggcgcaggcaaagtcgagattggaaaaacaattcggcgtttcaaacttaaaaagtttcggcatggaagaaaattcgcctgaaataatttccgccggagcgcttttagattaccttgatacgacgtcaaaaagcatactaagccatataagaacgataaaagtttaccgcgacagcgaatatatgggaattgatgaatcaagccagcgaaatcttgaacttttgtacaaccaaagagacggggaaccgcgtttttcgcttttggaagtaatggacgaaaccaaatcttccatgggacgcaggcttttaaagagacgtattctgcacccgcttcgcaatgtggaaaaaattaacaagcgtctggacatggtggaagatttatacagagatcaagggcgtttaagcaagctacgcgaactattgggaaaaacatcagaccttgagcgtctttgttcaaggcttgcgatggacaaggcgcacgcaagggatatgcttgcgattaaaaacgctattttttgttttttcgctgtaaaagaaattttaaataccgaattcgatggaagaaaaatctgttttgagtgcgatgaacaggaaagcataaataattttgacagcctcttgcaattacaggatttacttgaaaagggaataaaggaagaaccttcggtatttcttaacgaaggaaaccttataaaagatagttttaataaagaattagacgatttacgttccatgagagataacagcagacagattcttgaacaatacttggaagaagaaaaacaggaaacaggcataacaagtttaaaaatacgctacaacaggttaatcggctatttctttgaagttaagaaaaacagccttgataaagtgccgaaacattttataaggcggcagggaatggcggacggtgagcgttatacaacggatcaccttgcggagcttgaatcggagattaacggcgcggacgacaaaataatcgaccttgaaaaaagactcttttttgaaatacgcgaagagacgaaaaaagtcttgccgttttgtccgtatgcgcccgccgccttgcggaagttgacactgcgcagtcgcttgcgaaagccgcttcaataa

SEQ ID NO: 52118 - protein, 584 aa, Unknown
  Obtained from environmental sample
  DOMAIN (132)...(266): MutS domain II
  misc_feature (1)..(584): Xaa is any amino acid
MQAKTRKNKKTMDELKTSPMLEQYRRIKKQQEGNILFFRLGDFYEMFAQDAVEVSALLNLTLTSRNGLPMCGVPYHAAKSYIARLLKLGKKIAICEQLSAPGKQKVIEREVVEIITPGTTVDDDFLDKGSSNYLCCLASGGNSNGLSFSYIDLSTGDFFSTSFSSEGILRQELERLSVKELLVQESLLEEQKEIASAIYDRPSVVLNRWADWFFDPAQAKSRLEKQFGVSNLKSFGMEENSPEIISAGALLDYLDTTSKSILSHIRTIKVYRDSEYMGIDESSQRNLELLYNQRDGEPRFSLLEVMDETKSSMGRRLLKRRILHPLRNVEKINKRLDMVEDLYRDQGRLSKLRELLGKTSDLERLCSRLAMDKAHARDMLAIKNAIFCFFAVKEILNTEFDGRKICFECDEQESINNFDSLLQLQDLLEKGIKEEPSVFLNEGNLIKDSFNKELDDLRSMRDNSRQILEQYLEEEKQETGITSLKIRYNRLIGYFFEVKKNSLDKVPKHFIRRQGMADGERYTTDHLAELESEINGADDKIIDLEKRLFFEIREETKKVLPFCPYAPAALRKLTLRSRLRKPLQ

SEQ ID NO: 52119 - DNA, 840 bp, Unknown
  Obtained from environmental sample
  misc_feature (1)..(840): n is a, c, g, or t
ttgtccgtatgcgcccgccgccttgcggaagttgacactgcgcagtcgcttgcgaaagccgcttcaataagaaattggacccgccctgtactgaacgaaagctcaaaacttgaaatttacgaaggacgccaccccgtggtagaagagcatatcagcaggggcgagtatataccgaacgatattttgttaaatacagagaaagggatatccttcgccatgataacaggtccgaatatggcgggaaaatccacatatttgcgcagtgcggctcttataacgataatggcgcaggcgggcagttttgtaccagcttcgcaggcaagcatcggtatatgcgaccgtatttattgcagggtaggcgcttccgacaacttggcgagaggagagtcaacctttcttgtcgaaatgaatgagaccgcttttattttgaacacggcgacagaaaaaagccttgtaatcatggacgaggtgggcaggggaacgggcacaaacgacgggctttcaatagcgtgggctgtaagcgaggaacttttaaacagaataggatgcagaacgcttttcgccacgcattttcatgagctttcgcttttatcgcatcctaatctcgctaattattcaatggaagttttggagcanggagaaaaaatcgtttttttaaggaaactganaaacggtccagccgccgagtcctacggtcttttcgccgccatgcttgccggtctttcccgtaatgtcctagacagagctgggcaaattatgaaactcttaaaagaacgggacgccgatttaaccgatactttcggagacaagattgttaaccatggaaaaaagcagggttaa

SEQ ID NO: 52120 - protein, 279 aa, Unknown
  Obtained from environmental sample
  DOMAIN (26)...(259): MutS domain V
  misc_feature (1)..(279): Xaa is any amino acid
MSVCARRLAEVDTAQSLAKAASIRNWTRPVLNESSKLEIYEGRHPVVEEHISRGEYIPNDILLNTEKGISFAMITGPNMAGKSTYLRSAALITIMAQAGSFVPASQASIGICDRIYCRVGASDNLARGESTFLVEMNETAFILNTATEKSLVIMDEVGRGTGTNDGLSIAWAVSEELLNRIGCRTLFATHFHELSLLSHPNLANYSMEVLEXGEKIVFLRKLXNGPAAESYGLFAAMLAGLSRNVLDRAGQIMKLLKERDADLTDTFGDKIVNHGKKQG

SEQ ID NO: 52121 - DNA, 384 bp, Unknown
  Obtained from environmental sample
  misc_feature (1)..(384): n is a, c, g, or t
atggcaacctccgttgcgcgtgtgtaccgcgcccggcggagcggcgtcaatccggcggacacgggaaggtctgccgaaaataaatacaggtcttttcttggcttgatttttggtctgcgttcttgcaataccaaagcacattatgaccaaaaggagccggccatgttggtttctttgtcgaaactcaggatcaatcccggaaagtatgtggctatggccgaacagcaggatatttatatcaccaagaacggaaggcgagttgccaaactgacgagcgccaagcaaaacaaaatagcttccgccaaggctcttttcggtatcctgcctggtgacgttgacctcgccgacgcgcgggaggaacggttaacacgatcaaggcgctga

SEQ ID NO: 52122 - protein, 127 aa, Unknown
  Obtained from environmental sample
  misc_feature (1)..(127): Xaa is any amino acid
MATSVARVYRARRSGVNPADTGRSAENKYRSFLGLIFGLRSCNTKAHYDQKEPAMLVSLSKLRINPGKYVAMAEQQDIYITKNGRRVAKLTSAKQNKIASAKALFGILPGDVDLADAREERLTRSRR

SEQ ID NO: 52123 - DNA, 1215 bp, Unknown
  Obtained from environmental sample
  misc_feature (1)..(1215): n is a, c, g, or t
ttgacgcttttacgcggggggtggagtcgaacaaacgcgaattggccgcgtacgatattttttttgtgtcaaggaagcgcggcgacgcggacagggcggagaaagatgtacgcgctgttaaagaaagagttcccgtcgtctacgcactacgcccgtgtctccgccgagatggatttggcgaagggcgatacggctaaggctttgtccgctttcgaggcgataaaggataaggacgccaacgactggttcgccgtggcccgtgtaagcgcggcgctcggtcaaaaggcgaaggcggagagcgctttggccaaggtgccggacgacggcgtttggaagcgggacaagagcgcggtccgcgcaaagctggcgtttaacggcggcgactacaagggcgcgtatcaggcgtataaagacgccttaagcgcaagcggtaaggacggcggggccgacgccgacgccattgcctacaacatgctcttcgcggcctacaagggcggtatgcacaaggaggccatggaggcggcggaagaggccgttaagagggcctcgggcagcgcccgcgccgagatctgccgcactgccggcgactgcgccgtggccgccaaaaactgggccgacgctaagacttggtttacaaaactctcaaccatagaacccggcaacgccgccgtccaatacaatatagccgtggcccactacaacctgggcgaggtggaggagtcctacaaccgctaccaaaaagcgagagagctggacaagaagatacagaataaggacatagagctcaggtacgagcaatttaagcggggcggcccgtcttcgcaaaaagaggtaacgctgtcgaacaaaacgcagaacgactcgctggacacgtggtacaatagggcggtggatttacagaacgcgaaaaaggccgatcaagccgaagccctgtataagaagatattggaacaagacccggcgttcagctacgcttggaataatttgggcgcgatctacggggcgaggggcgacttggatcaggctgagatcgcctatcttaaagcgttggacgcgcaaccgtctcccgaggcgtacgcgaacttggcgaacatctacatagccaaaaacgaaaacgccaaggctgcggagatagtggctaagggcttggagaaaaaccctaacagcgcggcgctcaagcagttggataggaaggttaggggagggaaaaagtga

SEQ ID NO: 52124 - protein, 404 aa, Unknown
  Obtained from environmental sample
  DOMAIN (289)...(322): Tetratricopeptide repeat
  misc_feature (1)..(404): Xaa is any amino acid
MTLLRGGWSRTNANWPRTIFFLCQGSAATRTGRRKMYALLKKEFPSSTHYARVSAEMDLAKGDTAKALSAFEAIKDKDANDWFAVARVSAALGQKAKAESALAKVPDDGVWKRDKSAVRAKLAFNGGDYKGAYQAYKDALSASGKDGGADADAIAYNMLFAAYKGGMHKEAMEAAEEAVKRASGSARAEICRTAGDCAVAAKNWADAKTWFTKLSTIEPGNAAVQYNIAVAHYNLGEVEESYNRYQKARELDKKIQNKDIELRYEQFKRGGPSSQKEVTLSNKTQNDSLDTWYNRAVDLQNAKKADQAEALYKKILEQDPAFSYAWNNLGAIYGARGDLDQAEIAYLKALDAQPSPEAYANLANIYIAKNENAKAAEIVAKGLEKNPNSAALKQLDRKVRGGKK

SEQ ID NO: 52125 - DNA, 1755 bp, Unknown
  Obtained from environmental sample
  misc_feature (1)..(1755): n is a, c, g, or t
ttgggcgccatcaacatgcaggagggtaagacggcaaccgcccttgagtacttcgccaaggcctacaagggtgcgccgactaaccaagacgcttggaacttttactcatacgggttattggtcgcaaaggacacggcaggggctataaccgtgcttaaaaatgtcggggacaacccggaggcgctggcgcagcttggccggatagaggggttgcggaaacactacgcgcaggccgcggagtacttgtccaaggccgtgaatcgcggagcttcgcctcaggctatgctcgacttggcgtcggtgcagatcgacggcggcaagtgcggcgacgccttatccgttttgtctaattacttcggcaaggagacgaatccgagcatagattcgtggctgctcgccggattcgccgccaaagagtgccacggcgctgccaaagcgctcgaatactatgaaaagggattgaaacgccacccgcgcgatccgctcctgatgcaaaacgccgggcagatgtatttctcgctgaagaattacgctaaggctgaggatatgtggagcggcgtcgacaactcctactccgatccgcagatgtactacatgcgggcggtggcggcgcgtttgagaaatgatttcggggcggcggagcggcacataaaaaaagccatatcgatggacgaaaaagccgattactacgactttttgggcgtgctcagccacgcgaagggggacggcaaagccgccgaggagcactttaaaaaggcgttgaagatagatcccaacaacatgagcgcgcagctgaatctggcggtgaagggcaagaacgccgccgatttggataaatcgatagaggaggcgtctaagcggttctcttcttgcggcaataattgcggcgacgcggcgttgcagttgtctatcttgtactaccaccaaaagaaatacgataaggccgtatctgccctcgaatcgctcaaagacgcggataaagatatccgtgtgtaccgccatatagctatttacaatagggaattgcagagattcgataaagcggccgccgcgttggaagccgccgtcgcgaaatttccgaacgacctgcaagcgcagtacgagttggcggaggcctatctatcctccggcaatccggctaaggccgtaaagatatttaccgccttagcacccaaatggaagacggacgtctggcgtcttcattatcagctcggttacgcctacatggagcagaacgagctgacaagcgcgaaagcggcgtttgagaagagcatggcggccaaaaaagacaatccggcggcgcgggcgctcttggcgttcgtcctcaaccgtatgggagagacggacaaggccgttgatcagtgggaaaaaaccgtcaaagaggacggcaataattcaacggttcatataaatctcggattgtcgtacgagagcaaagggcagtacgacaaggcgcttgagagctacaagaaggcgcagtcgctcgacccgtccgacaaggccgtctacatcaacttaggcaacgcctatcagggattgnggaggaccgccgaggcttttgacgcttttacgcggggggtggagtcgaacaaacgcgaattggccgcgtacgatattttttttgtgtcaaggaagcgcggcgacgcggacagggcggagaaagatgtacgcgctgttaaagaaagagttcccgtcgtctacgcactacgcccgtgtctccgccgagatggatttggcgaagggcgatacggctaa

SEQ ID NO: 52126 - protein, 584 aa, Unknown
  Obtained from environmental sample
  DOMAIN (398)...(431): Tetratricopeptide repeat
  misc_feature (1)..(584): Xaa is any amino acid
MGAINMQEGKTATALEYFAKAYKGAPTNQDAWNFYSYGLLVAKDTAGAITVLKNVGDNPEALAQLGRIEGLRKHYAQAAEYLSKAVNRGASPQAMLDLASVQIDGGKCGDALSVLSNYFGKETNPSIDSWLLAGFAAKECHGAAKALEYYEKGLKRHPRDPLLMQNAGQMYFSLKNYAKAEDMWSGVDNSYSDPQMYYMRAVAARLRNDFGAAERHIKKAISMDEKADYYDFLGVLSHAKGDGKAAEEHFKKALKIDPNNMSAQLNLAVKGKNAADLDKSIEEASKRFSSCGNNCGDAALQLSILYYHQKKYDKAVSALESLKDADKDIRVYRHIAIYNRELQRFDKAAAALEAAVAKFPNDLQAQYELAEAYLSSGNPAKAVKIFTALAPKWKTDVWRLHYQLGYAYMEQNELTSAKAAFEKSMAAKKDNPAARALLAFVLNRMGETDKAVDQWEKTVKEDGNNSTVHINLGLSYESKGQYDKALESYKKAQSLDPSDKAVYINLGNAYQGLXRTAEAFDAFTRGVESNKRELAAYDIFFVSRKRGDADRAEKDVRAVKERVPVVYALRPCLRRDGFGEGRYG

SEQ ID NO: 52127 - DNA, 1086 bp, Unknown
  Obtained from environmental sample
  misc_feature (1)..(1086): n is a, c, g, or t
ttggtgttttctctgacagtcgcggtttatgaactccgcatggacgaccaattctggccaatcatttttaaaaatatccttttcatactggtatcgtccgctattgtcatttttatcggcattgcggtaacaatgatttttacgccgggaagaatcccgataggaaccatcgagcagatggaagtattaagtttgaatgccggagacaatttgctggatatattcccgtccaatatgctcagcgtaatctcgacaggcggaatatacctctttccggcgtgtatattcgcgttctttctcggactagggcttgattatgaccgtaactattcaaaacctgttatatcgctcgtggattcgctttcacgcattttctaccatatcgcttcatttttttccgagattttaggatttgtattaatcgtacttgccgcgttttgggcagtccgctttaacggattattacaggcaaaagtttacaaagatttacttgtccttttgggagtattcagcgtcgttttgtgttttggcataatgccgctctttttatacttattaaaaccaaaaacaaatccttggcatattttatacggttttttgggaccggcaatcgcggcgtttttttcgggagacattaattttgcaattccggtgcttatacgccacacaaaagaaaatttcggcataagacgccgttcaagctccatatccctggcgttatttgcaactttctgcaggtgcgggagcgccatggtagcggcggcggcgtttattgtcattattaaatcatattcgtatttaagaatcggcacgatcgatttattcactatcggcttatacgcctttttattttcttttattcttgcgcgccaccccggcgacggagcattcatcgcgttagccgctctttgccttacctacggcggcggagcatacagcgcgggttacctgattttaaagccaatggctttttaccttgcggcaataggcgcttttatcgatgtaatgctcaactctttctgcacctatgttctggcgcgaacaaacgggtttattgaggaaaaaaatctggtgcattttatttaa

SEQ ID NO: 52128 - protein, 361 aa, Unknown
  Obtained from environmental sample
  DOMAIN (1)...(348): Sodium:dicarboxylate symporter family
  misc_feature (1)..(361): Xaa is any amino acid
MVFSLTVAVYELRMDDQFWPIIFKNILFILVSSAIVIFIGIAVTMIFTPGRIPIGTIEQMEVLSLNAGDNLLDIFPSNMLSVISTGGIYLFPACIFAFFLGLGLDYDRNYSKPVISLVDSLSRIFYHIASFFSEILGFVLIVLAAFWAVRFNGLLQAKVYKDLLVLLGVFSVVLCFGIMPLFLYLLKPKTNPWHILYGFLGPAIAAFFSGDINFAIPVLIRHTKENFGIRRRSSSISLALFATFCRCGSAMVAAAAFIVIIKSYSYLRIGTIDLFTIGLYAFLFSFILARHPGDGAFIALAALCLTYGGGAYSAGYLILKPMAFYLAAIGAFIDVMLNSFCTYVLARTNGFIEEKNLVHFI

SEQ ID NO: 52129 - DNA, 546 bp, Unknown
  Obtained from environmental sample
  misc_feature (1)..(546): n is a, c, g, or t
atggacggaaaaaatattttatccgatggtattgatattctttgcaaaagcgatgaggaaataaaaaacctcatcgccccctgccgcgaaaaagtcatcgcgctccttaatagttacataaaagaaatagaactttttaattccgcgtacggacttgtcagcgtaagcgatacaaatgagcttatcattaaacatatactcgattcactcgcgccgcttggaataattattaaactgattaaaaatattcacgcggaaaacactccgcaaatagcggacgcgggatcgggcgcgggattgcctggcattccgctggcgattgctctgccgcaatgtgattttaccctcattgagcgaatggggcgcagggcgggatttttattcaacacaaaggcggtattgtctctttccaacattaatatagaagaaagcgaattgggaaaaacgggaagcggtcgttttagccttgtaacttttcgcgcctttaaaccgctggaaacaaaattgcttaaaacgctttttaaacctgcgcgccggggggcataa

SEQ ID NO: 52130 - protein, 181 aa, Unknown
  Obtained from environmental sample
  DOMAIN (32)...(181): Glucose inhibited division protein
  misc_feature (1)..(181): Xaa is any amino acid
MDGKNILSDGIDILCKSDEEIKNLIAPCREKVIALLNSYIKEIELFNSAYGLVSVSDTNELIIKHILDSLAPLGIIIKLIKNIHAENTPQIADAGSGAGLPGIPLAIALPQCDFTLIERMGRRAGFLFNTKAVLSLSNINIEESELGKTGSGRFSLVTFRAFKPLETKLLKTLFKPARRGA

SEQ ID NO: 52131 - DNA, 1167 bp, Unknown
  Obtained from environmental sample
  misc_feature (1)..(1167): n is a, c, g, or t
atggcgtgggcgcgcactgtggaaaatttaatcggaaacccgctgtaccattggactcatcttgaattacagcgttactttgatattcacgaaccacttacggaaaagagcgcgcccgcgatttgggaaaaagcaaacgctattcttcaaactccgcagctttccgtaaaaggcatttttgaaaaaatgaatatttacgctgtaggcacaacggatgatcctatcgattcgcttgaacatcatcgcgctattgccggcggttccgctccaatcggagaaataaagacaaaagtaattcccacttttcgccccgataaagctcttgaaatcaacgatctccattttatcgaatacattgaatcattgtcccgcgcaagcggtataaacattaaaactcccgatgatgttcttgccgctcttgaaaaacgtttggatttttttatttcgacgggctgccgcgcttccgatcacgcgcttgaatatccgccgtatgttgaaacatctttcaaggaagttgaaaaaacttttaaaaaagccatgaccggaaaagaagcgacaacagaagaagcggacgcttacaaaacattgatgctcgcttctttgggaaatatttacgccgccaaaaatatcgtaatgcagcttcatctttcctgtattcgcgatataaacacaaaacaattaattaaattgggagtaaacacgggctttgacgccgttcatgataaaacattatgcgacaatctttccgcccttcttgatcttatgagtcttggcggcaagaacgcgaacggtcttcccaaaacaattctctattcattgaacccgaaagactactaccccattacgacaatcatgggcggttttcaggactcaagctgtatcggtaaaatgcagttaggttccgcgtggtggttctgcgacaacagggacggcatggaagagcaacttcgcgtccttgccaacttagggatcttacccgcctttgtgggaatgttgacagacagcagaagctttctctcctacccgcgccatgaatactttcgacgcattatgtgcaacttaatcggcaagtgggttgaaaacggcgagtatcctaatgacacgcaaaaattggaacaaattgtgagagatatttcatttggaaacgcgaagagatactttggttaa

SEQ ID NO: 52132 - protein, 388 aa, Unknown
  Obtained from environmental sample
  DOMAIN (1)...(388): Glucuronate isomerase
  misc_feature (1)..(388): Xaa is any amino acid
MAWARTVENLIGNPLYHWTHLELQRYFDIHEPLTEKSAPAIWEKANAILQTPQLSVKGIFEKMNIYAVGTTDDPIDSLEHHRAIAGGSAPIGEIKTKVIPTFRPDKALEINDLHFIEYIESLSRASGINIKTPDDVLAALEKRLDFFISTGCRASDHALEYPPYVETSFKEVEKTFKKAMTGKEATTEEADAYKTLMLASLGNIYAAKNIVMQLHLSCIRDINTKQLIKLGVNTGFDAVHDKTLCDNLSALLDLMSLGGKNANGLPKTILYSLNPKDYYPITTIMGGFQDSSCIGKMQLGSAWWFCDNRDGMEEQLRVLANLGILPAFVGMLTDSRSFLSYPRHEYFRRIMCNLIGKWVENGEYPNDTQKLEQIVRDISFGNAKRYFG

SEQ ID NO: 52133 - DNA, 921 bp, Unknown
  Obtained from environmental sample
  misc_feature (1)..(921): n is a, c, g, or t
gtgatggttgtgccgggcattcacgactcgccggagcggctgggttacgccggacggttgcttgcggataagaagctgtttatatgcggcgcgtttgacggcgatatccgtcgggcggttctgtcggacgagtacggcgaggtgaatttttggttgcttccgtttgtcaaaccggtttccgttaggggaatgttcggcgattgcgaggtttccgcacataacgaggcggtggcggccgcgattgaggccgccgacgttgattactccgctcggaatgtgcttgtcacccaccagttttacgccaagaccggggcggaaacggaacgtagcgagtcggagattaatcccgtgggagggctcgacgttgttgatgtaggtatcattgagcggtttgactatgccgctcttgggcatttgcaccgcagtcagaatgtcggcgggaataattgccgttacgccggctctccgctcaagtattcgttctccgaagttcggcaagagaagtcaataagcgttgtggaactccgcgaaaaaggtaatttgtccgtctccgcattgccgcttgtaccgttgcacgatatgcgtgagattaaagggccgctcgctgaattaataagcgacgaagtgtcgtctcttgccgataaaaatgattatttgcgtgtcgtgcttacggacgatgaggagatagttgacccgatgggaaaaatccgcagcgtttaccccaacgtgatggcgctttgttttgagaacgcgagggcgggtatggatattgccggaatggccgcaaattcggatcgggtctcggcgctgtcgccgtacgagttgttctgcgagtttttcttggaggtgaacggctccacgatgagcgtcgaacaggcggcgcttgtgaggaggcttatggacgcgggggctggggaatga

SEQ ID NO: 52134 - protein, 306 aa, Unknown
  Obtained from environmental sample
  misc_feature (1)..(306): Xaa is any amino acid
MMVVPGIHDSPERLGYAGRLLADKKLFICGAFDGDIRRAVLSDEYGEVNFWLLPFVKPVSVRGMFGDCEVSAHNEAVAAAIEAADVDYSARNVLVTHQFYAKTGAETERSESEINPVGGLDVVDVGIIERFDYAALGHLHRSQNVGGNNCRYAGSPLKYSFSEVRQEKSISVVELREKGNLSVSALPLVPLHDMREIKGPLAELISDEVSSLADKNDYLRVVLTDDEEIVDPMGKIRSVYPNVMALCFENARAGMDIAGMAANSDRVSALSPYELFCEFFLEVNGSTMSVEQAALVRRLMDAGAGE

SEQ ID NO: 52135 - DNA, 1212 bp, Unknown
  Obtained from environmental sample
  misc_feature (1)..(1212): n is a, c, g, or t
ttggatctaaaaggaaaagcggttgagacgcttaccaacggagttatgaaagaacttgataaaaagttcgcggagatggtcgctaaagaggctctgtcggcggcggttaaggcaaatatcgtaaaaaatctctctgaaatgtccaggcctatagtaaaaaaattcattgacgaatcctcatcgggcaaactgcctaatcagaaggaacttgtgaattcggttatgaaagatattacgcctcgtgtacaggagcttgtaaaagtcgctttaacggatggcggcaatttggatgcaatagcagtaccggcaggcgcggccggctttgctccggctacagggcaaacggcaacatccgccagttatgacgatgaaaaagattttaccgtagaaataataaaagagagtaactccgtgcgaattaccaaatacgccggaaaaaatacggaacttaagattccgccgcgcataggcgaccgcccggttacggaaattggagaacgcgcgtttgtgaaaaaagggttggtaagcgtagtcattcccgataatgttatttttatcgggaacctggcgtttgcggagaaccagatagccgacataagcataggcgcgaatgtgtacgttgcaaataacgcttttgaaaataccgggtccaattcttttttccccggattttacaacagccagggccgcagggcgggaatatacaacatcagttggagatgggtttccgccgccgcgcctcagccgtcggcgcagtctgcggcacagcccgtacgcgccggatctaacaacacggtatccgcaagtgtgcctgctaccgcagcggcgatacctgcgccggaatcggcagtagtttttgccggaaacggacacaaatacgaagtaattaaaaattcagtgacttggaaagaagccaaaaacgattgcgaaaaacggggcggatatcttgcaacggttaccagcaaagaagagctggcatttattcatgatttaattaaaaaaggcaataataattattggcttggcggttaccgtgaaaaaaatatttggaaatgggtaacgggtgaagattttacctttaaaaaatggggataccgtcaacctgataattatgaaggaatagaagataaattggggatgaggagcagcgacggttcctggagtgattatcctaataatattaagatgggttacatctgtgaatgggactga

SEQ ID NO: 52136 - protein, 403 aa, Unknown
  Obtained from environmental sample
  DOMAIN (298)...(402): Lectin C-type domain
  misc_feature (1)..(403): Xaa is any amino acid
MDLKGKAVETLTNGVMKELDKKFAEMVAKEALSAAVKANIVKNLSEMSRPIVKKFIDESSSGKLPNQKELVNSVMKDITPRVQELVKVALTDGGNLDAIAVPAGAAGFAPATGQTATSASYDDEKDFTVEIIKESNSVRITKYAGKNTELKIPPRIGDRPVTEIGERAFVKKGLVSVVIPDNVIFIGNLAFAENQIADISIGANVYVANNAFENTGSNSFFPGFYNSQGRRAGIYNISWRWVSAAAPQPSAQSAAQPVRAGSNNTVSASVPATAAAIPAPESAVVFAGNGHKYEVIKNSVTWKEAKNDCEKRGGYLATVTSKEELAFIHDLIKKGNNNYWLGGYREKNIWKWVTGEDFTFKKWGYRQPDNYEGIEDKLGMRSSDGSWSDYPNNIKMGYICEWD

SEQ ID NO: 52137 - DNA, 432 bp, Unknown
  Obtained from environmental sample
  misc_feature (1)..(432): n is a, c, g, or t
gtgattaggaaacaggatttactgaaaaacgtattaactgacatagaggaaggcattagggacggtatcaatgcggatacccttgctaaaaaacatactctttcatcaatccatttgcaaaggctgtttaaattaacatttaatcagccgcttggggcttacatacgttcccgcaaactgacagcaagccttgagagcttactcagcacaaattccacattgataaacattgccttggactatggttttgagtacgagcagtcatatttaagggcttttaagcgggaatttggcgttactccgggcgctatccgtaaaacagggcggacagtaaaagtaacgcctcctattactggcaacgatcccgactccccagttcttgcagggcttcctctatcagcgggtccagttcaagcgattcgtagagactga

SEQ ID NO: 52138 - protein, 143 aa, Unknown
  Obtained from environmental sample
  misc_feature (1)..(143): Xaa is any amino acid
MIRKQDLLKNVLTDIEEGIRDGINADTLAKKHTLSSIHLQRLFKLTFNQPLGAYIRSRKLTASLESLLSTNSTLINIALDYGFEYEQSYLRAFKREFGVTPGAIRKTGRTVKVTPPITGNDPDSPVLAGLPLSAGPVQAIRRD

SEQ ID NO: 52139 - DNA, 1068 bp, Unknown
  Obtained from environmental sample
  misc_feature (1)..(1068): n is a, c, g, or t
atgctcaagggccgcgacgtgcagatagtcataaggaacgggcgcatatacgcgcacggcccggaaaactgccgcgaagctgtagaagacgctttaagccgccttatcggaatatcgggatgggccgaaaccggcagtttggccaaaactattgaggctgtaacggaagcctgtatagaagagggccgtaaactgcaagcccggaacattgctacctttaaaattgaagcgcggagaaccgacaagagcttcccccttgattcttacgccctgcgctgcaaatgcggcgaggccgtgctggacgcggttcccggcctgaaagtcgacgtacacaaccctcgagcggtcattcatattgagattagggagaaggcttatatatatggcatggaccgcaagggacttggcggacttcccgtaggaaccgccggccgcggcctcctgcttctttcgggaggcatagattccccggtggcgggcttcctcatggcttcgcgcggaatgggaatagacgcggtgcatttccatgcgtacccctacacgtcacaggaggcgaaagaaaaagttgtccgccttgccgaaatcctcggcgcttacaccatggggggtcgcctgttcaccgtgggctttaccaaagtgcagatgcggataaaggatagggcgcctcttccctggtccactgttctgctgcgcatggcgatgatggactgcgccgaanaaatagcccgcagaataaaaagcaaatgcctgattaccggggagagcctctcacaggtggcgagccagaccatagaaaacctcacctgcacccaaagccgcataacgctccccgtgttaaggccccttatcggcacagacaaagactccattaccagaaaggccaaacaaatcggcacatacgcaacgtcaatagacccttacgaggactgctgcgtcctgttcagccctgttcaccccgtcctgcgcggcgatcccgcggaagcaatcagtctctacgaatcgcttgaactggacccgctgatagaggaagccctgcaagaactggggagtcgggatcgttgccagtaa

SEQ ID NO: 52140 - protein, 355 aa, Unknown
  Obtained from environmental sample
  DOMAIN (145)...(298): ExsB
  misc_feature (1)..(355): Xaa is any amino acid
MLKGRDVQIVIRNGRIYAHGPENCREAVEDALSRLIGISGWAETGSLAKTIEAVTEACIEEGRKLQARNIATFKIEARRTDKSFPLDSYALRCKCGEAVLDAVPGLKVDVHNPRAVIHIEIREKAYIYGMDRKGLGGLPVGTAGRGLLLLSGGIDSPVAGFLMASRGMGIDAVHFHAYPYTSQEAKEKVVRLAEILGAYTMGGRLFTVGFTKVQMRIKDRAPLPWSTVLLRMAMMDCAEXIARRIKSKCLITGESLSQVASQTIENLTCTQSRITLPVLRPLIGTDKDSITRKAKQIGTYATSIDPYEDCCVLFSPVHPVLRGDPAEAISLYESLELDPLIEEALQELGSRDRCQ

SEQ ID NO: 52141 - DNA, 852 bp, Unknown
  Obtained from environmental sample
  misc_feature (1)..(852): n is a, c, g, or t
ttgacgcgcttaaactttccgcaaaggaagatttattgcaaagcagcgcgtcggatatgtccgcagacgaggaatagaggaggtattaatatgttaatccgtgaagctctggcgcagggaaactcagatttaaaatacgccggaataaaaaccccgggactggacgcaagtttattgcttgcgtacattttaaaaaccgatcgtaccaaacttatagcaagagaaacagacgatctttcagaagaagaatgtaaatcattttgcgaacttatagaaagaagggcaaatggcgaatgtaccgcgtatattatcggtaaaaaagaattcagaggattagaattcgacgtaaacccatttgttcttgttccaagacccgaaaccgaaactcttgtggaaacagcagtagatattattcaaaaaaaattacaagataaatctcatgccaacatattagacctttgtacaggaagcggagcggtagcaatctccttaaaaaacgaaatacccttgtgcgaaattacagcgacagatatttcatctaacgcgcttaaaatcgcggtacagaacgccgaaaaacttctaggcgataatcatatacatttctttcagggtgatttatactccgctctcccctctcccctgacctcaccattctcgctaatcgtttcaaacccgccgtatattgcttccgatgaaatacaaaccctatccgcggaagtgcagaatgaaccgcgtctagcgttagacggcggggcttccgggctggaaataataacgcaaataataaagaaagcccccgagtatttaaaacaaaacggatatttgctatggaagccgatccccggcaaatga

SEQ ID NO: 52142 - protein, 283 aa, Unknown
  Obtained from environmental sample
  DOMAIN (127)...(280): Methyltransferase small domain
  misc_feature (1)..(283): Xaa is any amino acid
MTRLNFPQRKIYCKAARRICPQTRNRGGINMLIREALAQGNSDLKYAGIKTPGLDASLLLAYILKTDRTKLIARETDDLSEEECKSFCELIERRANGECTAYIIGKKEFRGLEFDVNPFVLVPRPETETLVETAVDIIQKKLQDKSHANILDLCTGSGAVAISLKNEIPLCEITATDISSNALKIAVQNAEKLLGDNHIHFFQGDLYSALPSPLTSPFSLIVSNPPYIASDEIQTLSAEVQNEPRLALDGGASGLEIITQIIKKAPEYLKQNGYLLWKPIPGK

SEQ ID NO: 52143 - DNA, 696 bp, Unknown
  Obtained from environmental sample
  misc_feature (1)..(696): n is a, c, g, or t
atgtactcccgttttgcggaaaccaagggctggaagttagaagtaatgaattcaaacgatacggaattgggcggcacaaaagaaattgttttttcaatcagcgggaataacgtatacgagaatcttcgttatgaatcgggggttcacagggtgcagagggttcccgcgacggaagcgtcggggaggatacacacttccgctgtaaccgtggcggtcttgccggaagccgacgagacggaaattgacataaaacaggaagaccttcgcattgacgtaatgcgcgcgggcggtcccggcgggcagtgcgttaacactacggattcggctgtgcgcataacgcacattcccacaggagttacagtacattgtcaggatgagaaaagccagataaaaaacaaagccaaagctatgcgcatacttagggcgcgtatttacgagatggaagaagcaaaagccgccgcgcagagagccgaggcaagaaagagtcaggtaggttcaggcgaccgctctcagagaatcagaacttacaattttccgcaaaatcgcctaacagatcatcgcatcaatcttacgctttataaacttgatattataatgcaaggagaaacatcggaactttttgacgcgcttaaactttccgcaaaggaagatttattgcaaagcagcgcgtcggatatgtccgcagacgaggaatag

SEQ ID NO: 52144 - protein, 231 aa, Unknown
  Obtained from environmental sample
  DOMAIN (1)...(45): PCRF domain
  misc_feature (1)..(231): Xaa is any amino acid
MYSRFAETKGWKLEVMNSNDTELGGTKEIVFSISGNNVYENLRYESGVHRVQRVPATEASGRIHTSAVTVAVLPEADETEIDIKQEDLRIDVMRAGGPGGQCVNTTDSAVRITHIPTGVTVHCQDEKSQIKNKAKAMRILRARIYEMEEAKAAAQRAEARKSQVGSGDRSQRIRTYNFPQNRLTDHRINLTLYKLDIIMQGETSELFDALKLSAKEDLLQSSASDMSADEE

SEQ ID NO: 52145 - DNA, 951 bp, Unknown
  Obtained from environmental sample
  misc_feature (1)..(951): n is a, c, g, or t
atgtttgaggctaccccgcttggcgcgaacttctggagtcaggattatcgcgttatagactgtaatcaggaatcgctcagattgtttgatatatcaagtaaacaggagtttatcgacagatttttcgatttatcaccggaatatcagccgaacggggaaacaacattcgaagagggcattaaatatgtcaaaaaggcgtttgaagagggttacaatcgttttgaatggacacaccagaaattaaacggcgaacccattccgtgtgaaattacgcttattcgcgttaaatataaagacggcaatattgttgtgggatacacacgcgatttacgcgagcaaaaggcaatgctcgccgaaatatacagggaaagcgaaaaatcccgtgcaatggcccattggtataattcaattcttaatgcgataccgctgcccataagcgttacagacgcggataccaaatggacgtttattaacacggcagttgaaaagttttttgggatgacgtttgaagacgccataggcaagccgtgcagtaattggggcgccagcatctgtaatacgccggactgcggtatcgcctacgccaaaaggggccttaagcaaacatatttttcagagggggattcatcgtatcaggtcgatgttaccatacttaaagatctgaacggcacaacgatggggtatatcgaagttgtgcaggatattaccaatctgaaacagatggcaaaaaagcaggcggatgcggaagccgccaaccttgccaaatccacttttttggcaaaggtaagccacgaagtacgtacgccaatgaacgctattttgggtattaccgaaattcactgcaggacgaaacgcttccggcaaagacacaggaggctttgggtgaaatttacaattcgggttatttgctgttgggcattatcaacgacatactggacctgtccaaaatag

SEQ ID NO: 52146 - protein, 316 aa, Unknown
  Obtained from environmental sample
  DOMAIN (2)...(115): PAS fold
  misc_feature (1)..(316): Xaa is any amino acid
MFEATPLGANFWSQDYRVIDCNQESLRLFDISSKQEFIDRFFDLSPEYQPNGETTFEEGIKYVKKAFEEGYNRFEWTHQKLNGEPIPCEITLIRVKYKDGNIVVGYTRDLREQKAMLAEIYRESEKSRAMAHWYNSILNAIPLPISVTDADTKWTFINTAVEKFFGMTFEDAIGKPCSNWGASICNTPDCGIAYAKRGLKQTYFSEGDSSYQVDVTILKDLNGTTMGYIEVVQDITNLKQMAKKQADAEAANLAKSTFLAKVSHEVRTPMNAILGITEIHCRTKRFRQRHRRLWVKFTIRVICCWALSTTYWTCPK

SEQ ID NO: 52147 - DNA, 1353 bp, Unknown
  Obtained from environmental sample
  misc_feature (1)..(1353): n is a, c, g, or t
ttgggtgaaatttacaattcgggttatttgctgttgggcattatcaacgacatactggacctgtccaaaatagaagcgggcaagctggaattgtcgccggtcaactacgatgtccccagcctgatcaacgacaccgttcatcttaatgttatgcgctatgacagtaagccgattgaatttgatcttcaggtggacgggaatatcccgacaacgctgttcggcgacgagctgcgcattaaacagattctcaacaacctgctttccaacgcgtttaaatatacaaactcaggcaaggttactatgtcggttacctgtgaggcgaagcagggagaagataacgttataatccttgttttccgtgtgactgataccgggcagggcatgaccgcggaacagttaaacaaactgtttgaagagtatacccgctttaacacggaagccaaccgcaaaaccgtgggtacgggcctgggtatggccattacgaaatacctcgtccggatgatgaacggcacaatttcggtggaaagcgaaccgggtaaaggctcggtgtttaccgtgcgaataccacaggggaccgttgacggatcgggcgtgttggacagagaattggcggaaaacctgcaacagttccgtcttggcaaggcggaacaaatgaaaaaggcgccgcaaattatacgcgagtatatgccctatggcaaggttttaattgtagacgatgtgggaacaaatctgtatgttgccaaaggattgctggccccctacagcctgacggttgaaacagtcaggagcgggtttgaagcgattgataaaatcaaagacggcgcggtttatgacatcatatttatggatcattttatgccggaaatggatggcatagtaacgacaaaaaaaatgcgtgaattgggatatacgcggcccatagtagcgctgacagctaacgccctggcggggcaggcggaaatgtttatggcaaacggttttgatgattttatttccaagccgatagatatacgccaactcaacgccgtgctgaacaaattggtgcgcgacaaatatccggcggaaacaattgaatccgcgcggctgcagaaagacagtggtaattttgttaacggcactattgccaatggcgcatcacggccttccataaacccggagctggcgaaaatgttttcgtggacgctaaaaagccgccgccgcgctggaaatactgcagagaaaagagggcaattacggagaggaagatataaaggagtatattattactgtccatgccatgaaaagcgcactggcgaacatcggcgaaacagcactttccgatgccgcgctgaaactggaacaggccgggcgtga

SEQ ID NO: 52148 - protein, 450 aa, Unknown
  Obtained from environmental sample
  DOMAIN (232)...(345): Response regulator receiver domain
  misc_feature (1)..(450): Xaa is any amino acid
MGEIYNSGYLLLGIINDILDLSKIEAGKLELSPVNYDVPSLINDTVHLNVMRYDSKPIEFDLQVDGNIPTTLFGDELRIKQILNNLLSNAFKYTNSGKVTMSVTCEAKQGEDNVIILVFRVTDTGQGMTAEQLNKLFEEYTRFNTEANRKTVGTGLGMAITKYLVRMMNGTISVESEPGKGSVFTVRIPQGTVDGSGVLDRELAENLQQFRLGKAEQMKKAPQIIREYMPYGKVLIVDDVGTNLYVAKGLLAPYSLTVETVRSGFEAIDKIKDGAVYDIIFMDHFMPEMDGIVTTKKMRELGYTRPIVALTANALAGQAEMFMANGFDDFISKPIDIRQLNAVLNKLVRDKYPAETIESARLQKDSGNFVNGTIANGASRPSINPELAKMFSWTLKSRRRAGNTAEKRGQLRRGRYKGVYYYCPCHEKRTGEHRRNSTFRCRAETGTGRA

SEQ ID NO: 52149 - DNA, 366 bp, Unknown
  Obtained from environmental sample
  misc_feature (1)..(366): n is a, c, g, or t
atgatcagatcggcacgaggtcccgccgacatggacgcgctgttagccctgcccggtgttggcagaaaaaccgccaacctggtattaatcgaagccttcgatctccccggcatttgtgttgatgtccatgtccaccgcatatccaaccgctgcggctggctgcgtaccgaaaatcggtacggaaccaaaacgcctgaggaaaccgagatgacactgcgcgagatactgccaaaaaaatactggaaagggataaacgcccttttggttctctacggacaaaacctctgccgtcctgtcagcccatattgttcccgctgcgtaattaaggaccattgcaaaagggtgggagtggagaaaagcaggtaa

SEQ ID NO: 52150 - protein, 121 aa, Unknown
  Obtained from environmental sample
  misc_feature (1)..(121): Xaa is any amino acid
MIRSARGPADMDALLALPGVGRKTANLVLIEAFDLPGICVDVHVHRISNRCGWLRTENRYGTKTPEETEMTLREILPKKYWKGINALLVLYGQNLCRPVSPYCSRCVIKDHCKRVGVEKSR

SEQ ID NO: 52151 - DNA, 1077 bp, Unknown
  Obtained from environmental sample
  misc_feature (1)..(1077): n is a, c, g, or t
ttgaatttcaaacagttatactataaaatactaaatgttcgcaaaaaaccggaaaaaaaattttatattcattggcgcagcgctgaattccgcgggaggatatttttgaaattatttttaaagttaaaagatattgttcttattgcagttataacagttttaattttttcaacctgtgtgtcatcgtctattgcgaaaaaaaatgaagaggcaaacgcggttattacggtagacgtcaatacaaagtatcaatatgtgcggggcttcggcggaatggaagttggatggagtaattttccgcgcaccggcgcgcgcgatacggaattattatttaaccctgataccggcattgggttaaatattctcagaataatgataatgccgtggaatacggatatagtcagaacaatgaaagctcttatcagcggcgacagacccgattattacgaaaatgtaaaaatagtaaataaatacggcggttatgttttggcaagcccgtggagtccgccgaaagagtggaagaccaataatgatttaaagggcgacggcagactggacgtaaagtattatcagaaatacgcggattatctgaaatcttttgcgttaaatatgtacgaaaacggcgctccgatttacgctgtttcaatacaaaacgaacctgattatcaagtcagttatgacgggtgtttatggacgcccaacgaaatgaaagatttctttttacaaacggggcattttacagacggcgtaaaaggtttcggcggcggcaggcagataccgtctgtccgaaccatgaacggcgaaacaatgggtaatccgaatataaataacgccgcgcttgacgcccccgaatcaagagcggttattgatattatcgggcgtcatacttacagcaacaggcagtaccgttacgcgaacgcgcttaatcatccgactgatccaaaagaagtctggatgacggaacataatattaacagcggaaataattcaggttattatgaggactcaacatggaattatgtgtggaaaatactgaacgacatcgatctaagcataagaataactcggccgatctga

SEQ ID NO: 52152 - protein, 358 aa, Unknown
  Obtained from environmental sample
  misc_feature (1)..(358): Xaa is any amino acid
MNFKQLYYKILNVRKKPEKKFYIHWRSAEFRGRIFLKLFLKLKDIVLIAVITVLIFSTCVSSSIAKKNEEANAVITVDVNTKYQYVRGFGGMEVGWSNFPRTGARDTELLFNPDTGIGLNILRIMIMPWNTDIVRTMKALISGDRPDYYENVKIVNKYGGYVLASPWSPPKEWKTNNDLKGDGRLDVKYYQKYADYLKSFALNMYENGAPIYAVSIQNEPDYQVSYDGCLWTPNEMKDFFLQTGHFTDGVKGFGGGRQIPSVRTMNGETMGNPNINNAALDAPESRAVIDIIGRHTYSNRQYRYANALNHPTDPKEVWMTEHNINSGNNSGYYEDSTWNYVWKILNDIDLSIRITRPI

SEQ ID NO: 52153 - DNA, 1881 bp, Unknown
  Obtained from environmental sample
  misc_feature (1)..(1881): n is a, c, g, or t
atgccgactgaacaagacctggtgagggccggagcgctgatcgcacgggaaagaaattttaaggatctgattgccatttttgtggagcaggcgcaggatgtttcacgcgctgaaaccgcggctttttacagttttaaaaacatggaagatcgcaaaagcgatctgaaattggtttttaaaagaggcagttacgaactccctgaggttatttcaggctcaagcgagcttgtccgctttctgcgcgaatgtcgtgaggctttaatctataacaacaaacacacggaaaagaccgatgcgtcggcgtcttttttaagggaagttcttatccatccggcaatgagaagcggaatggcgctcccgatcataacccagccgcgagagattggaattttgtttgtcgcgtcacgcacggtccaattttttaaccgccagattttttacttcctggactcgtatgccaagctggcggcgggggctatgcaaacatccctgctttttgacgagacgaaggcatcgctgcaaaagatcgacgctctggaacggtatcaggaatatgtttttaattccatgaccagcatgattattactaccgatccgaaagggcagatttattatttcaacgaaccggcggctgaggaaatgggtttaaaacatgaggatttaggccgcaatctaattgatacgtttaaaaattcaataacccccgaaactctggatacgattgtaaaaagccttgaaaacggcgatgaaattatcgggctggaaggaatttacaataacggggaaaaggaaatggactattcccttaacgttacgccgctcaggactccgcgcggcaggaaagagggctttgcccttctttttacaaaccagacccgcgaaaacgaattaaaacaaactgtgcaggctgtaagcgaggagcggcgcgttataaaaaacgccttttcccggatcctttcgccaaaagttatcgaccagattgttgccgatccttctcaaatgaagcttggaggggaaaaaagaaagatgaccgctatttttacggacatccagcgtttttcttccatatcttctgagcttcaggaacagtacggcgaggacggccccaaggtgcttgtaaacctgcttaacctttaccttaccgagatgagcaacgtagttcttgaaaatggcgggacgatagacaaatacgaaggtgacgccatcatcggtttctttggcgcgcctgtctggatggaagaccacgccgcacgggcctgccgcagcgccatattaatgaaaaggcgggaaattgaaattgtgggaagcgtaatgaaacccgacggcgaattttacaacccgcttaccaggctgatagaaaataaagtcatacggaagttgcgtccgctttacacccggcttgggattaacacgggcgacatggtggtgggcttcatgggaacccccgcgaaaatggattatacaatcatgggaaacgcggtgaacctggcagcccggctggaaggagtgaataaacaatacgacacccacggtatcctgataagcgaatataccaaagatcagataggagatgaatttgttgtctgtccgctgagcaaggttactgtggtaggcattcctgttccgtttaggctcttcgagctgcttgagattaagagcgacgctcccaagtcaatgctggatatggtcaaagtctgggaagggggatttgaagcttatgaaaactgcgattttgcaggcgcaaaaaaaaccttcgctgaaatttataaggaagacagcgaagatgccaccgcaaaactatacgtccagcggtgtgaggaatttattgcttctccgccgcctaagaaatggcacggagttgataatttaacagaaaaataa

SEQ ID NO: 52154 - protein, 626 aa, Unknown
  Obtained from environmental sample
  DOMAIN (338)...(550): Adenylate and Guanylate cyclase catalytic domain
  misc_feature (1)..(626): Xaa is any amino acid
MPTEQDLVRAGALIARERNFKDLIAIFVEQAQDVSRAETAAFYSFKNMEDRKSDLKLVFKRGSYELPEVISGSSELVRFLRECREALIYNNKHTEKTDASASFLREVLIHPAMRSGMALPIITQPREIGILFVASRTVQFFNRQIFYFLDSYAKLAAGAMQTSLLFDETKASLQKIDALERYQEYVFNSMTSMIITTDPKGQIYYFNEPAAEEMGLKHEDLGRNLIDTFKNSITPETLDTIVKSLENGDEIIGLEGIYNNGEKEMDYSLNVTPLRTPRGRKEGFALLFTNQTRENELKQTVQAVSEERRVIKNAFSRILSPKVIDQIVADPSQMKLGGEKRKMTAIFTDIQRFSSISSELQEQYGEDGPKVLVNLLNLYLTEMSNVVLENGGTIDKYEGDAIIGFFGAPVWMEDHAARACRSAILMKRREIEIVGSVMKPDGEFYNPLTRLIENKVIRKLRPLYTRLGINTGDMVVGFMGTPAKMDYTIMGNAVNLAARLEGVNKQYDTHGILISEYTKDQIGDEFVVCPLSKVTVVGIPVPFRLFELLEIKSDAPKSMLDMVKVWEGGFEAYENCDFAGAKKTFAEIYKEDSEDATAKLYVQRCEEFIASPPPKKWHGVDNLTEK

SEQ ID NO: 52155 - DNA, 1947 bp, Unknown
  Obtained from environmental sample
  misc_feature (1)..(1947): n is a, c, g, or t
atgaacggatcggcggaaaagttacagatagatcacgacatatgtatcggctgcggaaactgcattaacgcctgtacccacaaggcaagaacactcatagacgacaccagccgtttcatggaagacctgaaacaaaacaaaaaaataatcgccgtagccgcccctgctgttgcttcgttttttttcgatcaatttctcaacttaaacggatatctgaaatcactgggcgttgaagctttttttgacgtgagcttgggagcggaactaaccgtcatgtcatatcttgactacatcaaagaaaaaaatccccgaacagtgatcgcacagccctgccctgcgattgtaacttatatcgaaattaaccaccctgaattactgccccatctcgctccggcggacagtcctatcctgcataccataaaaatgatcaaagagtattatcctcaatataaaaatcacaaagtagcggtaatttccccatgcatcgccaaacggcgtgagtatgacgaaaccggcatgggtgattacaacgttacaatgattgcgttaaaaaatcttctggacagccagaaaataaacctctcctcatttccaaaagtagaatataccggagtaagcgcggaacgtgcggctggatttccaattcccggagggcttttggataccgccgagcgttttaatccgggcatcagacggcgcaccgaanagattgaaggagttcataacatctatccttatttgaatgaaatatcagaaatattgaacaccaatgccaaactgccgttattgattgactgcttgaattgcgaaaaaggctgtatcggaggacccggcactgggaatgccgaaaaatcgcttgctatgctaaaagaaccggtacaagaacgcatggctgaactggaagaaaaacaacattctcaaatcggaaatagcgcatacaaaaaataccacaatgttttgagaaagtattggaagaaaggactgtataaccggagctaccgcaatctttccgcgaacaatacaatcaaacatccgagcgagacagaaataactgaaattttccgcactatgagaaaattcaaaaaggaagatatatacaactgtacctgctgcggttacggaagctgtaaagcgatggcaacggcaatttacaacaaactgaacaaacatgaaaattgcgcccattatattctcgccttgctcagggagaatcaggagcacattgccaacgcttcaaaccttattgaagatataaacgaattaatacaggaattgaacgctactatcagctcgcaggcggagtctgttgatcgctcttcagaggaaaccgaagaaataatcgcctcgattaaagacacttcggaaatgtctcttaaacagcaggaatcagtaaaagggttgatagaaattgcgggacatggacaggaatccatgagaaaaaccattcaatcaataaatgaaatctctcaatctgttgaaggcataagttcggcaatccgcataatttcttcgatagcggcaaataccaatttgctgtcaatgaacgcggcaattgaagccgcccacgccggagatgccggaaaaggctttgcggtagtcgccggagaaatacgccgtctttcagaaaccaccagagaaaattcagtaagtatttcccatacacttaaaaatattatcagcggaatatccgacacgacaaaacaatccggcgaaacggacacgcgaatagcccaaatgtccgaagagataagagggtttgccaaaactatgtctgtttttataagcacatttagtgaattatcagcaaaaagcgaaaacattaccgcctctcttgtaagcctaaaagaacaaagttcggcggtaaaaacaagttatgcacaaatgattgaaatgacaaataagctttccagagcgttgaaagatttatccgaattgtcaaaacgataa

SEQ ID NO: 52156 - protein, 648 aa, Unknown
  Obtained from environmental sample
  DOMAIN (8)...(31): 4Fe-4S binding domain
  misc_feature (1)..(648): Xaa is any amino acid
MNGSAEKLQIDHDICIGCGNCINACTHKARTLIDDTSRFMEDLKQNKKIIAVAAPAVASFFFDQFLNLNGYLKSLGVEAFFDVSLGAELTVMSYLDYIKEKNPRTVIAQPCPAIVTYIEINHPELLPHLAPADSPILHTIKMIKEYYPQYKNHKVAVISPCIAKRREYDETGMGDYNVTMIALKNLLDSQKINLSSFPKVEYTGVSAERAAGFPIPGGLLDTAERFNPGIRRRTEXIEGVHNIYPYLNEISEILNTNAKLPLLIDCLNCEKGCIGGPGTGNAEKSLAMLKEPVQERMAELEEKQHSQIGNSAYKKYHNVLRKYWKKGLYNRSYRNLSANNTIKHPSETEITEIFRTMRKFKKEDIYNCTCCGYGSCKAMATAIYNKLNKHENCAHYILALLRENQEHIANASNLIEDINELIQELNATISSQAESVDRSSEETEEIIASIKDTSEMSLKQQESVKGLIEIAGHGQESMRKTIQSINEISQSVEGISSAIRIISSIAANTNLLSMNAAIEAAHAGDAGKGFAVVAGEIRRLSETTRENSVSISHTLKNIISGISDTTKQSGETDTRIAQMSEEIRGFAKTMSVFISTFSELSAKSENITASLVSLKEQSSAVKTSYAQMIEMTNKLSRALKDLSELSKR

SEQ ID NO: 52157 - DNA, 336 bp, Unknown
  Obtained from environmental sample
  misc_feature (1)..(336): n is a, c, g, or t
atgccatgttccgcggcggctgaattgattgtcgggcgtagcggggcgggtacggtttgggaaagcgccgtcgtgggcaagccgatgattctgatacccttgagcggatcaggcacaaggggcgatcaggttgaaaacgcccgcttctttgaacgggagggggcggcgctggttctgccggggcaggccggggcggacgctcttgcccgcatggtcagcgcccttgccgatgacccccataaaagggaagcgatggcggaggccgcgcggcgaatcggcagtcttgacggagtcgcgattatcagtgattttatttgcgcgtttacaggggtataa

SEQ ID NO: 52158 - protein, 111 aa, Unknown
  Obtained from environmental sample
  misc_feature (1)..(111): Xaa is any amino acid
MPCSAAAELIVGRSGAGTVWESAVVGKPMILIPLSGSGTRGDQVENARFFEREGAALVLPGQAGADALARMVSALADDPHKREAMAEAARRIGSLDGVAIISDFICAFTGV

SEQ ID NO: 52159 - DNA, 519 bp, Unknown
  Obtained from environmental sample
  misc_feature (1)..(519): n is a, c, g, or t
atggcggttgttgatgtggtgtttctggtgataatcgcgatctccgcttttcgctgcgccgcccgtggttttgtcagcgaactcttgtcaatggcggcgctgatatttggtctgctggcggcaatatgttttttccgctgggggggactgcttatccgcggttggtttatgccggaagtgaaaattgtccccgaagtgattgcctttgccgcgctttttctgatcgtctttatcacgataaaaacaattgaaatgacattgaaaaatattatcgaaggggtacagcttggcggactggatcgtatgttgggccttctctttggttttgtggaaggagtcatcatcgtctgcctgattctctttgtgattaacattctgccccctgttgtttccgttcctattctggataagagtctttttgcgaaaatacttttaccgtttgttttcggaaataaaaaagaaatactggaatcggttgtcatgttacacacgccggggagggtatgtaccggtgtttga

SEQ ID NO: 52160 - protein, 172 aa, Unknown
  Obtained from environmental sample
  DOMAIN (3)...(157): Colicin V production protein
  misc_feature (1)..(172): Xaa is any amino acid
MAVVDVVFLVIIAISAFRCAARGFVSELLSMAALIFGLLAAICFFRWGGLLIRGWFMPEVKIVPEVIAFAALFLIVFITIKTIEMTLKNIIEGVQLGGLDRMLGLLFGFVEGVIIVCLILFVINILPPVVSVPILDKSLFAKILLPFVFGNKKEILESVVMLHTPGRVCTGV

SEQ ID NO: 52161 - DNA, 1497 bp, Unknown
  Obtained from environmental sample
  misc_feature (1)..(1497): n is a, c, g, or t
ttgtttccgttcctattctggataagagtctttttgcgaaaatacttttaccgtttgttttcggaaataaaaaagaaatactggaatcggttgtcatgttacacacgccggggagggtatgtaccggtgtttgagaacatcatcgcccagactgcggcggatcaattaaaaacggatattctctctaaccggcttgccccttcgatgttgttctttgggcctcaggcagcgggaaaaggcagtacggcggtagaactggcccgttctctttcctgcgaaaatgggtcggcgttgtggaaatgtgattgtcccgcctgctcccgccaccgttcgctggttcatcccgatctcgttatgataggcccgcgggcttttgtcgcggaaatagccgcttcccgcagcgctttcctgcgtgaccccgcgtcaacggcgggacattcgctgtttatccgttcactgcggaaattattggcccgctttgcccccgctgtctgggaatacgaatccaaagggggcagaacgaaccccctgtctttactgcaatcgttggaagaagatattgacgaatttgaaacacaggccgccgcagatgcgccggaaaaacgcggcgcgcttgaaaaactctctgaatctcttgcaaaaaatgctttcaaactggaagacgattgtatgagcgagacgattcccattgcccaactgcgtaaagccgcttactggagccgtctgtccccgtcgggaaaacggaaaacgctgattattgaaaatgcggaccgcatgaaagatgaggcccgcaattccctgctcaaactgcttgaggagccgcccgaatcacttaacattgtgttaactgtcatcaggcgggagtcggtgctgccgacgattctgtcgcgcctgcggccctaccgtttccttgcccgcagcgccgttgaagaacaggaaattattcgcagggttttcagagattcccgcgctgtaccggaagaagcgcggggtgccgccacggacggcgccgctccggggctggtggcggcatatcttgattcgtttttaccgcagccgccggagaaacttctccccctggcggcgttctttgtcgccgccgtcgcccgctcggccgctattgccgcgaaaggccgtggtaattccgagctttccccgatgctgaaagcactgggcggctattgcgcccccattgccgaggctgctcattttgagcgaatggcggacgcgcgggaagtcatagcggaactgctcgcgcgcagcggtagttttgaagggcggtcttttccgcgttttctcgccctggcccttgatttggtgtcatggtcgcttaatcaatatgtttcagataacaccttaattacctgcagtgatatttggcgcaagcgtctgggagatgcccaggcggcttacggcgtttggaaccagcggccggagcttgccctggaatcgctgttccataaactcagagaagatatggcggcggcgcgaggttaa

SEQ ID NO: 52162 - protein, 498 aa, Unknown
  Obtained from environmental sample
  misc_feature (1)..(498): Xaa is any amino acid
MFPFLFWIRVFLRKYFYRLFSEIKKKYWNRLSCYTRRGGYVPVFENIIAQTAADQLKTDILSNRLAPSMLFFGPQAAGKGSTAVELARSLSCENGSALWKCDCPACSRHRSLVHPDLVMIGPRAFVAEIAASRSAFLRDPASTAGHSLFIRSLRKLLARFAPAVWEYESKGGRTNPLSLLQSLEEDIDEFETQAAADAPEKRGALEKLSESLAKNAFKLEDDCMSETIPIAQLRKAAYWSRLSPSGKRKTLIIENADRMKDEARNSLLKLLEEPPESLNIVLTVIRRESVLPTILSRLRPYRFLARSAVEEQEIIRRVFRDSRAVPEEARGAATDGAAPGLVAAYLDSFLPQPPEKLLPLAAFFVAAVARSAAIAAKGRGNSELSPMLKALGGYCAPIAEAAHFERMADAREVIAELLARSGSFEGRSFPRFLALALDLVSWSLNQYVSDNTLITCSDIWRKRLGDAQAAYGVWNQRPELALESLFHKLREDMAAARG

SEQ ID NO: 52163 - DNA, 495 bp, Unknown
  Obtained from environmental sample
  misc_feature (1)..(495): n is a, c, g, or t
ttgccccctcctcccgtctggccgggctatacttttgtaggctggtacaccaggcctgacaacaccgggacggcctttaccgccagcacgcccgttataaaaaacaccgcagtgtacgccaggtggaagccggttcccgcaaatagcataacgattaccttcgacaccaatgggggcacgcccaagcctgcgcccaaggtgttaaccgttggctcatcctatggcacgcttccgactgtttcaaaaaccggatgcaaattcctatcctgggctaacgatataggcgaagtaaaagcaacgacaaaaatatccgtcgccggtaatcacacgctttacgcgatctgggataaacctactcctccgccgacacttaaatgcaccgtaaccttccataggaacggcgggacttccgctgcaatcccgcaagtacaagcccctcacaacggcagaataactttacccacgccctcccaccaggccggaatatacttttga

SEQ ID NO: 52164 - protein, 164 aa, Unknown
  Obtained from environmental sample
  misc_feature (1)..(164): Xaa is any amino acid
MPPPPVWPGYTFVGWYTRPDNTGTAFTASTPVIKNTAVYARWKPVPANSITITFDTNGGTPKPAPKVLTVGSSYGTLPTVSKTGCKFLSWANDIGEVKATTKISVAGNHTLYAIWDKPTPPPTLKCTVTFHRNGGTSAAIPQVQAPHNGRITLPTPSHQAGIYF

SEQ ID NO: 52165 - DNA, 798 bp, Unknown
  Obtained from environmental sample
  misc_feature (1)..(798): n is a, c, g, or t
gtgtacgccaagtggaaggcgattcctaaaaagatggtagctgttgccttcagcgccaatggcggcagcgcgcctaaccccgcaagaaaagaaatagtcgccggctccgcttgcggctctttgccccctgccacgacccggacaggctacgcatttgacggttggaataccaagcctgacggcagcgggacggcctttaccgcgaacacacctgttgatgcgccaatcaccgtgtacgccaagtggaaaggaaaaacctataccgtaaccttccatagaaatggcgcggaaagcagcaacccgccgatcccgcaaatacaagccgcttacaacagcagaataactctgccaacgcctcccaccaggccgaactttacttttgaaggctggaataccaaggctgacggcaccgggacgatctttaacgcgggtacgcccgttacagcggacattggagtgtacgccaagtggaaggcggctcctccaaaggtcgtagcgattctcttcaatgccaacggcggcacacccaacgcgacaaggcaggtaaccgtcggctcgtcccttggcacgcttccgactgtttccagaaacggatacaaatttgacggatggtatattcaaaacggatatagagtaggcccaggtgttcagtattgggccactacgatagggtttacgcgcaatggactgccaacacgcccgctccgcaaccaacgcctcctccgcaacccaacatcaaaacggtttacttcgaccccgctggcggcaacgcgcccagcttctcgagcatgcaggtaa

SEQ ID NO: 52166 - protein, 265 aa, Unknown
  Obtained from environmental sample
  SIGNAL (1)...(23)
  misc_feature (1)..(265): Xaa is any amino acid
MYAKWKAIPKKMVAVAFSANGGSAPNPARKEIVAGSACGSLPPATTRTGYAFDGWNTKPDGSGTAFTANTPVDAPITVYAKWKGKTYTVTFHRNGAESSNPPIPQIQAAYNSRITLPTPPTRPNFTFEGWNTKADGTGTIFNAGTPVTADIGVYAKWKAAPPKVVAILFNANGGTPNATRQVTVGSSLGTLPTVSRNGYKFDGWYIQNGYRVGPGVQYWATTIGFTRNGLPTRPLRNQRLLRNPTSKRFTSTPLAATRPASRACR

SEQ ID NO: 52167 - DNA, 453 bp, Unknown
  Obtained from environmental sample
  misc_feature (1)..(453): n is a, c, g, or t
atgtcaaagaaaaaagccgcctgtcttctggctcttccgccgatattagcggcggctttttcttttattcttccgtatgccgcaagttttattcccgctatacgcggacttgcgggcggaaaaataaccgtcttgcaaaacagcgctcttcttcacataactctttttacttttaagcaggcttttttcagcgtgcttatttctctggctcttgggcttcccggtgcatggttcatcgggaacagccgttcgcgttttacgccgcttctaaaaacactgacggcgattccttttgcgatgccgtcaatcttggtggtgttgggcttcgtgctttttttcggaaactcggggtggataaaccgtctctacggaactttgccattctcaggcgaagagccgttaaggatactctacaaaccgcaggccgttattcttgcccacgcgtttttttaa

SEQ ID NO: 52168 - protein, 150 aa, Unknown
  Obtained from environmental sample
  SIGNAL (1)...(27)
  misc_feature (1)..(150): Xaa is any amino acid
MSKKKAACLLALPPILAAAFSFILPYAASFIPAIRGLAGGKITVLQNSALLHITLFTFKQAFFSVLISLALGLPGAWFIGNSRSRFTPLLKTLTAIPFAMPSILVVLGFVLFFGNSGWINRLYGTLPFSGEEPLRILYKPQAVILAHAFF

SEQ ID NO: 52169 - DNA, 1206 bp, Unknown
  Obtained from environmental sample
  misc_feature (1)..(1206): n is a, c, g, or t
ttgcccacgcgtttttttaacttccctcttgtgatacgccttgccggagacggaatcgcaagagcgcggcgcgcctacgcccatgcggcggcaagccttggggcctctccagtaaaaaccgttcttaccgtaattctgccgcttactcttcccagtatcatggccgcaagttttttggtgtttatgtattgttttacaagtttcgccgtagtgctggtgcttggaggaggcccgaatacaactacccttgcggtggaaatataccgttacgcgcgaatttttcttaattacgacagcgctggatttttagcgttaattgaaaccttaattgccgtctgcgtttttataacctatgttttcgcagggaaaaaatcaatgtcggtaaaaacaaatattattgaatacgcggaaacaagaaaaaaatccgccgtttcgcgaattgccatgatcgcgtattttattataatcgcattttttatacttggtcctcttttttccataccgctggaatcatttctattcagaccttcccgcgcaaccgcgcaggtcttgagtatcagatggtggattaatcttggcggcgcctgccttccggcgcttgggcgctctcttttactggctttctttgccgcgacaaccgcctgtatcctcgcgtttttcgcggcgggagcggtaaaactgcttgaaacggaaaacaaggaaagttccatcccgtcgaatcttatccgtttttttgccgcctctccagtaatatcgtcgggcattgttttaggattgggctggctcattctgtatggaagaaatttttcccgttctcctttctcccttgtgattcttcacggcgtgagcgcgatgccgtttgcttttaattttatttccgaaggttttcgctcccttccggcaaacacgctgaacgcggcggcggttttcggcgcagaccctctgcgcggacttttaacaaccgcattgccgctttcgctaccccgtgtgcgttccgcgtggggtttcgccgccgcgctcagtcttggagaacttaacgcggtcatgatgctcggcatggaaggctgggaaactcttccgctgtatatttaccgcgccgtttccgcttaccgttacggtacagcctgcgccgccggaactcttttaatactttgctgcgccgccggttttctgttctcggaaacaggaaggaaaaaatatgcttga

SEQ ID NO: 52170 - protein, 401 aa, Unknown
  Obtained from environmental sample
  misc_feature (1)..(401): Xaa is any amino acid
MPTRFFNFPLVIRLAGDGIARARRAYAHAAASLGASPVKTVLTVILPLTLPSIMAASFLVFMYCFTSFAVVLVLGGGPNTTTLAVEIYRYARIFLNYDSAGFLALIETLIAVCVFITYVFAGKKSMSVKTNIIEYAETRKKSAVSRIAMIAYFIIIAFFILGPLFSIPLESFLFRPSRATAQVLSIRWWINLGGACLPALGRSLLLAFFAATTACILAFFAAGAVKLLETENKESSIPSNLIRFFAASPVISSGIVLGLGWLILYGRNFSRSPFSLVILHGVSAMPFAFNFISEGFRSLPANTLNAAAVFGADPLRGLLTTALPLSLPRVRSAWGFAAALSLGELNAVMMLGMEGWETLPLYIYRAVSAYRYGTACAAGTLLILCCAAGFLFSETGRKKYA

SEQ ID NO: 52171 - DNA, 438 bp, Unknown
  Obtained from environmental sample
  misc_feature (1)..(438): n is a, c, g, or t
ttgcgcaagcaacaaccctgcgccacaacgccttcatgggcgtcgctggaacggccgtcaaacgcgcggccggttcctaaaaacccgtcaatccgctggcctgtttccgcaaaggaaattttttatatgaacggcaacattggtgtgcttgtttccggcgaggagtcggaatcggtcaaaagccttacaaaaggaactgtcgtccatgccagcccctggcgggggtatggcaatgtcgcgattattgagggagacggaggctacaggtatttatacggagcctgcaaaaccctctcggtcagaaaaggggacaacattgagcccggaacagaactgggaaaactgggaatctatccggcatccggcaaaccggagctggtttttatagtatcacataacgggtcgccggttgatccggttaaagcgcccagactataa

SEQ ID NO: 52172 - protein, 145 aa, Unknown
  Obtained from environmental sample
  DOMAIN (44)...(139): Peptidase family M23
  misc_feature (1)..(145): Xaa is any amino acid
MRKQQPCATTPSWASLERPSNARPVPKNPSIRWPVSAKEIFYMNGNIGVLVSGEESESVKSLTKGTVVHASPWRGYGNVAIIEGDGGYRYLYGACKTLSVRKGDNIEPGTELGKLGIYPASGKPELVFIVSHNGSPVDPVKAPRL

SEQ ID NO: 52173 - DNA, 636 bp, Unknown
  Obtained from environmental sample
  misc_feature (1)..(636): n is a, c, g, or t
ttgatccggttaaagcgcccagactataagggagaaaaaatgacagacgcattcatggaatttgaaacagatgattttgaacaggagttgataagcgcccgccctgtaagatcgtccgcggtaaaaaattcaaaacgggccaaaaccagtaaagagtctgatcccctggctttgtacttcaggcaaatttcaaactttcccctgctgacagtccaggaagagcagaacataggagaaaagataatcagccttcgcgcgaaggtgaaagaacttgaggccgagcgcagaagcaaaacccaggacgactacgacagggagaaagcggcgctggacagcacccttctcttctataaaaataaaatgatcaattccaacctccgtctggtggtttccatcgcgaaaaattaccagcaccgcgggctttcgcttcttgatctgatcgacgagggcaatatcggcctgattgaagcggtcgagcgtttcgattataccaggggctgccgtttttcaactacggcacatggtggattaggcaggctatcatcaagagcattggggataaagggcgcgttatccgcataccgattcacatgctcaacacaattaaaaaatgctattatgtggcaaaacaactaa

SEQ ID NO: 52174 - protein, 211 aa, Unknown
  Obtained from environmental sample
  DOMAIN (53)...(89): Sigma-70 factor, region 1.2
  misc_feature (1)..(211): Xaa is any amino acid
MIRLKRPDYKGEKMTDAFMEFETDDFEQELISARPVRSSAVKNSKRAKTSKESDPLALYFRQISNFPLLTVQEEQNIGEKIISLRAKVKELEAERRSKTQDDYDREKAALDSTLLFYKNKMINSNLRLVVSIAKNYQHRGLSLLDLIDEGNIGLIEAVERFDYTRGCRFSTTAHGGLGRLSSRALGIKGALSAYRFTCSTQLKNAIMWQNN

SEQ ID NO: 52175 - DNA, 471 bp, Unknown
  Obtained from environmental sample
  misc_feature (1)..(471): n is a, c, g, or t
atgctcaacacaattaaaaaatgctattatgtggcaaaacaactaacgcaggatttaggacgcgaccccaacgaagacgaattgtccgagtatttggacgttcccgtctctaaagttaaagaaatagtgaaattatcccaggagaccacaagtttggacaccattgttgacgacgggaatcttacgcgccttgccgatttaattaaagacgacgccagagccgaaccgtttgagatggttttctccatgacattacaggaaaccatcggtgggattctttcccagttatccgaaagggagatgaaaataatccaactgcgttttggcctgactggggaaaatcctcttactctggaagaaaccggaaagtatcttggcatcacccgcgagcgcgtccgccaaattcaggaaaaagccgtctggaaactccgcaccttgcacgaactgcgcgaattaagagaaaattcttaa

SEQ ID NO: 52176 - protein, 156 aa, Unknown; identical to SEQ ID NO: 4480
  Obtained from environmental sample
  DOMAIN (1)...(80): Sigma-70 region 3
  misc_feature (1)..(156): Xaa is any amino acid

SEQ ID NO: 52177 - DNA, 879 bp, Unknown
  Obtained from environmental sample
  misc_feature (1)..(879): n is a, c, g, or t
ttgcaccctgataatatttgtgaaaacacgttaaatgttcttaaggcctcaggcgtaaacatgattagcataggcatacaatcatttgataatgagtgtttgaacgctcttgggcgaaaaaatgataactttattgaaaaacttaaacttgtcacatcatacagattttccgttgttgacgtggacttaattttcggcattccaaatcaaacggaaaccggtttattaaatgatatagctttagcttttaaatatggagcgagtcaagtgtcaacatacccttttattgattttacatttacaaataataagtacaagcccatgactgaaaaaattaagaaaaaaatgcttgccgccattacggaatatgcggtcatgaacgatatcgaaagaacttccgtttggacattcgcccaaaaagggacaaaaaaatattcatcagtaacaagggacaattttcttggatttggagcttccgcgacgactttattgcaggatatatttaaaattaacacattctcaattactgattacatacaacggataaatgaaaatcatcttccgacatcactgacccttgatttttcaaaaagacaacgcgcctgttattttttattttgggcatgttattcaatgcgtatagacagggtggcgtttaatgaaatgttaggtgagaaacttgaaaaattatacggcatggaacttttattttgtagaatattcggtctttctaaaaaagaaaataaagtataccatcttacggacaaaagagcgtatttataccancaaatagaacaagcatttacgacagcgtatataaacaaatcatggaatatatcccgcctacacccttttcctgaaaaaattattttaaactaa

SEQ ID NO: 52178 - protein, 292 aa, Unknown
  Obtained from environmental sample
  DOMAIN (151)...(259): HemN C-terminal region
  misc_feature (1)..(292): Xaa is any amino acid
MHPDNICENTLNVLKASGVNMISIGIQSFDNECLNALGRKNDNFIEKLKLVTSYRFSVVDVDLIFGIPNQTETGLLNDIALAFKYGASQVSTYPFIDFTFTNNKYKPMTEKIKKKMLAAITEYAVMNDIERTSVWTFAQKGTKKYSSVTRDNFLGFGASATTLLQDIFKINTFSITDYIQRINENHLPTSLTLDFSKRQRACYFLFWACYSMRIDRVAFNEMLGEKLEKLYGMELLFCRIFGLSKKENKVYHLTDKRAYLYXQIEQAFTTAYINKSWNISRLHPFPEKIILN

SEQ ID NO: 52179 - DNA, 2220 bp, Unknown
  Obtained from environmental sample
  misc_feature (1)..(2220): n is a, c, g, or t
ttggttcatcccgcctctttttacattgccgcgcgcctcgattcgggaacaataaaaaccgccgccgcagatggcgccgctgccacggcaaactcttccgcctatttcctcagcgcgggacaaccggcgacattaagctgggcgcttgtttcgcctaacggagatgcggcgcagaatcaaggcggcgatttgtcaatacagcttgtccgccacgaatggaaacaggcgcgccaacagggctcaggcggcaggatcaacctggtatgggagagagttgaagaaatcgccggacagggtaacgttaaaatctcatcaataaaggcgtccgcaaacggaatcatctccggcgtatacaattttacgccggacaaaagcggcctctgggaaatcaggctttcaagccgcgaccaaaagaagagaatagccgcgacccgtttccgtttttatgtaagcggcgcaggatgggtgcgctgggattctgatgacgtagataccataaacctgaccactgaccgccaaagttacgctcccgggcagacggcgaaaataatggcgcgctcgccgctggaaaaaggcaaatatttattaacgctggaacgcgaaaacatcatatcccaaaaaatcatcgagcttaacggctccgctcttaccattgatatccccattgaagaatcgtatgtgccgatagtctacgctacgcttagttcctatacggtgcgttccgccgccccgcagaacagctactacgagcccgacctggacaaacccaaggggattttcggcgttacgccgatttatattgacaatgaaagccgccattaccaaattgaaattgtcaacggcaagaatgcctatagcccggctgaagaagcggaagtaaagataaaagttttactgaacggcaagccggctccgaatacggaagtaagttttctggccgttgaccgcggggtggttgacctcattaactaccatgttccggatccgctcgcttctttttacaatccttggcatttccccctgggagtgcggggcgcggacagccgttccctcctgatcgatccggttacatataacatttccgatctccagggcggcgacagcgatgacgacggcaagggcggagatgccgcaggcggttttaatgacgatatgaaagaacgcaaggattggaggccgactgcggtttttgaaccgtaccttgtcaccgggccggacgggactgtcaccgtaaagttcaagctgcccgattcgcttaccagctaccgctgtaccgcgcttgctgtcggcgttagcaattttggcattaaggaacaggatctgcgggtaagcgccccgctgacggcgattgccgccctgccgcgcaaactccgctggcgggacaccggcacggtttcgctcatactgacgaatcttgaaaacgccgcggtagaggccggtgtaacgcttgcgtcatcttctgagtcatccgccggagctgacgccgttattgaggttgacggcgcggattccaaaaccgttaaggtgcttcccggcgcgtcacaggaggttacattcaaagtcgccgccattggcacaggccttgcgcagcttacctttacactgcgctcgcccgaagtaaacgagcgtatcatcaaaacgcttcttgttgacaggcccagcctgaccgagactgttacaacaatcggcaatctggggccggagaaacttttcttcgaagaaggcatgatactgccgtcgctggttcccgaaggaacgggcaatgtttccgtaagcctttcggcttcccggctggcgacgcttaaagaagccgtgcgctatttgctggattacccctacggctgcattgagcagcgcacggcccgcctgcttccgataaccgcctttggcgagtaccttgacacgttcaacctggatagtccgcttgccgcttttggcgggcggcctgacataatagatccagcgggttcgacgcgcggtttgtccgcctgggatccaaaaaaacttgttgagaaagaactggcggaactcgccaggttccagcttgccgacggctcattcccctactggcccggcggcagttatggcagtctttttgtcagcatcaggatggcgcatatcgcggcgctggcaaaggcaaaaggcatgaaggttccggactctcttgatacgcgaaaactgttagcgtatatcggaacagcctcaaacgatgatttttaa

SEQ ID NO: 52180 - protein, 739 aa, Unknown
  Obtained from environmental sample
  DOMAIN (162)...(324): Alpha-2-macroglobulin family N-terminal region
  misc_feature (1)..(739): Xaa is any amino acid
MVHPASFYIAARLDSGTIKTAAADGAAATANSSAYFLSAGQPATLSWALVSPNGDAAQNQGGDLSIQLVRHEWKQARQQGSGGRINLVWERVEEIAGQGNVKISSIKASANGIISGVYNFTPDKSGLWEIRLSSRDQKKRIAATRFRFYVSGAGWVRWDSDDVDTINLTTDRQSYAPGQTAKIMARSPLEKGKYLLTLERENIISQKIIELNGSALTIDIPIEESYVPIVYATLSSYTVRSAAPQNSYYEPDLDKPKGIFGVTPIYIDNESRHYQIEIVNGKNAYSPAEEAEVKIKVLLNGKPAPNTEVSFLAVDRGVVDLINYHVPDPLASFYNPWHFPLGVRGADSRSLLIDPVTYNISDLQGGDSDDDGKGGDAAGGFNDDMKERKDWRPTAVFEPYLVTGPDGTVTVKFKLPDSLTSYRCTALAVGVSNFGIKEQDLRVSAPLTAIAALPRKLRWRDTGTVSLILTNLENAAVEAGVTLASSSESSAGADAVIEVDGADSKTVKVLPGASQEVTFKVAAIGTGLAQLTFTLRSPEVNERIIKTLLVDRPSLTETVTTIGNLGPEKLFFEEGMILPSLVPEGTGNVSVSLSASRLATLKEAVRYLLDYPYGCIEQRTARLLPITAFGEYLDTFNLDSPLAAFGGRPDIIDPAGSTRGLSAWDPKKLVEKELAELARFQLADGSFPYWPGGSYGSLFVSIRMAHIAALAKAKGMKVPDSLDTRKLLAYIGTASNDDF

SEQ ID NO: 52181 - DNA, 720 bp, Unknown
  Obtained from environmental sample
  misc_feature (1)..(720): n is a, c, g, or t
atgcatgcggttttggaaaaacttggaaagattggcattgtacctgtaatcaaaattgatgatgttgagaaagccattccattggccagagcgctggcggccgggggtattccctgcgctgagataactttccgcacggatcaggcggaggaagccatcaggcgtatatcaaaagaagttccggaagtccttgccggagcgggtacggtattgaccaccgaacaggtcgacaaggcggttaacgccggggcgaagtttgtcgtcagccctggcctcaatcccaaaatagtatcgtactgcatcaaaaaagggatacccgtaacccctggctgcgccaatccttcggatattgaacaggctctggaatttggcctggaagtggtaaagttcttccccgcagaacaagcgggcggacttgaatatatcaaagcgatatcagccccataccatgacattaaattcatgcccaccggcggcattaacgcggccaatatctcaaaatatattttatttgacaaagtcctcgcctgcggcagctcatggatggcaaccgccgatcttatcaactcaggcgatttcgataaaataacagctctttcaaaggaagctgtactgggcatgctcggcttcagcgttgcccatatcgggatcaactccagtaatgaagatgacgcgctgaaaggcgcaaacctctttaacggcttttcgggcatccgttaa

SEQ ID NO: 52182 - protein, 239 aa, Unknown
  Obtained from environmental sample
  DOMAIN (4)...(199): KDPG and KHG aldolase
  misc_feature (1)..(239): Xaa is any amino acid
MHAVLEKLGKIGIVPVIKIDDVEKAIPLARALAAGGIPCAEITFRTDQAEEAIRRISKEVPEVLAGAGTVLTTEQVDKAVNAGAKFVVSPGLNPKIVSYCIKKGIPVTPGCANPSDIEQALEFGLEVVKFFPAEQAGGLEYIKAISAPYHDIKFMPTGGINAANISKYILFDKVLACGSSWMATADLINSGDFDKITALSKEAVLGMLGFSVAHIGINSSNEDDALKGANLFNGFSGIR

SEQ ID NO: 52183 - DNA, 573 bp, Unknown
  Obtained from environmental sample
  misc_feature (1)..(573): n is a, c, g, or t
atgcccgaaaagccgttaaagaggtttgcgcctttcagcgcgtcatcttcattactggagttgatcccgatatgggcaacgctgaagccgagcatgcccagtacagcttcctttgaaagagctgttattttatcgaaatcgcctgagttgataagatcggcggttgccatccatgagctgccgcaggcgaggactttgtcaaataaaatatattttgagatattggccgcgttaatgccgccggtgggcatgaatttaatgtcatggtatggggctgatatcgctttgatatattcaagtccgcccgcttgttctgcggggaagaactttaccacttccaggccaaattccagagcctgttcaatatccgaaggattggcgcagccaggggttacgggtatcccttttttgatgcagtacgatactattttgggattgaggccagggctgacgacaaacttcgccccggcgttaaccgccttgtcgacctgttcggtggtcaataccgtacccgctccggcaaggacttccggaacttcttttgatatacgcctgatggcttcctccgcctga

SEQ ID NO: 52184 - protein, 190 aa, Unknown
  Obtained from environmental sample
  misc_feature (1)..(190): Xaa is any amino acid
MPEKPLKRFAPFSASSSLLELIPIWATLKPSMPSTASFERAVILSKSPELIRSAVAIHELPQARTLSNKIYFEILAALMPPVGMNLMSWYGADIALIYSSPPACSAGKNFTTSRPNSRACSISEGLAQPGVTGIPFLMQYDTILGLRPGLTTNFAPALTALSTCSVVNTVPAPARTSGTSFDIRLMASSA

SEQ ID NO: 52185 - DNA, 1023 bp, Unknown
  Obtained from environmental sample
  misc_feature (1)..(1023): n is a, c, g, or t
atggagaaagtagtaacattcggcgaaataatgctgaggctggccccgcagggttacaacaggtttgtgcaggaacaggcgctcagcgcgactttcggaggcggcgaggcaaatgtggccgtgtctttggcgaatttcggcattgacgccgcttttgtgacaaagttgcccaagcacgagattggacaggcggctgttaacagcctgcgtcagttcggcgttgacacatcgaaaatcgcgaggggcggtagccgcgtggggatttatttcctggaaaaaggcgcgtcgcagaggccctccaaggtaatatacgaccgcgccaattccgcgatagccacggcgacagcggcggattttaactggcccgccatattcgacggcgtctcatggtttcactttaccgggatatcaccagcggtttcagataacgcggcggccatcacgcttgacgcggtgaaaaccgcaaaggcaaaaggcattaccgtttcctgcgatctcaattaccgcaaaaacctctggtcaaaggaaaaggccggcgaggtgatgaacgggctaatgccctttgtagacctctgcatcgcaaacgaggaagacgccgccgatgttttcggcatacacgcgaagaacagcgacgttacatccggcagcataagccatgagggatacaaggaagtggcaaaggccctgacagaccgtttcaaattcaaaaaagtcgccataacattgagggaatcgataagcgctaacgacaacaactgggccgcgatgtactgctgcggaaatgatttttatttttccaaaaaatacgctgtgcatatagtggaccgcgtcggcggcggcgacagtttcggcgcgggccttatctacgcgaacctcaaaggctttggcccacaggaaagcgtcgaattcgccgtcgcggcaagctgcctcaaacactcaatcgagggcgactttaaccaggtatcggttgacgaagtgcagaaactcgccggcggggacgcgtcgggaagggtgcaaagataa

SEQ ID NO: 52186 - protein, 340 aa, Unknown
  Obtained from environmental sample
  DOMAIN (1)...(324): pfkB family carbohydrate kinase
  misc_feature (1)..(340): Xaa is any amino acid
MEKVVTFGEIMLRLAPQGYNRFVQEQALSATFGGGEANVAVSLANFGIDAAFVTKLPKHEIGQAAVNSLRQFGVDTSKIARGGSRVGIYFLEKGASQRPSKVIYDRANSAIATATAADFNWPAIFDGVSWFHFTGISPAVSDNAAAITLDAVKTAKAKGITVSCDLNYRKNLWSKEKAGEVMNGLMPFVDLCIANEEDAADVFGIHAKNSDVTSGSISHEGYKEVAKALTDRFKFKKVAITLRESISANDNNWAAMYCCGNDFYFSKKYAVHIVDRVGGGDSFGAGLIYANLKGFGPQESVEFAVAASCLKHSIEGDFNQVSVDEVQKLAGGDASGRVQR

SEQ ID NO: 52187 - DNA, 828 bp, Unknown
  Obtained from environmental sample
  misc_feature (1)..(828): n is a, c, g, or t
atgggagtccctgtagcggttatcgacaccgaggcgaagtcggcatccaagtacgccgacaggtttgcttttacagtagataaccttgaaaagaagacaatcgactattaccttgcttcaatggaagaagccaagaaagccgggtataaggtgctggtgattgacagcctgtcccacgcatggcgggaactgacagaggaagtggatcgcatcgcccagagcagcgcaagcaaaaatacgttttccccctgggctaaggtgaacccgaaacaaaagcggttcattgacgccatcctcaactacccgggccacatcatcgcgaccatgcggagcaaaaccgaatgggtggtaggcgaagggaagaacggaaaaaccgcgcctgaaaaactggggcttgctcccgagcagggcaaagggattgaatacgagtttgatcttttggtggaactcaaccaaaggcacgaagctgttgtgaccaaagaccgcacagggaaatttcaggacgaggtaattgaaaagccgggcgaagattttggaatcgctctctatgaatggcttgcaagcggaaagcctgaaaagcctgcaacaacggcggcaccggcagcgaaaggtgccagcaagccgcaaaaatcccaagccgtgcctgagatgccgaagcccgaaaagcagggcaaatcgctttcccttaaagagcagggtagcgaaataatgaaggaaatcggtgtggttatcacggcgtcaaaagacggagtgccatactttaccgaggaagaaaggaagaagctcgcaaagttatcaaggatacacggctggatgaaaatggcataa

SEQ ID NO: 52188 - protein, 275 aa, Unknown
  Obtained from environmental sample
  misc_feature (1)..(275): Xaa is any amino acid
MGVPVAVIDTEAKSASKYADRFAFTVDNLEKKTIDYYLASMEEAKKAGYKVLVIDSLSHAWRELTEEVDRIAQSSASKNTFSPWAKVNPKQKRFIDAILNYPGHIIATMRSKTEWVVGEGKNGKTAPEKLGLAPEQGKGIEYEFDLLVELNQRHEAVVTKDRTGKFQDEVIEKPGEDFGIALYEWLASGKPEKPATTAAPAAKGASKPQKSQAVPEMPKPEKQGKSLSLKEQGSEIMKEIGVVITASKDGVPYFTEEERKKLAKLSRIHGWMKMA

SEQ ID NO: 52189 - DNA, 615 bp, Unknown
  Obtained from environmental sample
  misc_feature (1)..(615): n is a, c, g, or t
ttgcacgaagagatcagccgcatagagggcgggcgcgcctacaatttggcgcaagagcttgaggtgagcagagcgaagtcgtcgctcctgcagggcgaccttgaggcgaccaaggccaacttggccgctgaacgcgcacgcctgcgcaaggttatggaggacgcgcagaagcgtttcgccgagttgcagagcaatctgctctccgtgagcaaagacgcgcgcggcaccatcatatctatggcggacgtcctatttgagaccaacaaggcgacgctgacacccaacctcaaagagaacttggccaagatcgccggcatccttattgtctacaaggaaccgaatatcttgatagagggccacaccgacagcaccggtacgagggagcacaaccaaaagctctctatggaccgcgccggcgcggtgatgggctacttggttgagcagggcgtgagcgatacgcgcttgaccgccgtgggcctcggcccggacaagcccatcgcggacaacaagaccaaagagggcagggccaagaacagaagggttgaccttgtcattcaagagaagcagttggaagacgagggtgcggaagatgccgccgcccccgtcgggaagtaa

SEQ ID NO: 52190 - protein, 204 aa, Unknown
  Obtained from environmental sample
  DOMAIN (84)...(179): OmpA family
  misc_feature (1)..(204): Xaa is any amino acid
MHEEISRIEGGRAYNLAQELEVSRAKSSLLQGDLEATKANLAAERARLRKVMEDAQKRFAELQSNLLSVSKDARGTIISMADVLFETNKATLTPNLKENLAKIAGILIVYKEPNILIEGHTDSTGTREHNQKLSMDRAGAVMGYLVEQGVSDTRLTAVGLGPDKPIADNKTKEGRAKNRRVDLVIQEKQLEDEGAEDAAAPVGK

SEQ ID NO: 52191 - DNA, 687 bp, Unknown
  Obtained from environmental sample
  misc_feature (1)..(687): n is a, c, g, or t
ttgtccgcccgcgcgtcaggcggaagcattgcagaaacgcaaccctacctcgatatagtaaccggcgaggctatattcacctactcgtgcgccatctatgacgataacggcatatatcttggcgttatcagcgtggacgcgcgaaccgaatacatcgggaataaagtcgttaatatcgccgtctccaaaaaaggttacggttttttgatagcccaagacttgacggtgcttgcccattccaatcaggagtttgtggggctcaaattgtccgaccccagaattcccctttttagattggttagcgagatgatgacgcacggaaaggtttcggaaacaccgcttgtaaattggctgggcgagaaaacggtttgctatatacgagaactcccgaacggttggtacgagggcctcttgatgcccaaacatatctactataaaaaggtgcgctacatggccgtgatattgatggcgctgggcataatcttcgcgtcggtgatcagtttcgtgctgatcggcgtggacgcggccaagaacaaatctgacttggagagcaagcgcaagagcgctttcctcgccaacatgagtcacgaaatacgcacgccgatgaacgcgataatcggcatggtcaccataggcaaatccgccgcggacgtactgaacgcaaggactactgtttcacaaaaatag

SEQ ID NO: 52192 - protein, 228 aa, Unknown
  Obtained from environmental sample
  DOMAIN (13)...(92): Cache domain
  misc_feature (1)..(228): Xaa is any amino acid
MSARASGGSIAETQPYLDIVTGEAIFTYSCAIYDDNGIYLGVISVDARTEYIGNKVVNIAVSKKGYGFLIAQDLTVLAHSNQEFVGLKLSDPRIPLFRLVSEMMTHGKVSETPLVNWLGEKTVCYIRELPNGWYEGLLMPKHIYYKKVRYMAVILMALGIIFASVISFVLIGVDAAKNKSDLESKRKSAFLANMSHEIRTPMNAIIGMVTIGKSAADVLNARTTVSQK

SEQ ID NO: 52193 - DNA, 795 bp, Unknown
  Obtained from environmental sample
  misc_feature (1)..(795): n is a, c, g, or t
atgtcaaagatcgaagccaataaattcgaactctccgaagcggaatttgattttgaaaaaatgctcaggcgggtggtgaacgtggtcaatttccgcatagatgaaaaacatcaaaaattttccgtgcatatcgaccgcttaattccacacgccttcataggggacgatcagcggatagcgcaagtcatcaccaacttgcttggaaacgcgataaaattcacgccggaaaaaggttccatagcccttgacgtgcgccttgcgggacaaggattcgatctttgcaccctgcaaatttcagtaagcgacacgggaatcggcataagcccggaacaacaggcgaaactttttaaatcttttgaacaggccgaatcaagcacgacgcgcaagtacggcggcacggggcttggactcgcgatttctaaaaacattgtagaactgatgggcggctcaatatggatagaatcggaacttggaaaaggctccactttttattttaccattcaactgaagcgcggtacgaatgaaaaacccaagtccttaccacctgatataaattctaaaaatctccgtatccttgcggttgatgatgacgcggacatattaacctattttaatgaaatagcgcaggactccggtctaatttgcgataccgccgcaagcggggaagaagcgcttagactcatagaacaaaaaggcggctacaatatctattttatagactggaaaatgcccggcatggacggcatacaacttacccatgaaataaaatcgcatattacgaaaaattccatgtaa

SEQ ID NO: 52194 - protein, 264 aa, Unknown
  Obtained from environmental sample
  DOMAIN (189)...(262): Response regulator receiver domain
  misc_feature (1)..(264): Xaa is any amino acid
MSKIEANKFELSEAEFDFEKMLRRVVNVVNFRIDEKHQKFSVHIDRLIPHAFIGDDQRIAQVITNLLGNAIKFTPEKGSIALDVRLAGQGFDLCTLQISVSDTGIGISPEQQAKLFKSFEQAESSTTRKYGGTGLGLAISKNIVELMGGSIWIESELGKGSTFYFTIQLKRGTNEKPKSLPPDINSKNLRILAVDDDADILTYFNEIAQDSGLICDTAASGEEALRLIEQKGGYNIYFIDWKMPGMDGIQLTHEIKSHITKNSM

SEQ ID NO: 52195 - DNA, 360 bp, Unknown
  Obtained from environmental sample
  misc_feature (1)..(360): n is a, c, g, or t
ttggacatgggcattgaaaaatgcagggaaattctctcaaagttcctcttttccaaagaggatgagattttgcaaagcgaggtgttccagaaccccaaggcacttttaaacgaaaaaactcaagagctggggcttggcacgcctgtgtacgaaactttggaggaatggggcgaggttcacaaaagaaagttcaagatggcggttagcgcaggcgataagctcctaggcaaagggattggctcttccaaaaaggaagccgagcaaaacgccgcaaaagaggctttaaaaacttatggagaagcctatcccagccaaaagcagggaaaggccaatcataaccgagccaaaaaccatttttga

SEQ ID NO: 52196 - protein, 119 aa, Unknown
  Obtained from environmental sample
  DOMAIN (32)...(98): Double-stranded RNA binding motif
  misc_feature (1)..(119): Xaa is any amino acid
MDMGIEKCREILSKFLFSKEDEILQSEVFQNPKALLNEKTQELGLGTPVYETLEEWGEVHKRKFKMAVSAGDKLLGKGIGSSKKEAEQNAAKEALKTYGEAYPSQKQGKANHNRAKNHF

SEQ ID NO: 52197 - DNA, 723 bp, Unknown
  Obtained from environmental sample
  misc_feature (1)..(723): n is a, c, g, or t
ttggaaacaagtttttcaaaaataaaagtaaaactaataattcccatgtttacaggggtactctgttccatgattttctgcgcgataatcgcggattattccggttatataaaaaaaaccgcgcctgatatccccattattgaagatgaagaccttgatgaagaggaagaagatttttccgcgcttttcagccgttcagaaaacaatcccgattccattttggaatattaccgaaaccccgagtacaaagaatgggtaacggaattttttaccgctatatgttcaaatgcggaaattgcgcgggctattctagacagttgcgatatatttgacattccgccggcgttagcttttgcgttatgctgggaagaaagcagatttaacccaaacgcgataaacaaaaagaaccgcgacggaagcgtagatcgcggtttatttcaattaaacaacaaatcatttccccatctggatattttgtctttttatgatattaaaattaacgcgcgtaacggtgtcggtcatctgcgtaactgcatgaattcaagcggcaatgaaatttccgcccttgccatgtacaatgccggtacgggaagggtaaggtccacaggcgcgcctgaagtcacccttaattacacaagccgcgttttaggaaaccgccgaaaattggaaacccgttttttttcaagacttcttaaggaagaagaaaaacgcttctctgaatag

SEQ ID NO: 52198 - protein, 240 aa, Unknown
  Obtained from environmental sample
  DOMAIN (101)...(215): Transglycosylase SLT domain
  misc_feature (1)..(240): Xaa is any amino acid
METSFSKIKVKLIIPMFTGVLCSMIFCAIIADYSGYIKKTAPDIPIIEDEDLDEEEEDFSALFSRSENNPDSILEYYRNPEYKEWVTEFFTAICSNAEIARAILDSCDIFDIPPALAFALCWEESRFNPNAINKKNRDGSVDRGLFQLNNKSFPHLDILSFYDIKINARNGVGHLRNCMNSSGNEISALAMYNAGTGRVRSTGAPEVTLNYTSRVLGNRRKLETRFFSRLLKEEEKRFSE

SEQ ID NO: 52199 - DNA, 747 bp, Unknown
  Obtained from environmental sample
  misc_feature (1)..(747): n is a, c, g, or t
ttgggcgttgtgggacttggcgccatcggcgtaatggtcgcaaatgacgcaattgccctgggtatggacgttataggctatgatccgtatatttccgtagacgcggcgtggaatctttcccgtgaagtcgtccgcgccgatacccttgaaagcctccttgcaaaatcagattacatcactcttcaccttccccttggggagacgacaaaaggtcttctggacgctgagaagttccgtataattaaaaaagacgcgcgggttatcaacttttcgcgtaacgcgctggtgaaggacaaggacataattgacgcgcttgacgcgggaaagataagcgcctatgttacggattttccgaatcaggaacttttggcgtgtaaaaaagtcatcggtattccccatcttggcgcgtcaacccccgaagccgaagataattgcgcgattatggccgttaaacaaattattgattaccttgagacgggaacaatccgcaattccgtgaacttcccccgttgtaaacttgaacaacatgccgcaagcaggcttcttgtagtgaataaaaatattcccaatatggtagggcagataacgacgattcttgcaggttcaaatatcaatattacggatttaatcaaccaccaccgtgatgattacgcctataatatcattgataccgaacagcaattatcagcgcccgtgcttgacaaaattcgtaaggtggacggaataataagagttcgttcaatttaa

SEQ ID NO: 52200 - protein, 248 aa, Unknown
  Obtained from environmental sample
  DOMAIN (1)...(135): D-isomer specific 2-hydroxyacid dehydrogenase, NAD binding domain
  misc_feature (1)..(248): Xaa is any amino acid
MGVVGLGAIGVMVANDAIALGMDVIGYDPYISVDAAWNLSREVVRADTLESLLAKSDYITLHLPLGETTKGLLDAEKFRIIKKDARVINFSRNALVKDKDIIDALDAGKISAYVTDFPNQELLACKKVIGIPHLGASTPEAEDNCAIMAVKQIIDYLETGTIRNSVNFPRCKLEQHAASRLLVVNKNIPNMVGQITTILAGSNINITDLINHHRDDYAYNIIDTEQQLSAPVLDKIRKVDGIIRVRSI

SEQ ID NO: 52201 - DNA, 447 bp, Unknown
  Obtained from environmental sample
  misc_feature (1)..(447): n is a, c, g, or t
atgtttcgtattcaaacgcttaataaaatttcttctttgggacttgatctttttcctcgggataaatatgaagtcgcaagcgacattcccaaccctgacgcggtactggtacgcagcgccgacatgataggaatggaaataccgtcttccgtgctggctatcgccagggcgggcgcgggctacaataatattcccgttcagaagtgcagcgacagcggggtagtggtctttaatactccgggcgccaacgcaaacgccgtcaaagaacttaccctggcggctctgcttctttcgtcgcgtaacattgtcggcggcattaactggactatgtcggcggcggacaagccggatatagcggaacttgtagaanaagaaaagtctaaatttacagggcctgaaatagaggcaagactttgggcgttgtgggacttggcgccatcggcgtaa

SEQ ID NO: 52202 - protein, 148 aa, Unknown
  Obtained from environmental sample
  misc_feature (1)..(148): Xaa is any amino acid
MFRIQTLNKISSLGLDLFPRDKYEVASDIPNPDAVLVRSADMIGMEIPSSVLAIARAGAGYNNIPVQKCSDSGVVVFNTPGANANAVKELTLAALLLSSRNIVGGINWTMSAADKPDIAELVEXEKSKFTGPEIEARLWALWDLAPSA

SEQ ID NO: 52203 - DNA, 462 bp, Unknown
  Obtained from environmental sample
  misc_feature (1)..(462): n is a, c, g, or t
ttgataaaaaaacctcaggactggattccaatgatgctccggtatgacattcacgcggctgaaggttccttgttcaatactccgccgtgctacggcatttacattatcatgcttgttcttgaatggctgaaaaatctgggcggcgttgaagttatggcaaaattaaaccgtgaaaaagccaaactcttctatgattaccttgacgcatcggagcttttttattctcccgtgcaaaaagagtaccgcagtttgatgaatatcccgtttattacgacggaacagaatgaggcaaaaaaaaccgagattgaaacccgctttgtaaaagaagcggcgtcggcagggcttattaaccttgcgggacacaggcttgtaggcggcatgagggcgagtatttataacgccatgccgattgacggcgtaaaggcgctgataaacttcatggaaaaatttgagaaaaaataa

SEQ ID NO: 52204 - protein, 153 aa, Unknown
  Obtained from environmental sample
  misc_feature (1)..(153): Xaa is any amino acid
MIKKPQDWIPMMLRYDIHAAEGSLFNTPPCYGIYIIMLVLEWLKNLGGVEVMAKLNREKAKLFYDYLDASELFYSPVQKEYRSLMNIPFITTEQNEAKKTEIETRFVKEAASAGLINLAGHRLVGGMRASIYNAMPIDGVKALINFMEKFEKK

SEQ ID NO: 52205 - DNA, 1356 bp, Unknown
  Obtained from environmental sample
  misc_feature (1)..(1356): n is a, c, g, or t
atgcaaaacatcaattacaacgacaagttcttgtccgctttcctcgccccttccgaactcgaaagctacaaccccgccgtcacgcaagcggagaaagcgttggtctccaagaccggcctcgggaatgattttctcggatggctcgacctgcccgcgaagacctcgcgcgaccttgtcaaatccatagccgacaaggcaaacgagattcgcgacaagattaaggacaaggacggcgtcctcatctcaatcggcatcggcggctcctacctcggcgctaaggcggctatcgagttctgctcccccacattcgaagacctgcgcaaaccgcgcgtgctcttcgccgggcaaaatataagcagcgactacctctccgatatgctcgaactcatcaaagaccgcgaggtggcggtgaacgtgatctccaagagcggcacgactaccgaacccgccatcgccttccgaatcgtccgcgagtggatggaaaaacgctacggacgcgaagaggcggctaagcggatagtggccactaccgacaaggctaaaggcgcgctgcgcaaattagccacagaggagaagtacacggcctacgagatacccgacgacgttggcgggcgcttctccgtcctcacgcccgtgggactgttcccgctggcggtggccggactagacataaccaaactgcttgaaggcgccgcgagcgcgtcggcgttctgcagcggcgagagcgtggaacagaacctcgcggggcgctacgccgccatccgcaacatcctctttagaaagggctacaccacggaggtcatggctaccttccagccgcaactgcacttcgtaaacgactggtggaagcaactctccggcgagagcgagggcaagaacgggacgggcataatgcccgccggactcgactacacgaccgacctgcactctctggggcagtatctgcaggacggtctgcgcaacgtgttcgaaacgttcatgatcctcaaaaagacaaagaagacaatgaccgtccccaagttcgacgacgacagcgacgacctcaactacttggccggcaggagcttcgaggacataaacgagaaggccttccaaggcacgatactcgcgcacttggacggcggcgtcccctcggcggcgctgatgctcgccgaccggtcggagaccacgctcgggcagctcttctacttcttcgagaaggcggtggcgctctccgggtacatgctgcgcgtcaaccccttcgaccagccgggggtggaggcctacaagaagaatatgttcgcgcttctgggcaaggccggctttgaaaagcaggctcaggcgctctcggccagaacaaaggatatatcaatatga

SEQ ID NO: 52206 - protein, 451 aa, Unknown
  Obtained from environmental sample
  DOMAIN (3)...(443): Phosphoglucose isomerase
  misc_feature (1)..(451): Xaa is any amino acid
MQNINYNDKFLSAFLAPSELESYNPAVTQAEKALVSKTGLGNDFLGWLDLPAKTSRDLVKSIADKANEIRDKIKDKDGVLISIGIGGSYLGAKAAIEFCSPTFEDLRKPRVLFAGQNISSDYLSDMLELIKDREVAVNVISKSGTTTEPAIAFRIVREWMEKRYGREEAAKRIVATTDKAKGALRKLATEEKYTAYEIPDDVGGRFSVLTPVGLFPLAVAGLDITKLLEGAASASAFCSGESVEQNLAGRYAAIRNILFRKGYTTEVMATFQPQLHFVNDWWKQLSGESEGKNGTGIMPAGLDYTTDLHSLGQYLQDGLRNVFETFMILKKTKKTMTVPKFDDDSDDLNYLAGRSFEDINEKAFQGTILAHLDGGVPSAALMLADRSETTLGQLFYFFEKAVALSGYMLRVNPFDQPGVEAYKKNMFALLGKAGFEKQAQALSARTKDISI

SEQ ID NO: 52207 - DNA, 417 bp, Unknown
  Obtained from environmental sample
  misc_feature (1)..(417): n is a, c, g, or t
atgaagtcataccgcaaagagttgacgttcaaaaccccccaccggcgcgactacataaacatcacgccgcaggtgacggacgcgctgcgcgagagcggcatacgagaggggctgtgcctcgtaaacgcgatgcacatcaccgccagcgtctacatcaacgacgacgagggggggctgctaaaagacttcgacgactggctcgaggggctggccccccacgagccggttgaccactaccgccacaacggatccgaggacaacggcgacgcccacctgaaacgtcaggtcatggggcgcgaggtcgtggtcgcggtgacggagggaaaactggacttcggcccttgggagcagattttctacggggagttcgacgggcggaggtcgaagcgggtactgattaagatcatcggggattag

SEQ ID NO: 52208 - protein, 138 aa, Unknown
  Obtained from environmental sample
  DOMAIN (18)...(136): Uncharacterised protein family UPF0047
  misc_feature (1)..(138): Xaa is any amino acid
MKSYRKELTFKTPHRRDYINITPQVTDALRESGIREGLCLVNAMHITASVYINDDEGGLLKDFDDWLEGLAPHEPVDHYRHNGSEDNGDAHLKRQVMGREVVVAVTEGKLDFGPWEQIFYGEFDGRRSKRVLIKIIGD

SEQ ID NO: 52209 - DNA, 993 bp, Unknown
  Obtained from environmental sample
  misc_feature (1)..(993): n is a, c, g, or t
gtgggaggaataaacggggattatggtgcgtatacggaaaagacatcatattcccaaaaagagggttttatgaaggttcataacgattttacgctgtattggagggtgtttccttcggggaaaaaggttgtgtattactacgcttatgacgaaagcggcaagcgactgatggggcgttccactggggaaaccaatttgacatcggcaagggtgaagtgcaataaacttttgaaggaaggcgagctggttcccaataaaaaccatgtgccgactttcgccgaatatgccgagggatggtgggagtgggaaacctgcgcctacctaaagaagcggcgcaagcggtacagcctgacacagacttatgctgacaataataaaaagaatttgaaaaaccatctgctgccgttcttcggcaacatgcccatgaacaagatcacaaaaatcgaggttgaagactttttcgacgcgcttatcgaaaaagaatatcaaaacacatccatcaacggcttttacggcacgctgaaaaccatgctcattgaagcggtagagcgaaacataataccaaaagacccgacagacaaaatggggcgtttggtaaatgacaggcgggctattaagatcatcacgccggaagaattcaagaaactgtttgtaggcgattggcggcgggtgtgggagaacgacaggctttcgtacacggctaacaagctggcggctttgacgggcatgagggcatccgaggtggtagggctaaaaggaagttttgtatatgacgagcatatttatctgtgcatgcagtatgacgattacggataccgccctacaaaaacaaaagacaagcacaatatacccctgacttccgacatgataaacgagctaaaagaactcaagcgcatgaatggggatgggtttgtgttttccctggacggaggggcaacgcctatttgccgaaataccggtataagcattccanccgggcatgctcgtcgataa

SEQ ID NO: 52210 - protein, 330 aa, Unknown
  Obtained from environmental sample
  misc_feature (1)..(330): Xaa is any amino acid
MGGINGDYGAYTEKTSYSQKEGFMKVHNDFTLYWRVFPSGKKVVYYYAYDESGKRLMGRSTGETNLTSARVKCNKLLKEGELVPNKNHVPTFAEYAEGWWEWETCAYLKKRRKRYSLTQTYADNNKKNLKNHLLPFFGNMPMNKITKIEVEDFFDALIEKEYQNTSINGFYGTLKTMLIEAVERNIIPKDPTDKMGRLVNDRRAIKIITPEEFKKLFVGDWRRVWENDRLSYTANKLAALTGMRASEVVGLKGSFVYDEHIYLCMQYDDYGYRPTKTKDKHNIPLTSDMINELKELKRMNGDGFVFSLDGGATPICRNTGISIPXGHARR

SEQ ID NO: 52211 - DNA, 738 bp, Unknown
  Obtained from environmental sample
  misc_feature (1)..(738): n is a, c, g, or t
atgcaaaagccggaaaaatattccctgaacaatatcagcggaacgataaacatacttaacgccatgtctgaaagtggaataaaatttttagttttttcttccagcgcggcggtctatggccagccccaatatctgcccattgatgaaaagcaccctctgaaccctgagaactactacggctttaccaagcttgaaattgaacgttttatgtattggtacgacaggctcaagggtacgcgctttgccagcctccgctactttaacgctgcgggctacgatgcaaaaggaagaatttcggggctggaacaaaaccctgcgaacctgattccggtaattatggaagttgccgtgggaatgcggagggaactgcctatttatgggaacgattacgaaacaagggatggtacctgcatcagggactacatccatgttagcgatcttgcctccgcacacgcgactgccctggattacataagcaaaaacgacaggagccttacagtcaacctgggaagcgaaaccggtactacggtgctggaagttcttgaagccacccggcgcattacaggcaggcccataccttcaagcgttacagggcggcgaagcggagacccggcgacacttacagcttcatcgaaacttgcaagggagcttttgggctggaaggcggatcattccagcattgacagcattatccaaagcacctgggaagtgtacaaaaagaccggaataagggcataa

SEQ ID NO: 52212 - protein, 245 aa, Unknown
  Obtained from environmental sample
  DOMAIN (1)...(170): NAD dependent epimerase/dehydratase family
  misc_feature (1)..(245): Xaa is any amino acid
MQKPEKYSLNNISGTINILNAMSESGIKFLVFSSSAAVYGQPQYLPIDEKHPLNPENYYGFTKLEIERFMYWYDRLKGTRFASLRYFNAAGYDAKGRISGLEQNPANLIPVIMEVAVGMRRELPIYGNDYETRDGTCIRDYIHVSDLASAHATALDYISKNDRSLTVNLGSETGTTVLEVLEATRRITGRPIPSSVTGRRSGDPATLTASSKLARELLGWKADHSSIDSIIQSTWEVYKKTGIRA

SEQ ID NO: 52213 - DNA, 1374 bp, Unknown
  Obtained from environmental sample
  misc_feature (1)..(1374): n is a, c, g, or t
ttggccgatactaatagtatgattcaaagatcagagtacctggggcggctggcaaaatggagggaaaaacagcctgtaaaagttataagcggagtcaggggcagcggaaaatcaaccctgcttgcaatgtacattgactggctcaaacggaccggcgttgatgacaagcagatcatttttatcaatatggaaaacccggaaagcgaatcccttttacattaccaggggctttacagctttatagcgaaacggctttgcgtaaataaatatacatatatctttattgacgaggttcagaaatgcagggattgtcaaaaagccattgaagggcttttaatcaaaaagcaggttgacctgtacgccgccgcttccaatacctgccttttctcaaaaacgccccatatcgaaatcaagatgctgccgctttccttcagtgaatacctgctttttaccaggctcaggaataaaaccatgcagattcctggcagggcgcaggaattggatgaatttaccccgaacgaatcaggaggaaaaaaacaggctcaggcggcatacccgtcaagaaaagacaaacggcttccccggcaaaaagaacagatggaaaagtttttgcgaagggaggattttaacaattacctgagttttggcggttttccgtttaccacggcgttaagcggcgacgcgggtatgatacgccaatgcgttgaggggatctataatacggttcttattaaggacatatcttggcagaacgggatcagcgatattcccctgcttgagaatatcgcgaaactgatgggacactccacaggccgtccaatcagttcaaaaaaactaagcgtggatattgacgcgaagggaagaaaaatatcaactaacacggtggaaacatatatgcgcgccctttgctcggcgtttgttttttaccacacagatcgctttgatataaaaacggaacggccgcttaaaaccctcggcaagtattacattgccgataccggaatcaggaacttgctgctggatcaggaatcacccgacattaccagacttcttgagaacatcgtgtacatggaactgctgcgccgggactgcaaggtgagcattggaaagcttggaggcgaggaggttagctttatcgcacaaaacgcttcagtggcggaaaaagggaatgaaagccagaattacgcctattaccaggttgcggaaacagtccgcaacggctctatcctcgcgaaaaaaagctcgccgctggaaaagataaaggacaacagcactaagtatatcctaagcctggacgaaacgcccttccgttcaaacaataaaggcattatacagaagaacttgatcgaatggcttcttgagacaaaaggataa

SEQ ID NO: 52214 - protein, 457 aa, Unknown
  Obtained from environmental sample
  misc_feature (1)..(457): Xaa is any amino acid
MADTNSMIQRSEYLGRLAKWREKQPVKVISGVRGSGKSTLLAMYIDWLKRTGVDDKQIIFINMENPESESLLHYQGLYSFIAKRLCVNKYTYIFIDEVQKCRDCQKAIEGLLIKKQVDLYAAASNTCLFSKTPHIEIKMLPLSFSEYLLFTRLRNKTMQIPGRAQELDEFTPNESGGKKQAQAAYPSRKDKRLPRQKEQMEKFLRREDFNNYLSFGGFPFTTALSGDAGMIRQCVEGIYNTVLIKDISWQNGISDIPLLENIAKLMGHSTGRPISSKKLSVDIDAKGRKISTNTVETYMRALCSAFVFYHTDRFDIKTERPLKTLGKYYIADTGIRNLLLDQESPDITRLLENIVYMELLRRDCKVSIGKLGGEEVSFIAQNASVAEKGNESQNYAYYQVAETVRNGSILAKKSSPLEKIKDNSTKYILSLDETPFRSNNKGIIQKNLIEWLLETKG

SEQ ID NO: 52215 - DNA, 474 bp, Unknown
  Obtained from environmental sample
  misc_feature (1)..(474): n is a, c, g, or t
atgcaaagtctttcgccgagcaatactccctatgatattaagcttgatattgacgatttgacggagatttcaagaattatacttaaatatcctgatattcttatcaatcttaatcttgcaagcaataacattaacagcatcggggaatccgttttttgcaactgcgacaatcttgtcagcgtaaccatgtccgacagtgttaccaaaattggtgttaacgctttttacaactgtataaatcttacggaaataaccattcccgaaagcgttacctttatcggggaattcactttttcaaactgcggcaaaattacaaaagtaacattcaaaggtaacattccttggggaaatttcagagatttttcattccccggcgacttgatgaacaagtattatgaaaatgatccaatcaacggaacgcccggaacatacgtcagagccgacagcgcaagccaaacatgggaaaaaatataa

SEQ ID NO: 52216 - protein, 157 aa, Unknown
  Obtained from environmental sample
  misc_feature (1)..(157): Xaa is any amino acid
MQSLSPSNTPYDIKLDIDDLTEISRIILKYPDILINLNLASNNINSIGESVFCNCDNLVSVTMSDSVTKIGVNAFYNCINLTEITIPESVTFIGEFTFSNCGKITKVTFKGNIPWGNFRDFSFPGDLMNKYYENDPINGTPGTYVRADSASQTWEKI

SEQ ID NO: 52217 - DNA, 777 bp, Unknown
  Obtained from environmental sample
  misc_feature (1)..(777): n is a, c, g, or t
atggtttccgatcttcttgaacgttccaaagagccctgccttaaagcgctgaaagacgcgggcgtaaccgccgataaaattgacgaggttatccttgtcggcggctcaacccgtattccggcggtgcagcagattgtcaaagacctgtttaagaaagaacccaacaagggagtaaaccccgatgaagcggttgctgttggcgcggcaattcagggcggtattctgggcggcgatgtcaaagacgtgctgctgttagacgtaactccgttgtcgctgggcattgaaacactgggcggcgtgatgacgaaactgattacgcgtaacactaccatcccgaccaagaaaagccagattttctccaccgccgccgacgggcagactgcggtttccattcaggttctgcagggtgagcgggaaatggcaaaccaaaaccgcgtactgggacgttttgatctggtgggtattccccccgcgccccgcggcgttcctcaaattgaagttgcctttgacattgacgcaaacggcattgtccatgtcagcgcgaaagacctcggcacaggcaaagagcagaagatacggattgaaagttccagcggcctcaacgatcaggatattgatcgcatggtgaaagaagcggagcttcacgccgaggaagacaaaaaagaacgggaaaaagccgaggttcgcaacgaagcggacagcatgatctacagcaccgaaaaaaatattaaggatttgggcgataaggtaagcgcggaggacaagagcaaaaactga

SEQ ID NO: 52218 - protein, 258 aa, Unknown
  Obtained from environmental sample
  DOMAIN (1)...(258): Hsp70 protein
  misc_feature (1)..(258): Xaa is any amino acid
MVSDLLERSKEPCLKALKDAGVTADKIDEVILVGGSTRIPAVQQIVKDLFKKEPNKGVNPDEAVAVGAAIQGGILGGDVKDVLLLDVTPLSLGIETLGGVMTKLITRNTTIPTKKSQIFSTAADGQTAVSIQVLQGEREMANQNRVLGRFDLVGIPPAPRGVPQIEVAFDIDANGIVHVSAKDLGTGKEQKIRIESSSGLNDQDIDRMVKEAELHAEEDKKEREKAEVRNEADSMIYSTEKNIKDLGDKVSAEDKSKN

SEQ ID NO: 52219 - DNA, 603 bp, Unknown
  Obtained from environmental sample
  misc_feature (1)..(603): n is a, c, g, or t
ttgagcgcctcagttttttctttgatagacggaatatcaccgctttccagagctttgcgtagagccgcgattgcctcttcagtttttgctcttgtcctccgcgcttaccttatcgcccaaatccttaatatttttttcggtgctgtagatcatgctgtccgcttcgttgcgaacctcggctttttcccgttcttttttgtcttcctcggcgtgaagctccgcttctttcaccatgcgatcaatatcctgatcgttgaggccgctggaactttcaatccgtatcttctgctctttgcctgtgccgaggtctttcgcgctgacatggacaatgccgtttgcgtcaatgtcaaaggcaacttcaatttgaggaacgccgcggggcgcggggggaatacccaccagatcaaaacgtcccagtacgcggttttggtttgccatttcccgctcaccctgcagaacctgaatggaaaccgcagtctgcccgtcggcggcggtggagaaaatctggcttttcttggtcgggatggtagtgttacgcgtaatcagtttcgtcatcacgccgcccagtgtttcaatgcccagcgacaacggagttacgtctaa

SEQ ID NO: 52220 - protein, 200 aa, Unknown
  Obtained from environmental sample
  misc_feature (1)..(200): Xaa is any amino acid
MSASVFSLIDGISPLSRALRRAAIASSVFALVLRAYLIAQILNIFFGAVDHAVRFVANLGFFPFFFVFLGVKLRFFHHAINILIVEAAGTFNPYLLLFACAEVFRADMDNAVCVNVKGNFNLRNAAGRGGNTHQIKTSQYAVLVCHFPLTLQNLNGNRSLPVGGGGENLAFLGRDGSVTRNQFRHHAAQCFNAQRQRSYV

SEQ ID NO: 52221 - DNA, 1119 bp, Unknown
  Obtained from environmental sample
  misc_feature (1)..(1119): n is a, c, g, or t
atggcaaagcgggattactatgaggttctcggtgtagagaaaaacgcctcgaaggatgatataaaaaaggcgtatcgtaaacttgccattcagtatcatccggataaaaaccccggcaacaaacaggctgaagaaaaatttaaagaagcgaccgaggcttacgagattctgggtgatgatcagaaaaaagccgcttatgatcaatacgggtttgccggagttgagggcatggcgggtcagggtgattattcgagcgtattccgcggttttgaagacatattcggcgaaggcggctttggcagtatttttgacagttttttcggcggcggtttccgcagaagttcatcaggcggcgtaagacagggagccaatctccgctacgatattgagattccgtttaaggacgcggtttacggcacaaaggttgaaattcaatattcacataacgaaacatgcgaagcctgcaaaggcgcgggatcggcggacgggtcaggcaagaaaacctgcccgacttgccgaggttcggggcagatacggcaaagccacgggtttttctcggtagcccaaacctgccatacctgtcacggcgaaggatacgtcatagaaacgccttgtaaagaatgcggaggaacgggaacccagaaaaagcgtcagaagataatggttaccattcccgccggcaccgacaacggcaaacggctggtaattcccagacagggagacgcgggtcccaacggaggacagccgggcgatctgtatgtgtttatcagagttaaacgccatgaatactttgaacggcaagggcacgatctttactgcgccgtcccaatctccgtaagccaagcggctctgggcgcggacattcacgtaacatcgcttgacaataaaacgataaaggtaaaagtacccgccggcactcaaagcggaaaactgctccgcatacgcggcgcgggagtcccgtcgggaggaacaaacggcgacatgtacatcaaggttatcgtacaaatacccgaaaaacttacccgccgcggcaaagatttgcttgaggaactggcaaaagccgagggacagaacgacagcccgaaaccgattccgctctcgcagcttgcggagaattag

SEQ ID NO: 52222 - protein, 372 aa, Unknown
  Obtained from environmental sample
  DOMAIN (139)...(219): DnaJ central domain (4 repeats)
  misc_feature (1)..(372): Xaa is any amino acid
MAKRDYYEVLGVEKNASKDDIKKAYRKLAIQYHPDKNPGNKQAEEKFKEATEAYEILGDDQKKAAYDQYGFAGVEGMAGQGDYSSVFRGFEDIFGEGGFGSIFDSFFGGGFRRSSSGGVRQGANLRYDIEIPFKDAVYGTKVEIQYSHNETCEACKGAGSADGSGKKTCPTCRGSGQIRQSHGFFSVAQTCHTCHGEGYVIETPCKECGGTGTQKKRQKIMVTIPAGTDNGKRLVIPRQGDAGPNGGQPGDLYVFIRVKRHEYFERQGHDLYCAVPISVSQAALGADIHVTSLDNKTIKVKVPAGTQSGKLLRIRGAGVPSGGTNGDMYIKVIVQIPEKLTRRGKDLLEELAKAEGQNDSPKPIPLSQLAEN

SEQ ID NO: 52223 - DNA, 657 bp, Unknown
  Obtained from environmental sample
  misc_feature (1)..(657): n is a, c, g, or t
atgacagattggccgagttccttgcgtctaattctccgcaagctgcgagagcggaatcggtttcgggctgtcgttctgtccctcggcttttgccagttcctcaagcaaatctttgccgcggcgggtaagtttttcgggtatttgtacgataaccttgatgtacatgtcgccgtttgttcctcccgacgggactcccgcgccgcgtatgcggagcagttttccgctttgagtgccggcgggtacttttacctttatcgttttattgtcaagcgatgttacgtgaatgtccgcgcccagagccgcttggcttacggagattgggacggcgcagtaaagatcgtgcccttgccgttcaaagtattcatggcgtttaactctgataaacacatacagatcgcccggctgtcctccgttgggacccgcgtctccctgtctgggaattaccagccgtttgccgttgtcggtgccggcgggaatggtaaccattatcttctgacgctttttctgggttcccgttcctccgcattctttacaaggcgtttctatgacgtatccttcgccgtgacaggtatggcaggtttgggctaccgagaaaaacccgtggctttgccgtatctgccccgaacctcggcaagtcgggcaggttttcttgcctga

SEQ ID NO: 52224 - protein, 218 aa, Unknown
  Obtained from environmental sample
  misc_feature (1)..(218): Xaa is any amino acid
MTDWPSSLRLILRKLRERNRFRAVVLSLGFCQFLKQIFAAAGKFFGYLYDNLDVHVAVCSSRRDSRAAYAEQFSALSAGGYFYLYRFIVKRCYVNVRAQSRLAYGDWDGAVKIVPLPFKVFMAFNSDKHIQIARLSSVGTRVSLSGNYQPFAVVGAGGNGNHYLLTLFLGSRSSAFFTRRFYDVSFAVTGMAGLGYREKPVALPYLPRTSASRAGFLA

SEQ ID NO: 52225 - DNA, 648 bp, Unknown
  Obtained from environmental sample
  misc_feature (1)..(648): n is a, c, g, or t
atgatcagatcggcacgagcgcctcggcctcacgccaaaaaaaagacgctccatccggagaaccagctccgcggggacgttgccaggaaaagggacgagtggaccgaggcccaaaaggacctagaccccggcaggctggtcttcctcgacgagagcggcctcagctgcgggatgaccaggctgtacggccgggcgaagaggggcgcgaggctcagggactacgcgccggacgtgcgcttcgagcggacgtccatcgtctcgacggtccgcctcgacggggggcaggcgcccatggtgttcaagggcgcgctggacggagccaccttcgccgcctacgtggagaaggtcctggccccgacgctgcgcgagggggacatcgttgtgatggacaacctgtcctcgcacaaggtggatggtgcgctggccccgatctacgcgaggggcgccggggcgctgttcctgccgccgtacagccccgacctcaaccccatcgaggagtgctggtcgaaggtgaaggcaatcctgcagggtctgaaggcgaggacgttcgacgagctggtagaggccgtgaaggtggcgctggacgcggtcaccctctcggacgtctcgggctggttcaggcactgcggatatggggtcaatatttag

SEQ ID NO: 52226 - protein, 215 aa, Unknown
  Obtained from environmental sample
  misc_feature (1)..(215): Xaa is any amino acid
MIRSARAPRPHAKKKTLHPENQLRGDVARKRDEWTEAQKDLDPGRLVFLDESGLSCGMTRLYGRAKRGARLRDYAPDVRFERTSIVSTVRLDGGQAPMVFKGALDGATFAAYVEKVLAPTLREGDIVVMDNLSSHKVDGALAPIYARGAGALFLPPYSPDLNPIEECWSKVKAILQGLKARTFDELVEAVKVALDAVTLSDVSGWFRHCGYGVNI

SEQ ID NO: 52227 - DNA, 564 bp, Unknown
  Obtained from environmental sample
  misc_feature (1)..(564): n is a, c, g, or t
gtggaccgaggcccaaaaggacctagaccccggcaggctggtcttcctcgacgagagcggcctcagctgcgggatgaccaggctgtacggccgggcgaagaggggcgcgaggctcagggactacgcgccggacgtgcgcttcgagcggacgtccatcgtctcgacggtccgcctcgacggggggcaggcgcccatggtgttcaagggcgcgctggacggagccaccttcgccgcctacgtggagaaggtcctggccccgacgctgcgcgagggggacatcgttgtgatggacaacctgtcctcgcacaaggtggatggtgcgctggccccgatctacgcgaggggcgccggggcgctgttcctgccgccgtacagccccgacctcaaccccatcgaggagtgctggtcgaaggtgaaggcaatcctgcagggtctgaaggcgaggacgttcgacgagctggtagaggccgtgaaggtggcgctggacgcggtcaccctctcggacgtctcgggctggttcaggcactgcggatatggggtcaatatttaggggaaatgctataa

SEQ ID NO: 52228 - protein, 187 aa, Unknown
  Obtained from environmental sample
  misc_feature (1)..(187): Xaa is any amino acid
MDRGPKGPRPRQAGLPRRERPQLRDDQAVRPGEEGREAQGLRAGRALRADVHRLDGPPRRGAGAHGVQGRAGRSHLRRLRGEGPGPDAARGGHRCDGQPVLAQGGWCAGPDLREGRRGAVPAAVQPRPQPHRGVLVEGEGNPAGSEGEDVRRAGRGREGGAGRGHPLGRLGLVQALRIWGQYLGEML

SEQ ID NO: 52229 - DNA, 504 bp, Unknown
  Obtained from environmental sample
  misc_feature (1)..(504): n is a, c, g, or t
gtgcctgaaccagcccgagacgtccgagagggtgaccgcgtccagcgccaccttcacggcctctaccagctcgtcgaacgtcctcgccttcagaccctgcaggattgccttcaccttcgaccagcactcctcgatggggttgaggtcggggctgtacggcggcaggaacagcgccccggcgcccctcgcgtagatcggggccagcgcaccatccaccttgtgcgaggacaggttgtccatcacaacgatgtccccctcgcgcagcgtcggggccaggaccttctccacgtaggcggcgaaggtggctccgtccagcgcgcccttgaacaccatgggcgcctgccccccgtcgaggcggaccgtcgagacgatggacgtccgctcgaagcgcacgtccggcgcgtagtccctgagcctcgcgcccctcttcgcccggccgtacagcctggtcatcccgcagctgaggccgctctcgtcgaggaagaccagcctgccggggtctag

SEQ ID NO: 52230 - protein, 167 aa, Unknown
  Obtained from environmental sample
  misc_feature (1)..(167): Xaa is any amino acid
MPEPARDVREGDRVQRHLHGLYQLVERPRLQTLQDCLHLRPALLDGVEVGAVRRQEQRPGAPRVDRGQRTIHLVRGQVVHHNDVPLAQRRGQDLLHVGGEGGSVQRALEHHGRLPPVEADRRDDGRPLEAHVRRVVPEPRAPLRPAVQPGHPAAEAALVEEDQPAGV

SEQ ID NO: 52231 - DNA, 1464 bp, Unknown
  Obtained from environmental sample
  misc_feature (1)..(1464): n is a, c, g, or t
atggaaaaaattgaaagagcgaaaaaaactttaatttatgaagaacttttttatcttgaagtaatgataggaaaacgcgcatttgagcggcgaaaaatatcaagtaaattcacggaagcgaaagaaaatcctgcgaaacaggtttcattttcagctttacaaaaaagacttgttgaacgattgcctttttcacttacaacagggcaatgtgaagcggttatggaaataaatcaggatatgggaaaagatattcctatggcgcgccttttgcagggtgatgtcggttcgggaaaaacgcttgtgtcatttctggctgcgttaaaagcagttgaagaaagaggtcaggctgcgattatggctcctacggagcttcttgcgctccaacatgctgaaaacgcagcccgccttcttgaaccgctgaggcttcatgtcgcttttcttacaggaaatatcaaggcaaaaggacgcaaggaacttataaaaaaccttaattcagacgttattgatattgttgtgggaactcacgctcttttttcaaaagacgtaatttataaaaatttaaaacttgttgtaattgacgaacagcaccgtttcggagtaacacagcgctcattgattatgacaaaaggcgattctcccggtcttttaatgatgagtgcaacgccaattccaagaactcttgctttaacagtcttcggcgatatggacgtttcggtatcaagatatgccgccgggaagaaacctgtaaagacgcatcttgcgaaagagtcaaacgaagaaaaggtatacagctttatccgtggtgaacttgagaagggaaggcaggcatattttgtctatccgttaattgaaggcggagaagacataaaggacgcggtttccatggcgcaaagactttctaaaaaaatatttccaaaacacaaaacggctcttattcactccaaactgcccgaagatgaaaaaaagcagataatggatgattttagaaaaggcaaaataaaaatacttgccgcaaccagcgttgtagaagtcggtgtagacgtgccgaacgccgcctgcatggtcattgaacacgccgagcgttttggtttatccgcgcttcatcaattacgcggacgagtcggcaggggagaggagcagtcgtactgttttcttgtttattcagacgaccttacggaagaaggcaaaacccgcttaaaagtaatgctggaaaacagcgacggctttgtaatcgcggaagaagatttaaaattaagaggtcccggacaaatagcggggacggaacaatcgggctaccttgttcttgggatagccgacccaatccgcgatatggaaacgctggaaagagcaagaaatgatgtgttttcgacattagagaatgatcccgatctgttgttggaaaataatcgcgtgattgctagggtgctggaacaggcttcgccgtttggcgaggttacgctataa

SEQ ID NO: 52232 - protein, 487 aa, Unknown
  Obtained from environmental sample
  DOMAIN (47)...(224): Type III restriction enzyme, res subunit
  misc_feature (1)..(487): Xaa is any amino acid
MEKIERAKKTLIYEELFYLEVMIGKRAFERRKISSKFTEAKENPAKQVSFSALQKRLVERLPFSLTTGQCEAVMEINQDMGKDIPMARLLQGDVGSGKTLVSFLAALKAVEERGQAAIMAPTELLALQHAENAARLLEPLRLHVAFLTGNIKAKGRKELIKNLNSDVIDIVVGTHALFSKDVIYKNLKLVVIDEQHRFGVTQRSLIMTKGDSPGLLMMSATPIPRTLALTVFGDMDVSVSRYAAGKKPVKTHLAKESNEEKVYSFIRGELEKGRQAYFVYPLIEGGEDIKDAVSMAQRLSKKIFPKHKTALIHSKLPEDEKKQIMDDFRKGKIKILAATSVVEVGVDVPNAACMVIEHAERFGLSALHQLRGRVGRGEEQSYCFLVYSDDLTEEGKTRLKVMLENSDGFVIAEEDLKLRGPGQIAGTEQSGYLVLGIADPIRDMETLERARNDVFSTLENDPDLLLENNRVIARVLEQASPFGEVTL

SEQ ID NO: 52233 - DNA, 795 bp, Unknown
  Obtained from environmental sample
  misc_feature (1)..(795): n is a, c, g, or t
atgcccgtctacgacaagccgatgatatactacccgctctccacgctgatgctggccggaataacggagatattggtcatcacgacgccggaggacggcgccgcgtttcggcggcttctaggcgacgggtcgcagtggggtataaaactctcatacgcggatcagcctcgtcccgacggccttgcgcaggcgttcattatcggcgaggagtttgtgggaagagataggtcggcgttgattttgggcgacaatatcttctggggtcacggcctcgtagagcgtttacaggtggccgtaaataaccgcgattcggccacgattttcgcctatcgggtaaacgacccgcaacgctacggaatcgttgaggttgacaaggcgggaaacgccgtatcgatagaggagaaacccgccgcgcctaagtcgaagttggcggtaaccggcctctacttttatgacgccgatgtctgtaagttggccaaaacgctaaagccgtcgccgaggggagagttagagataaccgatctcaatcgcctgtatttagaacgcggaaagttgcaagtggttgatttaggccgcggcatagcctggttagacaccggaacgcacgaatcgatgcttcaagcgtcgtcgtttgtggaaacgatacaagcccgccaaggcctaaaggtggcttcaccggaagagatagctttcaggcgagggcttataaacgcggaacaattgataaagttagcggagcctatgagaaagaatgagtacgggcggtatctcttggatgtagctaatggtcattga

SEQ ID NO: 52234 - protein, 264 aa, Unknown
  Obtained from environmental sample
  DOMAIN (1)...(215): Nucleotidyl transferase
  misc_feature (1)..(264): Xaa is any amino acid
MPVYDKPMIYYPLSTLMLAGITEILVITTPEDGAAFRRLLGDGSQWGIKLSYADQPRPDGLAQAFIIGEEFVGRDRSALILGDNIFWGHGLVERLQVAVNNRDSATIFAYRVNDPQRYGIVEVDKAGNAVSIEEKPAAPKSKLAVTGLYFYDADVCKLAKTLKPSPRGELEITDLNRLYLERGKLQVVDLGRGIAWLDTGTHESMLQASSFVETIQARQGLKVASPEEIAFRRGLINAEQLIKLAEPMRKNEYGRYLLDVANGH

SEQ ID NO: 52235 - DNA, 492 bp, Unknown
  Obtained from environmental sample
  misc_feature (1)..(492): n is a, c, g, or t
ttgattcttttaactttcatcatcaacacaaaaggagggtgccgtatgaaagcacgtcttttaaagggtgtgaagggcggcaagggatttacccttgttgaggttatcgtcgtcgcggtgatagtacttatcttggcggctgtggcgattccgctttatctcgggtatgttcgggacgcgagaaaggacgtcgcgacgaacatcgccagcgagataggccagcttctcgcggcggaaattgcgcaaggaaggttatcgcagcctattgacctcaacgctatgacgcataccatcccccctgagaggccgggcgattccccgcagcaagtcgtacaggccatcggcgaaggcgaagccaacgtaaacaaggtaattgttcccgcggattataaagccactcttgacggcgactatgttgtcgttacgtatgttaaagatgaaaatatatttgggcgtttcctatttacggaagccaccagaggcgggatgtga

SEQ ID NO: 52236 - protein, 163 aa, Unknown
  Obtained from environmental sample
  DOMAIN (28)...(51): Prokaryotic N-terminal methylation motif
  misc_feature (1)..(163): Xaa is any amino acid
MILLTFIINTKGGCRMKARLLKGVKGGKGFTLVEVIVVAVIVLILAAVAIPLYLGYVRDARKDVATNIASEIGQLLAAEIAQGRLSQPIDLNAMTHTIPPERPGDSPQQVVQAIGEGEANVNKVIVPADYKATLDGDYVVVTYVKDENIFGRFLFTEATRGGM

SEQ ID NO: 52237 - DNA, 1356 bp, Unknown
  Obtained from environmental sample
  misc_feature (1)..(1356): n is a, c, g, or t
atgataggcgaacttaatgaagaaagcggaataatgggaatttacaatggagtgaatattgttcgcaatgtgtccaccggtctttacgctttacagcacagagggcaagagagcacaggcattgccgccgcaaatggagaaaaggttagggtgcgcaaatcaatgggcttggtagctggctttgtggaagacggcaaactagacgaaattgccgaaaactgcatcgcagcaataggccacgttagatccagcgctgttagcaaccgcacacttacaaacgcccagcgtatgcttgtaacttgcaaatggggttttttggctgtggtgctcaacggcagcataacaaatgcaggcgaacttcgtgcagaaatgggagaaagtgggcatatttttcagagcaattcccccgccgaagttattttgcacgaaatttcacgcaccaaagcggataatttgacagatgctattcgcacagctataaaaaaactggggggcagtttttgcgctttgttcttaaccccagataccatgtatgttgcaagagacgggtttggatttaggccgctttgcatgggcaaaaaaaacgattcatggtttttagcaagcgaatcttgcgcatttgatttattgggcgtggactatgttaaggatattcaccccggcgaatttttggttataaataaagacggaattcactacgagcaactattgaaaaaagaccgaaaagcattttgcatttttgaatttgtatattttgctcgcccagacagcaggatttatgagcaaagtgcagataaggttcgcagaaaaatgggaaaaaagctcgcagaagaacacccagtagatgcagacatagtaattccctgccccgatagttccacaacagccgcgctgggctatgcgcaagcgagcggaattcaatttgaaataggacttntgagaaatcattatctcggcaaaacattcatagacccttctcaaaatgttcgcgagcaaagggtgaaacttaaattcaacaccataaacggagtgctaaaagatagaagagtgtgtctggtggacgattccattgttcgcggaacaacactgaaaattctctgcaaaatgataagaaatgcgggagcaagagaagttcacattcgcgttgcaagcccgcccgttgaacacccgtgcaactacggaatggattttccaagcccagcggaattgattgcaagtgcgttagcacctgcggaggtggcaaaaatgctgggcgtggacagccttggttatttgagcgttaagggaatgcgagaatgcaccggcttgccggatgatttttgctgtgcttgttttgacgatatttatcccgaataa

SEQ ID NO: 52238 - protein, 451 aa, Unknown
  Obtained from environmental sample
  DOMAIN (256)...(398): Phosphoribosyl transferase domain
  misc_feature (1)..(451): Xaa is any amino acid
MIGELNEESGIMGIYNGVNIVRNVSTGLYALQHRGQESTGIAAANGEKVRVRKSMGLVAGFVEDGKLDEIAENCIAAIGHVRSSAVSNRTLTNAQRMLVTCKWGFLAVVLNGSITNAGELRAEMGESGHIFQSNSPAEVILHEISRTKADNLTDAIRTAIKKLGGSFCALFLTPDTMYVARDGFGFRPLCMGKKNDSWFLASESCAFDLLGVDYVKDIHPGEFLVINKDGIHYEQLLKKDRKAFCIFEFVYFARPDSRIYEQSADKVRRKMGKKLAEEHPVDADIVIPCPDSSTTAALGYAQASGIQFEIGLXRNHYLGKTFIDPSQNVREQRVKLKFNTINGVLKDRRVCLVDDSIVRGTTLKILCKMIRNAGAREVHIRVASPPVEHPCNYGMDFPSPAELIASALAPAEVAKMLGVDSLGYLSVKGMRECTGLPDDFCCACFDDIYPE

SEQ ID NO: 52239 - DNA, 627 bp, Unknown
  Obtained from environmental sample
  misc_feature (1)..(627): n is a, c, g, or t
atgtatccacttctcgcgctaccaatagcttatttgctaggctcaataccaacggcggtttgggttgcaagaatttacaagaaaatagatataagagaatacggcagcaaaaatgctggtttaacaaacgtattcagggttttggggtggaaacctgccctgcctgttattgcggttgacttggcaaaagggttttttgcaccttttatagcaatgcagttaaatggtacactagaagtttatacttggcttccggttgttgccggaatgctcgtggttttggggcatagctttacctgcttggcgaggttcaagggtggaaaaggagttttaaccacgctcggcgtgttcctcgctttgcaaccggtgcttgctctcacttgctttgccttttgggggcttttgtttgtggcaacaaaatatgtatctgtggcaagcatcggggcttgtgctatgctttctgtgctttctgcggtttgttttgcctacgagtgtgatggtatgaatatttacgtccttgtgttatctcaaattgtagcgatttttgttatcgttaaacacaaggcaaatatggttaggctttatcatggcacagaaaatggatttggaaaaaagaggaaaacatga

SEQ ID NO: 52240 - protein, 208 aa, Unknown
  Obtained from environmental sample
  SIGNAL (1)...(22)
  DOMAIN (7)...(197): Domain of unknown function DUF
  misc_feature (1)..(208): Xaa is any amino acid
MYPLLALPIAYLLGSIPTAVWVARIYKKIDIREYGSKNAGLTNVFRVLGWKPALPVIAVDLAKGFFAPFIAMQLNGTLEVYTWLPVVAGMLVVLGHSFTCLARFKGGKGVLTTLGVFLALQPVLALTCFAFWGLLFVATKYVSVASIGACAMLSVLSAVCFAYECDGMNIYVLVLSQIVAIFVIVKHKANMVRLYHGTENGFGKKRKT

SEQ ID NO: 52241 - DNA, 855 bp, Unknown
  Obtained from environmental sample
  misc_feature (1)..(855): n is a, c, g, or t
ttgattacccgtttagccgcagaaaaatcgttaaacatcttaaaggaagaacacatacttgattttctttttacaaggaataatcttgtccttgcaaatgaagtaatcaatataattaataacgtcagtcccgacatgttagtttcagatcattgtcccggtctattggaagtttattatgatttaaaaaaatggagaaccgatccaactaatccgattgaacatctgacaaccaagatgctttcgcttatttcagataatttaaatcgtgatgccgaaaaggacgccgtttacgcgtcgagtcaggaaagtaataattccgaatacagcatgaggcttggaaaggctcttgtttactgggcggattcaactcataataccgaatgggcggggataggtcgctccttgattttatcggcagtcgcaaacgggaacgcgggaagactccacaatattttaaatcccacagagtattacccaagagcgtcattgcttacaaatgaggggatttgggtgtggactgtttctccgacaatcagagcatactacacggacggcaatcttaacatctctgtcgcctttccagcaaatatggcgcactttatgataatccgcggagtgcgtcctttcttgagaattcagattcacggcatggactggagaacggacagtcagtttgaacgttacgattcatcgggctggatatattttcccgaagaacaaacattgatactaaagctcaaacatcgcacaacactggaaaatatcaggatattttacagggtagaagcgccgcctgtaattaacgaagaagtcgaagaggttcttccctattatgactgggctcagtattaa

SEQ ID NO: 52242 - protein, 284 aa, Unknown
  Obtained from environmental sample
  misc_feature (1)..(284): Xaa is any amino acid
MITRLAAEKSLNILKEEHILDFLFTRNNLVLANEVINIINNVSPDMLVSDHCPGLLEVYYDLKKWRTDPTNPIEHLTTKMLSLISDNLNRDAEKDAVYASSQESNNSEYSMRLGKALVYWADSTHNTEWAGIGRSLILSAVANGNAGRLHNILNPTEYYPRASLLTNEGIWVWTVSPTIRAYYTDGNLNISVAFPANMAHFMIIRGVRPFLRIQIHGMDWRTDSQFERYDSSGWIYFPEEQTLILKLKHRTTLENIRIFYRVEAPPVINEEVEEVLPYYDWAQY

SEQ ID NO: 52243 - DNA, 996 bp, Unknown
  Obtained from environmental sample
  misc_feature (1)..(996): n is a, c, g, or t
atgactgggctcagtattaactttccattttcttataaaatattcctgcctgtttttttattactttgtttgttatttgcatgcaaggcaaaagaaacagttacagagcagacagaagaacaagttataattgaacaaacgcaggaagaaacggaagtccctaaacagattacagaagaaaacaacagtaaagaaaattttaaggtttcatataacgttcagcgtccttcatcaggtcttccaatcataaaaggcagagtaaattcttccgagataaaccctgtcaattatgaaaatcccgatcttgatattttaagacagatgggagccgaacagtatttaatttctttctttgcgggcgaacaattttaccgcgccggaaacatggacagggcgcttgttgaatacaataattcaattaacagtaacagggaatttatagaagcgctgatttccagagggaatttatggcttaagaaaagagactatgcaaaagccattgatgattattcaagatcaatcagactcgactcaggcagggcggaaatttacaactaccggggtttcgcaagaatggaacgcggagagattaaccttgcaatagatgattttacccgatctgtcgcgcttaataaaaattatgtcgacgctcttattaaccgttcatatgcatactatcaaaaaggcgactacagcagggtaattgaagactgtgatcaaattttaaaattagagccggtaaacgcatatatctggaacagacgcggcagcgcatggtacctaaaggaagatgacgacagggcaataagagattttacagaagcaataagacttaaaggcgattatgcaacagcatggttcaacaggggaaatgctttttataacaaacgtgaatatgacaaggcgcttgcggatattaacaagactatatctataaatccgtcatataccggagcgcataccttaaaagaaagtattatgcgcattttgaactga

SEQ ID NO: 52244 - protein, 331 aa, Unknown
  Obtained from environmental sample
  SIGNAL (1)...(27)
  DOMAIN (147)...(180): Tetratricopeptide repeat
  misc_feature (1)..(331): Xaa is any amino acid
MTGLSINFPFSYKIFLPVFLLLCLLFACKAKETVTEQTEEQVIIEQTQEETEVPKQITEENNSKENFKVSYNVQRPSSGLPIIKGRVNSSEINPVNYENPDLDILRQMGAEQYLISFFAGEQFYRAGNMDRALVEYNNSINSNREFIEALISRGNLWLKKRDYAKAIDDYSRSIRLDSGRAEIYNYRGFARMERGEINLAIDDFTRSVALNKNYVDALINRSYAYYQKGDYSRVIEDCDQILKLEPVNAYIWNRRGSAWYLKEDDDRAIRDFTEAIRLKGDYATAWFNRGNAFYNKREYDKALADINKTISINPSYTGAHTLKESIMRILN

SEQ ID NO: 52245 - DNA, 918 bp, Unknown
  Obtained from environmental sample
  misc_feature (1)..(918): n is a, c, g, or t
atggaagaagttttacaatgggggctggatttcatccggcagatacaaacttatgcgactccggggctgaccttaactatgcgggcaattaccaatattagctcaaccgccgtttacatggcttttattccttttgtgtattggagcattgatgaaaaaaaaggcctgagcctggctgtggtattgctcatatcggcatggataaacttcgccctgaagtattttctggatcagccgcgcccgttttttgaggcctacgacccgtcggtaggcagaaccgccgttacaatgggcggcttcccgtccgcccacgcgcagagttcgcttgttatgtggatgataatcgcctcatggagaatcatcccccggctttcccgctttgtccattttggcatagccgcctttttatgcctgcttataggtttctccaggatctatcttggcgcccatttcccgactgacgtcttaggcggctggctgcttggcggaacaatactcgccgtttactttttggccggcagccggattgaggcgctgcttaaatccccccgcgtgggcttgataagcgccgccgcccttgcctttgccatgaacatgtaccggccatccgagtatttgctcatgcccggcggcatgatccttggtctgggcataggctgtttcctctgccgccgttatataaattttaacgcctgtctgaaggacagaacaggaacggcaaagctcataaccctgcttgtccgttatgcgctgggaatcactgcaatggttttattatatgtggcaacaggaaaagccgttaacggtatgcgcaattccggcaattaccagctttatgtttttacgcgctatattctcctgtcgatttggctttcggccggcgccccctgggttttttgcaagctaagacttgcataa

SEQ ID NO: 52246 - protein, 305 aa, Unknown
  Obtained from environmental sample
  DOMAIN (54)...(178): PAP2 superfamily
  misc_feature (1)..(305): Xaa is any amino acid
MEEVLQWGLDFIRQIQTYATPGLTLTMRAITNISSTAVYMAFIPFVYWSIDEKKGLSLAVVLLISAWINFALKYFLDQPRPFFEAYDPSVGRTAVTMGGFPSAHAQSSLVMWMIIASWRIIPRLSRFVHFGIAAFLCLLIGFSRIYLGAHFPTDVLGGWLLGGTILAVYFLAGSRIEALLKSPRVGLISAAALAFAMNMYRPSEYLLMPGGMILGLGIGCFLCRRYINFNACLKDRTGTAKLITLLVRYALGITAMVLLYVATGKAVNGMRNSGNYQLYVFTRYILLSIWLSAGAPWVFCKLRLA

SEQ ID NO: 52247 - DNA, 300 bp, Unknown
  Obtained from environmental sample
  misc_feature (1)..(300): n is a, c, g, or t
ttgatgcnggacttttcggcgcagtaccgggaagcggttggcagcgacgaatccgacgaggagattctccttaaaggagagagggtctggaatattgaaaagcaattcaatatgcaggccggggttgagaaggataccctgccgccaagacttcttcgggaagccctgccctccggcgcggccaaaggcaaagttactcagcttgaagtcatgctcaaggaatattattcactccggggttggaatactgaaggcgcgccgaccaaagaaaaacttggggcgctgggattgaaaggttag

SEQ ID NO: 52248 - protein, 99 aa, Unknown
  Obtained from environmental sample
  misc_feature (1)..(99): Xaa is any amino acid
MMXDFSAQYREAVGSDESDEEILLKGERVWNIEKQFNMQAGVEKDTLPPRLLREALPSGAAKGKVTQLEVMLKEYYSLRGWNTEGAPTKEKLGALGLKG

SEQ ID NO: 52249 - DNA, 480 bp, Unknown
  Obtained from environmental sample
  misc_feature (1)..(480): n is a, c, g, or t
ttgttaaaagtacaaatgaaccccgaccttatgaccgcagatttaaagaagaaatcatcctcaagccaaagtttctggcttgttggacagcccgatgtagagcttatccatatcgaaaaaggagccgacaaaggcaagtataaaatcaaagtaaaaggctttgactattacgatataaaacaaggaatagtaaattcaggcggaaccgataaaatcgccatgtggatgcttgataccgattatgacggcatgtccatagaacccaaacaggtatttttcccgatggaagggaaaaacgaaggttgggataaactggcaaaaaccctaaaagcggaaatcaaccctgaccttatagaaaaatacagaggcacagaatccctgccatttacaattaaagataatacccaaatagccgtcaagatagtcgatgataggggaattgaaagccttaaagtaatttcggtaggcgcaaatggctga

SEQ ID NO: 52250 - protein, 159 aa, Unknown
  Obtained from environmental sample
  misc_feature (1)..(159): Xaa is any amino acid
MLKVQMNPDLMTADLKKKSSSSQSFWLVGQPDVELIHIEKGADKGKYKIKVKGFDYYDIKQGIVNSGGTDKIAMWMLDTDYDGMSIEPKQVFFPMEGKNEGWDKLAKTLKAEINPDLIEKYRGTESLPFTIKDNTQIAVKIVDDRGIESLKVISVGANG

SEQ ID NO: 52251 - DNA, 867 bp, Unknown
  Obtained from environmental sample
  misc_feature (1)..(867): n is a, c, g, or t
atgaaaaatttagtaattgcaaatagaatattagctactgaaaataaattaagatacaaaagaaaattaggtgattttgctgtaactccaattggaaatatttggactgatttgatgggagcttctaacctaatatatgttgttcagacaaatgaaagaatcatccaacgttgtctcctcatgaccaccgaccccggcgaccttgtactcgacatcacctgcggaagcggaaccaccgcttacgttgccgaacaatggggacgccgctgggtaacctgtgacacttcccgcattgccatcacccttgcaaaaaaacgcctaatgaccgcaacatttgattattacaaactggcgcacccggaacagggagtatcaagcggctttgtgtacaaaacagtcccacacatcacactcaaatccatagcgaataacgaaccgccggaacaggaaacgctctacgaccaaccggaaatagagaaaagaaaagtccgcatttcaggcccctttaccgtggaagcccttcccgctccggtagtaaaaccactcgacgatgatactcaccccgctccgtttttccatgagaacgccgctaaaaaacaatccgactggatgcaggaattaaaagcgtcgggcatattggggcggcagggagaaaaaattcaattctccagagtagaaccgttggaaggaacaaaatttctccacgcggaagccgagacaaaagaaacagacagaaaaaaagccgtcatttgttttgcgggcgaaacccgccctctcgatattcgcatggttacccaagcgttgaatgaggcggaaaccataagaccgaaacccgtttacatcgtttttcgccgctttccaatttga

SEQ ID NO: 52252 - protein, 288 aa, Unknown
  Obtained from environmental sample
  misc_feature (1)..(288): Xaa is any amino acid
MKNLVIANRILATENKLRYKRKLGDFAVTPIGNIWTDLMGASNLIYVVQTNERIIQRCLLMTTDPGDLVLDITCGSGTTAYVAEQWGRRWVTCDTSRIAITLAKKRLMTATFDYYKLAHPEQGVSSGFVYKTVPHITLKSIANNEPPEQETLYDQPEIEKRKVRISGPFTVEALPAPVVKPLDDDTHPAPFFHENAAKKQSDWMQELKASGILGRQGEKIQFSRVEPLEGTKFLHAEAETKETDRKKAVICFAGETRPLDIRMVTQALNEAETIRPKPVYIVFRRFPI

SEQ ID NO: 52253 - DNA, 579 bp, Unknown
  Obtained from environmental sample
  misc_feature (1)..(579): n is a, c, g, or t
gtggcgcgggcgatcttcaacggcgacacggtaagcggagtaactacgatggtaatggaggaatctctcgacgccggcggtattctactgcgtgaggaagttccggttccgcttgaaacgacgacgggagagcttaccgaaacgctcgcggatgtcggcgcgcggctgctgcttaaaacgctggagggattgcaatccggcggccttgtgcctatacctcaggacgagtcactggtgacatgggcgccgaaaatcacaaaagccgaatccgcggtttcgtgggaactgtcggcgccggaaattcacaaccgcatacgggcgctgaatccctggccgggcgccgccgctgattttcacggtgataaggtatgcctctggcgaagcctgccgtcggaaggcggtgaaaatgccgcgccggggactctgcttggtgtcgcgggaagcgcgctgcgcgttgcatgcggcggcggaaccgtgcttgacatttttgagatacagcgtcctggaaaaaagcgaataaacggcagggaatttgcgtccggcgcgcgcctgaaacccggcggcctgtttagttcgtag

SEQ ID NO: 52254 - protein, 192 aa, Unknown
  Obtained from environmental sample
  DOMAIN (86)...(183): Formyl transferase, C-terminal domain
  misc_feature (1)..(192): Xaa is any amino acid
MARAIFNGDTVSGVTTMVMEESLDAGGILLREEVPVPLETTTGELTETLADVGARLLLKTLEGLQSGGLVPIPQDESLVTWAPKITKAESAVSWELSAPEIHNRIRALNPWPGAAADFHGDKVCLWRSLPSEGGENAAPGTLLGVAGSALRVACGGGTVLDIFEIQRPGKKRINGREFASGARLKPGGLFSS

SEQ ID NO: 52255 - DNA, 645 bp, Unknown
  Obtained from environmental sample
  misc_feature (1)..(645): n is a, c, g, or t
gtgttctgcaatatgttaaccgacatggaaaactccaataaaaatctgactctttcgaaggtctatgatattgatgaaactagcataatgtacgccgacggcagtaaatggcccacttcctcgaaccagaccataatcagcgcgaaggtaactattaattgggacgccaacggataccgcctgccgaccgaggccgagtgggaatatgccgccagaaacggaaaaggctcccccggagactttgactgggccggcagcaataccgcgtctgaagtggcatggtacggaggtacaggcggaaccgccacggatcgcacaactcatcctgtcggattattaaagcccaacagcctgagaacttttgacatgagcggaaatgtgtgcgaatggtgctgggacgaattcagttcaagttactatacggcaagcagcccgtcaattacggatccgaaaggacccggggcgaacacggtgataattaataatcccggtcaggacacttatcgcgtccgccggggaggaagctggaaccatgtggaaaacaacacgcgcgtcttcctgagggactccttccagcctaccgataccaacatgactaatttctggactataggcttccgtgttgtacgcggcccgttaaaataa

SEQ ID NO: 52256 - protein, 214 aa, Unknown
  Obtained from environmental sample
  DOMAIN (5)...(210): Domain of unknown function (DUF323)
  misc_feature (1)..(214): Xaa is any amino acid
MFCNMLTDMENSNKNLTLSKVYDIDETSIMYADGSKWPTSSNQTIISAKVTINWDANGYRLPTEAEWEYAARNGKGSPGDFDWAGSNTASEVAWYGGTGGTATDRTTHPVGLLKPNSLRTFDMSGNVCEWCWDEFSSSYYTASSPSITDPKGPGANTVIINNPGQDTYRVRRGGSWNHVENNTRVFLRDSFQPTDTNMTNFWTIGFRVVRGPLK

SEQ ID NO: 52257 - DNA, 1035 bp, Unknown
  Obtained from environmental sample
  misc_feature (1)..(1035): n is a, c, g, or t
atggacagtcccgccgaaaaagaggcccgcgaccgaggggccacgctctacattcccgaaaccagcatccgaatgctcgccgatgaaagcctgccgcttttcgcccttggcctcgcagagacgtcacccgccctgacttttaaaatgacgcttaacaataccggcgaaattgaaaaaacagaaattttcccttctatagtaaaagttaagcggttaacctacaaagaggcggatgaatatttagatgatacgcatagcgaggcgcctgaagccgttgctttgcgatcgcttaacgcattggctgaacgcaatctcaagcggcgcactgcgttaggagcaatcaatattgatatgccggaaacccatatcagcctgaacgaagggcgggtggaaattgagcttataacgcggtacaagtcggcggacatggtacgcgaatgtatgctccttgccggtgaaggcgcgggattatggtgtttgcaccgtaatctgcccgttccctacatcatgcaggaaaccggggatctgcccgatgaaacgcttgagggcatggccggttattaccagcttcgccgctgcatgaggccccgcgccctttcaacaaggcccgggcagcactcaggccttggccttgatacttatattcaggtaaccagcccactgcgccgttataccgaccttcttgcccacttgcagatccgcgcggttttaagaggcgagacccctctaagcgccgatgaaatctcagccagaatgaacgcgggggaagcggctatatccgccgtcaatcaggcggaacgcgcctcccgcggccattggactatggtgtaccttgcaggcaaaaaagactctgtctgggacgcgatcgcccttgaaaaaaaaggaaaccgctgggcggcgataattccctcactcgccctggaaacactggttcccctgcggaaagagctgtcacctaacgatcctctgaagctggttctgaaatcggtgaatatcccaacaggcgaggcggtgtttgcctcaccctccgagtag

SEQ ID NO: 52258 - protein, 344 aa, Unknown
  Obtained from environmental sample
  DOMAIN (1)...(171): RNB-like protein
  misc_feature (1)..(344): Xaa is any amino acid
MDSPAEKEARDRGATLYIPETSIRMLADESLPLFALGLAETSPALTFKMTLNNTGEIEKTEIFPSIVKVKRLTYKEADEYLDDTHSEAPEAVALRSLNALAERNLKRRTALGAINIDMPETHISLNEGRVEIELITRYKSADMVRECMLLAGEGAGLWCLHRNLPVPYIMQETGDLPDETLEGMAGYYQLRRCMRPRALSTRPGQHSGLGLDTYIQVTSPLRRYTDLLAHLQIRAVLRGETPLSADEISARMNAGEAAISAVNQAERASRGHWTMVYLAGKKDSVWDAIALEKKGNRWAAIIPSLALETLVPLRKELSPNDPLKLVLKSVNIPTGEAVFASPSE

SEQ ID NO: 52259 - DNA, 543 bp, Unknown
  Obtained from environmental sample
  misc_feature (1)..(543): n is a, c, g, or t
gtggactccaaattccctctggagagttttcaaaggcttattgaagcggacaacgacgaagacaaaaaacgttttaagagggaatttatttccaccgtcaagaagcgcatagatgaaatccagactaaatacatcaaccccgcggaaaaaacctttgacttcgcgttgatgtatattccggcggagaatgttttttatgagataataatcaacgattcccttaccaacaaggattatgagcttctgaattacgcaatggaaaaacacgttatacctgtttcacctaatagtttctacgcctatctcatggttctggtttttggtttgcaagggcttcagatagagcaggaagccaaagtcatacgcggcgagctggcccaggtacagaatatgctgggaaaatttttcaccgaatacggccaggtaggaaagcacctctccaacgccatcggcaagtacaacgattccgagaaaagcgtcgaaaaactcaacgatcgcctgaacaggatcacgggtcagaaggcggagctactcggagggtga

SEQ ID NO: 52260 - protein, 180 aa, Unknown
  Obtained from environmental sample
  DOMAIN (1)...(180): RmuC family
  misc_feature (1)..(180): Xaa is any amino acid
MDSKFPLESFQRLIEADNDEDKKRFKREFISTVKKRIDEIQTKYINPAEKTFDFALMYIPAENVFYEIIINDSLTNKDYELLNYAMEKHVIPVSPNSFYAYLMVLVFGLQGLQIEQEAKVIRGELAQVQNMLGKFFTEYGQVGKHLSNAIGKYNDSEKSVEKLNDRLNRITGQKAELLGG

SEQ ID NO: 52261 - DNA, 372 bp, Unknown
  Obtained from environmental sample
  misc_feature (1)..(372): n is a, c, g, or t
atgatgaaccgcatggatcagaactataatgtttctcagagcaatatcgtgaagcagcttgataactccaaccgtgtaattaacgacatacacaccaaactcggctcgctggaacagaccgcgagaaacatccaggacataggaaataatatttccacccttacggatttattgcagccgcccaaactcaggggcaatttgggagaataccttttggaagaccttttgcggcagatatttccggctaagaatttcgagaccaaacacagtttcagcaacggcacccaggtagacgccgtaataaagctggcgggacggaatagtcccggtggactccaaattccctctggagagttttcaaaggcttattga

SEQ ID NO: 52262 - protein, 123 aa, Unknown
  Obtained from environmental sample
  misc_feature (1)..(123): Xaa is any amino acid
MMNRMDQNYNVSQSNIVKQLDNSNRVINDIHTKLGSLEQTARNIQDIGNNISTLTDLLQPPKLRGNLGEYLLEDLLRQIFPAKNFETKHSFSNGTQVDAVIKLAGRNSPGGLQIPSGEFSKAY

SEQ ID NO: 52263 - DNA, 1440 bp, Unknown
  Obtained from environmental sample
  misc_feature (1)..(1440): n is a, c, g, or t
ttgggtaatgtagaagagccgtcgaatgttcagggatggccgcttatcgatcttttccccgggaagaatttaaaaacatttgccgggcagatgttaaaaagcaaggacaattatgcggaggactgggaattttcgcttaatggacaaaaaaggtatttcaaggcgtcatctcacggtttacctggaaataccggcagttctcttgtcaacttgtatgacatgacctatcttgcggaacgcgacgaaattgctgccatgaaagacagcatgaaaataggccttttctacatggatcaaaattacgtcatacaggatcactattcgcgttatctggaagaactgctgtctgaagaaaacctgttcggcaaattatttacggatgtaattgcaaattcagttacacctaacgaaatggcgagcataaaagattattttggaatggtaatggaacgtacctatgatcaagatattcttgacgatataaacccaatgaatgaactgcattataataatgtcagaacaggcgacagaaaagtatttcagtgcgcatttgccacagtggaacgggggcatggagaagtctttttgctggtaacggtttacgatataaccgcaagggtagaactgcagcaaaagctggctgaagaagaaggtaagcgtcaggaagaaatgcagtctgtctttgaacttatccaggttgaacctgccgtgtttagcgatttcatagaagatatggaagttgaattcactagtattgataagattctcaagaatgacactttatccgctcatgatgcgcttgtaaaagtttatcaatctgtccatgcaataaaatcaaacgcagtaattttaggattaaatgtatttggcaataaggttcataatctggaatcaaagataaaaaaattacgcgaacaggaaggcgaagtgccatttgttgaaatgttgaacctgactgtagatatagaaaaaatatcgaacgaaagagaaagttttaaagaggtaatcgcaaaactcaggtcttatgccggcgggagcggcggcggcggcggtggtggagaaaggcagagtgttaaggttttggttgaatctcttgccaagaccacagccagagtcgcgcaagacatgggaaaacaaattaagtttgtggcttctgagatagaatctgaagcgcttgataacagtccaaggcgcgttgtaaaagatattcttatgcagcttattcgtaactccgcagtacatggaattgaaagaccggatgagcgcaagaaaaagggcaagaacgaaaccggcatagtaaaattgtctattaaaacctcggaagatcgcaagagtgtccacgtaaaactgatcgatgacggaaacggtttggattataagaagattgcccaaaaagcgctgcaaaagaaaataatcaagaaagaagatgtgggaaaataa

SEQ ID NO: 52264 - protein, 479 aa, Unknown
  Obtained from environmental sample
  misc_feature (1)..(479): Xaa is any amino acid
MGNVEEPSNVQGWPLIDLFPGKNLKTFAGQMLKSKDNYAEDWEFSLNGQKRYFKASSHGLPGNTGSSLVNLYDMTYLAERDEIAAMKDSMKIGLFYMDQNYVIQDHYSRYLEELLSEENLFGKLFTDVIANSVTPNEMASIKDYFGMVMERTYDQDILDDINPMNELHYNNVRTGDRKVFQCAFATVERGHGEVFLLVTVYDITARVELQQKLAEEEGKRQEEMQSVFELIQVEPAVFSDFIEDMEVEFTSIDKILKNDTLSAHDALVKVYQSVHAIKSNAVILGLNVFGNKVHNLESKIKKLREQEGEVPFVEMLNLTVDIEKISNERESFKEVIAKLRSYAGGSGGGGGGGERQSVKVLVESLAKTTARVAQDMGKQIKFVASEIESEALDNSPRRVVKDILMQLIRNSAVHGIERPDERKKKGKNETGIVKLSIKTSEDRKSVHVKLIDDGNGLDYKKIAQKALQKKIIKKEDVGK

SEQ ID NO: 52265 - DNA, 819 bp, Unknown
  Obtained from environmental sample
  misc_feature (1)..(819): n is a, c, g, or t
ttgagggggctgtggacacggatgtcatcgatgcggcctcctggtaaaacatatatacaaaaagtctcgcttttgggcggcctttgctttttcctttctacgttggaatacatgattcccaagccactgccttttattcgcctggggcttgccaattttccgctgcttctggctttggatattttgcctttttcctactttgttcttttggcgggactcaaagtcgcaggccaggctctaatctccggaaccttgctttcatacgtgtttcttttttctctgtgcggcacggcagtttcctctcttttaatgtacgccctgcgcaaaggtcttgggaaaaaaaggattagccttgtcggcgtcagcgccgccggagcaatggcctttaacgcggttactttagtcatggcgtattattttgttttcggaaaaagtatcatctatgcggctgcgccaattctggctctgggcataattacaggaacccttttaggttttctctgcgagtattacatcgcgcgctcaaaatggtattggtatagcaatctcgatatgcagacccctaatgagaatctggctttttctgctttgaaacccagcgccaaaaatgccagggagcaattctgcatcgaaaactttagctcattggatcttgcggtggcagggctttgcatgattcccgccttgcttttcaatcccgatacctacatgcgtatagtccagtttttatttttctcttttttcgtctggttttcgggtaaaaagataaatcctttaattacatttttagtcatgcttgctgtgtctcggccgatctga

SEQ ID NO: 52266 - protein, 272 aa, Unknown
  Obtained from environmental sample
  DOMAIN (25)...(171): Heptaprenyl diphosphate synthase component I
  misc_feature (1)..(272): Xaa is any amino acid
MRGLWTRMSSMRPPGKTYIQKVSLLGGLCFFLSTLEYMIPKPLPFIRLGLANFPLLLALDILPFSYFVLLAGLKVAGQALISGTLLSYVFLFSLCGTAVSSLLMYALRKGLGKKRISLVGVSAAGAMAFNAVTLVMAYYFVFGKSIIYAAAPILALGIITGTLLGFLCEYYIARSKWYWYSNLDMQTPNENLAFSALKPSAKNAREQFCIENFSSLDLAVAGLCMIPALLFNPDTYMRIVQFLFFSFFVWFSGKKINPLITFLVMLAVSRPI

SEQ ID NO: 52267 - DNA, 405 bp, Unknown
  Obtained from environmental sample
  misc_feature (1)..(405): n is a, c, g, or t
ttgagaagaattgcgattgtcagtaccattggtttaatgttgttaaaacctcttgatataccggtaattatactgataacggcattaactatattcataggaatgaaagcttataacagaggagcaaattccttaaacgtggtagtaaagggcccggataaaacctggatcttcccgcttgaagcagatgagcgcgttacggttacaggctctattggggaaaccttggtagagattcgcgatggccgggcggcaattgtctcttctccctgcaacggacagacctgcgtagccgccggagagttgcataaaaacgggcagtgggcggcctgccttccgaacagagtttttattctcattgagggggctgtggacacggatgtcatcgatgcggcctcctggtaa

SEQ ID NO: 52268 - protein, 134 aa, Unknown
  Obtained from environmental sample
  DOMAIN (22)...(127): Protein of unknown function (DUF1312)
  misc_feature (1)..(134): Xaa is any amino acid
MRRIAIVSTIGLMLLKPLDIPVIILITALTIFIGMKAYNRGANSLNVVVKGPDKTWIFPLEADERVTVTGSIGETLVEIRDGRAAIVSSPCNGQTCVAAGELHKNGQWAACLPNRVFILIEGAVDTDVIDAASW

SEQ ID NO: 52269 - DNA, 387 bp, Unknown
  Obtained from environmental sample
  misc_feature (1)..(387): n is a, c, g, or t
atgcgaataggccttgaaggctttaacaccctgggtttcaaagccagggaaatccggcttacaggcggtggctcaaaaagcccaatttggcaaagcatagcggcgagcgtgacaggcctccccgtaaaagtcccggcaagcagcgaagccgccgctatgggcggcgcgattcaggccctttggtgcctgcaaaaaaattcggatgacaagttatccgaaaaagcgaaagacgcgaaaagcaatacaattgaggctttagcggacgagcatgttgttctggaaggcggaaaagtcgtaaagccggaaaagaaagacatagcggcctataataaggcttatgaagcttattcacggtatctaggggtattaagcccattatacaaatga

SEQ ID NO: 52270 - protein, 128 aa, Unknown
  Obtained from environmental sample
  misc_feature (1)..(128): Xaa is any amino acid
MRIGLEGFNTLGFKAREIRLTGGGSKSPIWQSIAASVTGLPVKVPASSEAAAMGGAIQALWCLQKNSDDKLSEKAKDAKSNTIEALADEHVVLEGGKVVKPEKKDIAAYNKAYEAYSRYLGVLSPLYK

SEQ ID NO: 52271 - DNA, 393 bp, Unknown
  Obtained from environmental sample
  misc_feature (1)..(393): n is a, c, g, or t
ttgaaaatggctttgaaaaaccggcctgctagccggtttttcttaaaatctaaggaagcttttccaaaactgatgtttcggaaaagccccaataaggaggccaagatggctgaatatttcaccgggaaaaaagagtacttcccaaagatcaaaaaaataaagtttgaggggccgaaaagcgataatcccctggcattcaagtactacgatcctgagaaaaagatcggcaagaaaaaaatgagggatcacctgcgtttcgcgatcgcgtactggcacagcttctgcgcggacggaaccgatcccttcggcgcggcgacgcacgcgcatccatggggtttccgacgcgaagaaccccatggaagcggcggaacacaaaatggacgcggcctttga

SEQ ID NO: 52272 - protein, 130 aa, Unknown
  Obtained from environmental sample
  misc_feature (1)..(130): Xaa is any amino acid
MKMALKNRPASRFFLKSKEAFPKLMFRKSPNKEAKMAEYFTGKKEYFPKIKKIKFEGPKSDNPLAFKYYDPEKKIGKKKMRDHLRFAIAYWHSFCADGTDPFGAATHAHPWGFRREEPHGSGGTQNGRGL

SEQ ID NO: 52273 - DNA, 1101 bp, Unknown
  Obtained from environmental sample
  misc_feature (1)..(1101): n is a, c, g, or t
atggaagcggcggaacacaaaatggacgcggcctttgagtttttcacaaaacttggcgccgacttatattgcttccatgaccgcgacatggctcctgaaggcgcaaacccggcggagagcgaaaagaacctgtttgctttagtggcaagggcaaaaaagcttcaaaaagccaccggcgtaaagcttttatggggaacggcgaacctcttcagccatccccgcttcatgaacggcgcggccacaaaccccgaattcggggtagtcgcccttgcggcggcccaggtaaaggcagcgattgacgccaccatcgagcttggaggccagggctacactttctggggcggcagggaaggctacatgagccttataaacaccgacctcaaaaaagagaaagaccacctggccaaattcctcgcaatggcaagagactacgggcgcaaacagggctttaaaggctcattctacattgaaccaaagcccatggagcctaccaagcaccagtacgacttcgacaccgaaacggtaatcggctttctaagacactacggcctggacaaggacttccgcctgaacatcgaggccaaccacgccgagctggcggggcacgactttgtccacgagcttgagacagcggcggcggctggccttttcggctcggtagacgcaaatcgcggcgaaccccgcaacggctgggacacggatcagttccctatggattacgccgaaaccgcaaaagccatgttcactattctgaaagccgggggctttaccaccggtggccttaactttgacgccaagatccgccgcaattcggtagatcccgaagacctctttatagcccacatcggcggcatggacgccttcgcagtcggcctgattgtagcacagaagatcatcgatgacggtaaaataccggcgttcatcaagaaacgctacgcatcgttcaactcaggtgacggcgcaaaattcgacaagggccagatgacctttgaagagctcgccgctcttggcgcaaaagcgggctacggaaaaaccggcattaccagcggcaagcaggaatacctggaaagcgttctgaatcagtatttgctgggactttag

SEQ ID NO: 52274 - protein, 366 aa, Unknown
  Obtained from environmental sample
  DOMAIN (12)...(227): Xylose isomerase-like TIM barrel
  misc_feature (1)..(366): Xaa is any amino acid
MEAAEHKMDAAFEFFTKLGADLYCFHDRDMAPEGANPAESEKNLFALVARAKKLQKATGVKLLWGTANLFSHPRFMNGAATNPEFGVVALAAAQVKAAIDATIELGGQGYTFWGGREGYMSLINTDLKKEKDHLAKFLAMARDYGRKQGFKGSFYIEPKPMEPTKHQYDFDTETVIGFLRHYGLDKDFRLNIEANHAELAGHDFVHELETAAAAGLFGSVDANRGEPRNGWDTDQFPMDYAETAKAMFTILKAGGFTTGGLNFDAKIRRNSVDPEDLFIAHIGGMDAFAVGLIVAQKIIDDGKIPAFIKKRYASFNSGDGAKFDKGQMTFEELAALGAKAGYGKTGITSGKQEYLESVLNQYLLGL

SEQ ID NO: 52275 - DNA, 1050 bp, Unknown
  Obtained from environmental sample
  misc_feature (1)..(1050): n is a, c, g, or t
ttgtttgtcgttggccggttggtatatgcaataaaaaaattatgctataagcttgaaaatatgaaactgcataaccgaaagcctgatatagcaaacctgtacaaggtactccgcagggaagaaccgtccaggcccaccctgtttgaactttttatgaatctgccgttatacgaaagattggcaggacgtaaattaatcagcatcgaaggcgtggaagatcatgagaaagcggccctggaaaatctgaaacttgtggtggaggcgtataccgcggcgggttatgattacgccactacccatgcctgtggctttagctttgagtccggacggcatcaggaaaaaagcaccgtttctctgaaccagggctttgtcattaccgatgaagcttcttttgaaaactatcaatggcccaacccggaaaattttgatttctcccgcctggaaaacatccgcccgtttctgcccgacggcttgaaactcatgatcatggggcccggcggagttctggaaaacgtcataactcttgtaggctacgataacttgtgccttatgctttacgataatcccggtttgctcgaggccgtatttaatcgtgttggaatggccctgtttaagtattacgagctggccctggaacacgataccgtaggcctcttaatgtccaatgatgactggggttttaagcaccagacttttttgtctccgacggatatgcggaagtacgtttttccctggcataaaaaatatgtcgaccttgcccacagtaaaaagattccagccctcctccattcctgcggatacgccggggaaataatggatgatattattaataacatgggctatgacggcaaacattcttttgaagataccattgtaacagtggaagattcatatgaactctaccagggaaagatcgccattctgggaggcatagacctcaacttcattattaccagttctgaagaaaaaattaccagccgctgccgcgccatgctaaaacgcgccgaaggccgcggaggctatgcccgggcacggcctcggccgatctga

SEQ ID NO: 52276 - protein, 349 aa, Unknown
  Obtained from environmental sample
  misc_feature (1)..(349): Xaa is any amino acid
MFVVGRLVYAIKKLCYKLENMKLHNRKPDIANLYKVLRREEPSRPTLFELFMNLPLYERLAGRKLISIEGVEDHEKAALENLKLVVEAYTAAGYDYATTHACGFSFESGRHQEKSTVSLNQGFVITDEASFENYQWPNPENFDFSRLENIRPFLPDGLKLMIMGPGGVLENVITLVGYDNLCLMLYDNPGLLEAVFNRVGMALFKYYELALEHDTVGLLMSNDDWGFKHQTFLSPTDMRKYVFPWHKKYVDLAHSKKIPALLHSCGYAGEIMDDIINNMGYDGKHSFEDTIVTVEDSYELYQGKIAILGGIDLNFIITSSEEKITSRCRAMLKRAEGRGGYARARPRPI

SEQ ID NO: 52277 - DNA, 2025 bp, Unknown
  Obtained from environmental sample
  misc_feature (1)..(2025): n is a, c, g, or t
atggaacaaaaaatgaaaataaaaaaaatcctctacggcggggattacaatcctgaacaatggcccaaagaaatccggcgggaagacatgcggctccttggcatggcggggatcgatatactgacgataaatgttttcagctgggctttattgcagccttcggaagatagatatgatttttccacgcttgattcaataattgaaacggtaagcgccgcgggtatgaagatatgcctggctacaggaacggcgacccatcccgcgtggatggcccgtaaataccccgaggttctgcgcgtgaataccgacggatccagacgcaaattcggcgacaggcagaattcctgccccaacagcccgatatatcgccgctactcggcgctgctggcccgcaaactggcggaacgttacggcaaactcgacaaccttgttgcctggcatatatccaatgaattcagcggctattgttactgcgaaaattgtgagaaagcttttcgcaaatggcttgaacggaaatacaagacaatagaggcgttaaacgaagcgtggaacacggctttttggggacacacttactacgaatgggacgatattgtaataccaagccatttgggaggggagtggccttataaccgcagttcctgccagatacagtccattgactacaggcgcttcaattccgacagcctgctggagtgctgccttgccgaggccggggctttaagggagataaaccccaatatcccaattacaactaacatgatggggactttctgggatctggattattttaagtggggtaaaaaaatggactttatctcatgggacaattatccttctcccggcactccctatacccgtaccgccatgaaccacgctctcatgcgcggctgcggcggcggaaaaccgttttacttaatggaacaaactcccagcgtcacaaactggcagccttataattctttgaaacgtccgggcatcatgcgattgtggagctatcaggcgctggcacacggttccgatacggtgatgttttttcagatgcgccgatcgcgaggctgctgcgaaaaatttcacggggcaataatagatcattacgccaatgaaaacacgagggtattcaaggaaaccgccgagcttggagcggaacttaaaaaacttggggactcatttttgggcagccgtctttcaagtgaagcggcagtcctttatgactgggacaactggtgggcgtcgtctttctccgcgggtcccactcgcgatatgtattacccggaagaggttttccgtttttatgacgcgctggcaaagcagaatatttccgcagatataatcggccttgaaacttctttggacagttacaaaattctgttcgctcccattctttatatgataaaacccgctattgccgagaaattgacggcgtttgtcaataacggaggcatattggttacaacatatttttcgggaatggccgacgaaaatgacttggtaacgacaaaaggctatcccggagaactgtgctccctctgcggcctttgggtggaagaaacggacgccctgccgccggatcaatccaacagattgattattaaagacggcccatttgccggaacatggaaagccgatttgttatgtgacattatccatcctgagggcgctcaaactatcgccaattatgcggatgatttttacgcgggaacccccgccgtctgccgcaacagttacggcaaaggctgtgtttggtatttcggctcgcgccccgaagcggctcttgtagacctctttaccgccgaaatctgcggcgaatgcgggattaagccggtcttcccgaggcaggaaggaattgaagctacacgcagaataaaggaagggaaagaatttatctttgtattaaaccacaataaatccgaggcggaaattgtaattccgtttgcgtgcaaagatttactgatagataaatctttttccgcagacagccggtatacactttctgccgccggggtactgatactgtgtaaataa

SEQ ID NO: 52278 - protein, 674 aa, Unknown
  Obtained from environmental sample
  DOMAIN (615)...(674): Beta-galactosidase C-terminal domain
  misc_feature (1)..(674): Xaa is any amino acid
MEQKMKIKKILYGGDYNPEQWPKEIRREDMRLLGMAGIDILTINVFSWALLQPSEDRYDFSTLDSIIETVSAAGMKICLATGTATHPAWMARKYPEVLRVNTDGSRRKFGDRQNSCPNSPIYRRYSALLARKLAERYGKLDNLVAWHISNEFSGYCYCENCEKAFRKWLERKYKTIEALNEAWNTAFWGHTYYEWDDIVIPSHLGGEWPYNRSSCQIQSIDYRRFNSDSLLECCLAEAGALREINPNIPITTNMMGTFWDLDYFKWGKKMDFISWDNYPSPGTPYTRTAMNHALMRGCGGGKPFYLMEQTPSVTNWQPYNSLKRPGIMRLWSYQALAHGSDTVMFFQMRRSRGCCEKFHGAIIDHYANENTRVFKETAELGAELKKLGDSFLGSRLSSEAAVLYDWDNWWASSFSAGPTRDMYYPEEVFRFYDALAKQNISADIIGLETSLDSYKILFAPILYMIKPAIAEKLTAFVNNGGILVTTYFSGMADENDLVTTKGYPGELCSLCGLWVEETDALPPDQSNRLIIKDGPFAGTWKADLLCDIIHPEGAQTIANYADDFYAGTPAVCRNSYGKGCVWYFGSRPEAALVDLFTAEICGECGIKPVFPRQEGIEATRRIKEGKEFIFVLNHNKSEAEIVIPFACKDLLIDKSFSADSRYTLSAAGVLILCK

SEQ ID NO: 52279 - DNA, 345 bp, Unknown
  Obtained from environmental sample
  misc_feature (1)..(345): n is a, c, g, or t
ttgccaaatctttttaacaacggccctccctttcagatagacggcaactttggagcattggcgggaattacgcagatgctggttcaaagccgtatccgttatgaaggtgaaagttttacagttttgttagatatacttcccgctttgcctgaatgttggtcaaaaggccggattaagggagttcgcttaaagggaaatctggaacttgattttgaatggcaggacagaaggcttaaatatcttgttattcgcaacaacggaaagtcagcggttactgttttacttcgcaacgatggtggacagcgagaattactgcttgaaacagaagagaataaaatatattaa

SEQ ID NO: 52280 - protein, 114 aa, Unknown
  Obtained from environmental sample
  misc_feature (1)..(114): Xaa is any amino acid
MPNLFNNGPPFQIDGNFGALAGITQMLVQSRIRYEGESFTVLLDILPALPECWSKGRIKGVRLKGNLELDFEWQDRRLKYLVIRNNGKSAVTVLLRNDGGQRELLLETEENKIY

SEQ ID NO: 52281 - DNA, 669 bp, Unknown
  Obtained from environmental sample
  misc_feature (1)..(669): n is a, c, g, or t
atgataatccggaaaaaagttttgggagaaaaacatcccgattacgctgtttccctaaacatcatgggcgggttatattactttttaaatgattatgaaaacgccgaacattgtttattggagttaaaaagcatatatgaaaataatcaggaaaataaccgtcacacttataccgtcgctttaaacaacctgggattgttatatatcaaaatgggcgaatataaaaaagccgaacgttgtttattggaagtaaaaaatatcaaggaaataaattacgggaaaaaacattccgaatataaaacttcaataaataatctgggaatgttatataataaaatgggcgattacaaaaaatctgaattctattatcttgaggtaaaatccattgatgagaatatgtacggtaaagatcatccgaattacgccgtcgcgctaatcaatctgggaatgctgtattacagcatgggtaaattttcaaaaactgaaaactgttatttggaggcgaaagccgtcaaggaaagaacgttaggcaaagaacaatataattatgtcatgatgttaaacaaactcggacagttgtaccataacatttgcatcaacgatagacgcattttattttggaggcggaaacaatataaaaataaagcgcaaagtaattcacattcctaa

SEQ ID NO: 52282 - protein, 222 aa, Unknown
  Obtained from environmental sample
  DOMAIN (58)...(91): Tetratricopeptide repeat
  misc_feature (1)..(222): Xaa is any amino acid
MIIRKKVLGEKHPDYAVSLNIMGGLYYFLNDYENAEHCLLELKSIYENNQENNRHTYTVALNNLGLLYIKMGEYKKAERCLLEVKNIKEINYGKKHSEYKTSINNLGMLYNKMGDYKKSEFYYLEVKSIDENMYGKDHPNYAVALINLGMLYYSMGKFSKTENCYLEAKAVKERTLGKEQYNYVMMLNKLGQLYHNICINDRRILFWRRKQYKNKAQSNSHS

SEQ ID NO: 52283 - DNA, 855 bp, Unknown
  Obtained from environmental sample
  misc_feature (1)..(855): n is a, c, g, or t
gtgaaaagacttgaaagaagcgtagaatcacttcttgaaaactatgacgcttacgggatggttaaccattccggagcggtaaatcttccgggaagggaaagtatcgacaatattttactggattttgaaaaattgctttttcccggctttctggaaaatgtttgtacggacatggatgccctgcggaaactcactacgggaaaagtaaaaaaattatctatagcgttaaaatgcgaagtagagaagagtatcgctttttccgtgaggcacggagtgttaaattgcaaacatgaaggttgcagggccttagccgatcttgtagttgaggaattttttgaagaactgcctagaatcagagtcattttggagaaagatttggatgcctccgtgcgcggggacccggcggctaaaagctccaatgaagtgattctttcctatcccggctttcaagcgatcgcgattcacagaatagcgcattttttctggacgcggcaggttccgataatcccgcggatgatgagtgagattgttcacggaaggacaggtatcgatattcatcctggcgcggacataggagagtcattttttatagatcacgggacgggcgttgtaataggggaaactacggttatagggaaaaatgttaaactttatcagggagttacgctcggcgctctttccgtaaaaaaagaggaaagcggccaaaaacgccaccctactatagaagacgacgtgactatttacgctaatgctacaattctcggcggagagaccgttatcggccgcggtagcgtcataggcggcagtgtatggataacgcagtctgtcccgccgggaagtaaagtctataaatag

SEQ ID NO: 52284 - protein, 284 aa, Unknown
  Obtained from environmental sample
  misc_feature (1)..(284): Xaa is any amino acid
MKRLERSVESLLENYDAYGMVNHSGAVNLPGRESIDNILLDFEKLLFPGFLENVCTDMDALRKLTTGKVKKLSIALKCEVEKSIAFSVRHGVLNCKHEGCRALADLVVEEFFEELPRIRVILEKDLDASVRGDPAAKSSNEVILSYPGFQAIAIHRIAHFFWTRQVPIIPRMMSEIVHGRTGIDIHPGADIGESFFIDHGTGVVIGETTVIGKNVKLYQGVTLGALSVKKEESGQKRHPTIEDDVTIYANATILGGETVIGRGSVIGGSVWITQSVPPGSKVYK

SEQ ID NO: 52285 - DNA, 876 bp, Unknown
  Obtained from environmental sample
  misc_feature (1)..(876): n is a, c, g, or t
ttgaaatacaatttttccctactttatttaaggatgaaatcgtacataatgaataagattacagaaattactaaacgagatatatttgaactatttaaaagcggatatacaaaaagcgattattttttagatgaaaactgtcaaattaagtataattattatggtcgattaaaagaaatagactttttaaataaactttatcctttagatgaaatgaccagtagtgattcccgttttgaaaatgcaagacaagatattattcaacattccattaataatagtgattgggaatttggttgggtgttttacgatgatcgttttgagttattgaatggtagtgatactaaaatactggatttcctgtgtgcagttttccaccctgaaaacagagatgaaaagggatattggaaactatttcttgaacggattaatagtttaaccaaacaagatggatatgaactatacgaagaaagcaaaatatcaggaagatcggtttattcttatagacaattaacaccaatagaaatagcgagtaataagtttattccgttttctatcagatataaaaatgttatagataatgatttgaaaataccaatgaaaatgaggaaagaaatctataatcttttcacgcgacacaatgaaacccaacatagaacggatgaaacaaactggcattatgaaataagttctataaatgcccttatcgaagatataaaggagtattaccctccaaaggcatttattgctcctagaacctatggtgaaacaaacgatttagaaatttttgtaatgaataattatccttgttttgttttcgatacaatagaattattcgctaaatataattatgatacatttccccgagaaagttaa

SEQ ID NO: 52286 - protein, 291 aa, Unknown
  Obtained from environmental sample
  misc_feature (1)..(291): Xaa is any amino acid
MKYNFSLLYLRMKSYIMNKITEITKRDIFELFKSGYTKSDYFLDENCQIKYNYYGRLKEIDFLNKLYPLDEMTSSDSRFENARQDIIQHSINNSDWEFGWVFYDDRFELLNGSDTKILDFLCAVFHPENRDEKGYWKLFLERINSLTKQDGYELYEESKISGRSVYSYRQLTPIEIASNKFIPFSIRYKNVIDNDLKIPMKMRKEIYNLFTRHNETQHRTDETNWHYEISSINALIEDIKEYYPPKAFIAPRTYGETNDLEIFVMNNYPCFVFDTIELFAKYNYDTFPRES

SEQ ID NO: 52287 - DNA, 1878 bp, Unknown
  Obtained from environmental sample
  misc_feature (1)..(1878): n is a, c, g, or t
atgagtgacgggaaccacagcgagcctgtcagtataaagccgccggacaaagacaaggttgggactcgtaatacaaccctgcagcatgatttgcggtggtatttggagaaatatctggaactgccgatagatacctggcggacgctagccgaaggtattcagaatacgttggcgcaatggggaaaggacgcgttcaaccaattatttggaagcggtcccgcgagggactggtatcaggacgcacggcgggccggactcgcggacctgcacatcaagatcgccagcgacaatccggcgatcctggcatggccatgggaagccctggaaaacccggctgacggctgccttgccctgcattgccatatagaacggcagttatgcgacgatcttggggatgtctataaattgccggatgttttgccaaaagacaaacttaatatcttgtatatagtcgcccgtccccatggagaaaacgatgtgggcttccaaatgctgataaggccgcttgttgatttcgcttatgccgagggaaaaagctggccggtacatatagatttactgcgcccgccgacgcttgaccggctgctggaagttcttgccgagaagcccaatttctatcatattgtgcatttcgacgggcacggagggtatgatgccggagggcaaaagaacgccatgggcgccggggctttagtctttgaaaacggcaataatgagaatgaaagggaattggtacctgcgaagatgctggggcagctgttacgcaaacacaatatccccgtcatggtgctgaacgcctgccggtcggccatgcttgatgatcatgcggagaccccgtttgcctcagtggcggccagtttattgaaagccggaattcacagcgtcatagcgatgagctacagcctgtgggtcagcggggcaaaggaatttgtccccgctttttaccggcaactgttcaaaggcggcggcattgcagaggccgtgcggctggggcgtctgcaaatgtaccgtaatcacgtgcgtgacagttcctgcgggaaagtagctttttatgactggattgtgcccgtgctgtaccggcagtctccctccggggaaaccgaactgccccgcttgatgcccgcccatgaagaaaaagcgagcaagctgcctgatgaagtattgaacataggcgagtatggcattatcgggcgtgaccgcgcgatgctggggcttgaacgtgcgatagagcggcagccccaggccggcatccttattcacggcatgtccggcgaaggcaagacaacgttggcaaaaggttttttacaatggcttgaagacacaaacgggttaggcgacagggtgttttggtttagttttgaggatatacacggcgccgactacgttatagatacgctggcgggcgaattgttgggcatgcagaccttggccctgccccctgaggaaaggttgtccgccgttgtaagaaaattgagaggcggacggtatttcctgttgtgggataactttgaatcggcatccggcataccgggtacggaggtgtccgcgctgatgcccgaagaagaccggcggcggttgaaacaactgctcgctgaactgcgcggcgggaagacgaaaatcctcattacgagccggtcggcggaagaatggctcagcgtgcaggaatgtttccgcttcccactgggaggactacagggtgaggaactttggcagtactgcgaggcggttgttaccgacctggggcttacgcttaacagggacgaatgtttcaacgcgcctgctggacaggctggaggggaacccattggcggtgcgcgctttactgctgctgctgatggatctctcttgtgcgtagttattccgagaactggacgataa

SEQ ID NO: 52288 - protein, 625 aa, Unknown
  Obtained from environmental sample
  DOMAIN (415)...(580): NACHT domain
  misc_feature (1)..(625): Xaa is any amino acid
MSDGNHSEPVSIKPPDKDKVGTRNTTLQHDLRWYLEKYLELPIDTWRTLAEGIQNTLAQWGKDAFNQLFGSGPARDWYQDARRAGLADLHIKIASDNPAILAWPWEALENPADGCLALHCHIERQLCDDLGDVYKLPDVLPKDKLNILYIVARPHGENDVGFQMLIRPLVDFAYAEGKSWPVHIDLLRPPTLDRLLEVLAEKPNFYHIVHFDGHGGYDAGGQKNAMGAGALVFENGNNENERELVPAKMLGQLLRKHNIPVMVLNACRSAMLDDHAETPFASVAASLLKAGIHSVIAMSYSLWVSGAKEFVPAFYRQLFKGGGIAEAVRLGRLQMYRNHVRDSSCGKVAFYDWIVPVLYRQSPSGETELPRLMPAHEEKASKLPDEVLNIGEYGIIGRDRAMLGLERAIERQPQAGILIHGMSGEGKTTLAKGFLQWLEDTNGLGDRVFWFSFEDIHGADYVIDTLAGELLGMQTLALPPEERLSAVVRKLRGGRYFLLWDNFESASGIPGTEVSALMPEEDRRRLKQLLAELRGGKTKILITSRSAEEWLSVQECFRFPLGGLQGEELWQYCEAVVTDLGLTLNRDECFNAPAGQAGGEPIGGARFTAAADGSLLCVVIPRTGR

SEQ ID NO: 52289 - DNA, 1860 bp, Unknown
  Obtained from environmental sample
  misc_feature (1)..(1860): n is a, c, g, or t
ttgaggtggctggtttgccccgcaactgattgggatccttataaaacaaatcccaactgggaccaaataaaaagaccctggttcatatctgcaatgcaaaaccctggcaaaatcaccataactgagccttatgaagattcaaatactggcaaaatttgcataacagttgtgaaaaccgtagccgatgccactgggaaaatcaaaggcgtggttggcatagatgtatttttagataaattgacggaaatgataaacgaacgtaaaataacagaagacggaaaaagttttttgatagatgcaaacggcttgtacataactcaccaagacctagcgaatgttatgaaaaacaatattctggaagattttaaactggataaatctttgttggaaaaacaaggcattgaattcagagacaatatgtatgttgcggtcatagccgttccaaatactccgaactggtaccttatgagcataggttctttgaagagcttagacaaaatggatttgaagtctattttaattgtaatcgcaatttcaattatagtggcaatagtagtttctcttatattcgggaatagaataagcacagaaataaaaattatcgtaaaaggaataaaacaagtgagcagcggtgatttaaccgaacggcttaaaatcaattctcgcgatgaaattggcgaaatgtctggtagattcaacgactttttgaatttgctacaaagattcatgaaaaagataggcgatgatacgaacaattttttgaaatcatcacagcatttaacagaaacaagccattctttggctctaggcagcgaacaaactgtgtctgagagcaattcggttgcaagtacatcggaacaaatggcagtgactatcanagctatgggcaacactgcagaagaagcctcaattagtgctatagaggtagcaaacgaagtggagcagttgtcctcaaacataaacgctatggcaaatactgccgaaaaagcctctgtgaatgctaatgaggttgcaagcacggcagaacagatgtctgctaatatgaacactatagcctctgccgttgaagaaatgagcatgagcatagatcaaatatccagcaataccagtgatgttggcaaggttgccaaagaagccacggtcaaatctcataatgcaaccaacgcaatgaataagttaggcattgccgcaaaagaaattgggaaagtgaccgatgtaatcaaaaaaatagcagacaaaacgaatttgctcgctttaaacgcaactatagaggcagcgagtgcgggtgcagctggaaagggctttgcggttgtggcgggcgaaatcaaagagcttgcccatcagagtgccgccagcgcagacgacatagctcgccgcatagagagcattcaggtaggtacccacgaggctgtgactgtgatagacgatgtttcggatattataacaacaatcaaccaaagcgtagaatccatatcctccaatgttggcgaacaaacaaaggcaagcatagaaatagctaataatgttgcccaggcgtatgccggagccaagcgcgttgcttctgctataggcgaggtggcaaaaggcaacaaagacatagctctgggcgcaggcgaagcgaataagagcgtggagcgagtgtctaaatccataaacaaggttgcaaagggcagcaaagacatagcgagcaacgcagacgaggctgctaagggagcgagcgtggttagtacaggtgtgaatcgcataacacaagatgccaaaaacggagccaagggagcggagcaaactaaccagcaagcagacgtacttgctatgatagcaaatgatttgaaaggtgttttaaatcagtttaaggtgtag

SEQ ID NO: 52290 - protein, 619 aa, Unknown
  Obtained from environmental sample
  DOMAIN (172)...(241): HAMP domain
  misc_feature (1)..(619): Xaa is any amino acid
MRWLVCPATDWDPYKTNPNWDQIKRPWFISAMQNPGKITITEPYEDSNTGKICITVVKTVADATGKIKGVVGIDVFLDKLTEMINERKITEDGKSFLIDANGLYITHQDLANVMKNNILEDFKLDKSLLEKQGIEFRDNMYVAVIAVPNTPNWYLMSIGSLKSLDKMDLKSILIVIAISIIVAIVVSLIFGNRISTEIKIIVKGIKQVSSGDLTERLKINSRDEIGEMSGRFNDFLNLLQRFMKKIGDDTNNFLKSSQHLTETSHSLALGSEQTVSESNSVASTSEQMAVTIXAMGNTAEEASISAIEVANEVEQLSSNINAMANTAEKASVNANEVASTAEQMSANMNTIASAVEEMSMSIDQISSNTSDVGKVAKEATVKSHNATNAMNKLGIAAKEIGKVTDVIKKIADKTNLLALNATIEAASAGAAGKGFAVVAGEIKELAHQSAASADDIARRIESIQVGTHEAVTVIDDVSDIITTINQSVESISSNVGEQTKASIEIANNVAQAYAGAKRVASAIGEVAKGNKDIALGAGEANKSVERVSKSINKVAKGSKDIASNADEAAKGASVVSTGVNRITQDAKNGAKGAEQTNQQADVLAMIANDLKGVLNQFKV

SEQ ID NO: 52291 - DNA, 741 bp, Unknown
  Obtained from environmental sample
  misc_feature (1)..(741): n is a, c, g, or t
atggtcagaatcggccgagaaggcggagaagacccccactacacagacgaaattctagttgatattatccgtgaaataaaagcgacatttccagactgtgcggttacgctttcaattggagaacgcagttatgagagctatgagcggttgttcaaagctggcacagacagatatttgctacgccacgaaacagcaaacgatgagcattacaaaaccttgcacccaaattcaatgtcgggagcaaatagaaaaaaatgtctatacgatttaaaaaaaataggttatcaagtggggtgtggttttatggttggtacgccaaaccaaacgttggagcatattgtagatgacttgttattcatcaaagaactccaacctcaaatggtaggcatcggtccctttatcccccactccaacacgcctttcaaaggcaaaaacgctggtgatgtacatttaacgctgaacattttggcaattcttcgccttatgcaaccaaatttgcttatccccgctacaacagcactcggaacgcttgattctcacggaagagaacaagggattctcgccggagcgaatgtgattatgccaaacctctcccctgttgaggtgcgcaaaaaatatatgctctacgacaataaaatttgtaccggagaagaagcggctgaatgtgtgaattgcatgcgaaaccgcattaagcgaattggctatgagattgcggtttctaggggggattgggtgggatga

SEQ ID NO: 52292 - protein, 246 aa, Unknown
  Obtained from environmental sample
  misc_feature (1)..(246): Xaa is any amino acid
MVRIGREGGEDPHYTDEILVDIIREIKATFPDCAVTLSIGERSYESYERLFKAGTDRYLLRHETANDEHYKTLHPNSMSGANRKKCLYDLKKIGYQVGCGFMVGTPNQTLEHIVDDLLFIKELQPQMVGIGPFIPHSNTPFKGKNAGDVHLTLNILAILRLMQPNLLIPATTALGTLDSHGREQGILAGANVIMPNLSPVEVRKKYMLYDNKICTGEEAAECVNCMRNRIKRIGYEIAVSRGDWVG

SEQ ID NO: 52293 - DNA, 384 bp, Unknown
  Obtained from environmental sample
  misc_feature (1)..(384): n is a, c, g, or t
atggcggattcttttctggcttcggcattgggaaaacgctgggcttccgcccacagccggaattcttcgcagtcggagtttcccgtcataactaccgccgaagtagtagggaaggcgattgccatctccgggataatggatcttctttttgaagaagatgatgaagtggtcataatcgattttaaaactgacaggattgaaaaccccgaagaccactacggccagcttgcggtatattaccgcgcggcgggcgatatctttggcaagcccgtgtcgctctggctttactacctgcgctcatgcagcgcggtgaacgtaaccgaagaagtcaagggacttagccttgaggaattggcggcgcagacaatggcaaatagcaaataa

SEQ ID NO: 52294 - protein, 127 aa, Unknown
  Obtained from environmental sample
  misc_feature (1)..(127): Xaa is any amino acid
MADSFLASALGKRWASAHSRNSSQSEFPVITTAEVVGKAIAISGIMDLLFEEDDEVVIIDFKTDRIENPEDHYGQLAVYYRAAGDIFGKPVSLWLYYLRSCSAVNVTEEVKGLSLEELAAQTMANSK

SEQ ID NO: 52295 - DNA, 723 bp, Unknown
  Obtained from environmental sample
  misc_feature (1)..(723): n is a, c, g, or t
atgggtggggtgttggcgttgtccagggcggcgggactacatacggagataaaagggcagcttgaagcggctggctttgaagacgttacagttacggacaaggataatgacgaattgaatacaattatctgtaataagaatccccgtctggtcattattgacagttggttttatcaggacggtacatcttgcaggattggcgaactgatagagctatttcctaaattgaacatcgccgttgtttccgtccatgactttcctgtaagccgcgccccgtggttcatctgggagggggcgaagtcataccttagcttgtgggaagggtatgaagaatttcagcggggcttgcggattgtgcgggaagggaaacagtatatttcgccgaaggttcaaaaattgattgaaaactgcggggaatggccggacaccaaaagcaaaataactaaacggcagaaggaatgccttgtcatgctgtgctgcgggcttatccctgaccaaatcggggaaacattgcatatatctagaaaaacggtttacaaccacctgaacagtttatacagcgcctttcacgctggtagccgtgaagagatggttgcgcttgcatgggagatggaactggtaacccccaaagacattcggctttataacaagaaaaaagaacgcttaccgcttcctgaatgggcggcggtgaaacggaaatgcgacaggttctattttgattga

SEQ ID NO: 52296 - protein, 240 aa, Unknown
  Obtained from environmental sample
  DOMAIN (144)...(201): Bacterial regulatory proteins, luxR family
  misc_feature (1)..(240): Xaa is any amino acid
MGGVLALSRAAGLHTEIKGQLEAAGFEDVTVTDKDNDELNTIICNKNPRLVIIDSWFYQDGTSCRIGELIELFPKLNIAVVSVHDFPVSRAPWFIWEGAKSYLSLWEGYEEFQRGLRIVREGKQYISPKVQKLIENCGEWPDTKSKITKRQKECLVMLCCGLIPDQIGETLHISRKTVYNHLNSLYSAFHAGSREEMVALAWEMELVTPKDIRLYNKKKERLPLPEWAAVKRKCDRFYFD

SEQ ID NO: 52297 - DNA, 1608 bp, Unknown
  Obtained from environmental sample
  misc_feature (1)..(1608): n is a, c, g, or t
atgacagtattggccgaggccgcaggttttgcggtaagcgaagaagccgcggctattataaaagactcaaagcctttttatgacgcggacaaagcggcggagataaaagaaattgtttttgctattcacgcattgataaaatcgcgtaatgacgaaccacattcatggctgccgtcaattggcttccttcttccaaaaacagaaacgcccggcgctgttttggctcttgacgaggcgctggcaatcgggctttttatcgaacgcgcagtggaattaacaaactggctgatcaaagaccgcggcgacagggaacaggaaacaagcggcagacagaggcttcttgccatgcttggcgaggaggctttgcccaactgtgcgcctgccgcttcggaaatctttaaaataatcgacagggaaggcaatctgcgcgatcttcctgagttacgcgcaataaaaaaacgcataggctcgcttgaaaaagagttaaaaacagcggtttcgcgttatactgcggaggatgaatataagcggatgctgcaatcgccgcttccgtcgcaaagggacagcaggacggtgctggcggtaaaagccaattatcgcggacgaatcagcgggattgtgcatgaagtgtcttccagcgggcagacagtctttatagagcctcttgatgtagtggaaaaaaacaacgacattctgctggaaaaacgaaatttggacgcggaaattcaaaagctcctgcgtgaattaacggaaaaaatcaacgcgcacgcggaaaatcttaaaacattgcacacaacaattatagagcttgaatgtttaagggcaagggcaaagtattcgctcgcgacaaagggacattttgccaaagacggaaacggcgaatatgaaacgctcattctaaaaaaagcgcgccatccaatgcttaaaaaagcggttccaatcaatatagaaatgaaaactagtacccgtaccctgatcattacaggtcctaacacaggcggaaaaacagtagccctgaaaactctcggccttcttgccatgatgaatcaaagcgcgcttgccctgccccttgaagaaggaagcgctcttcctctctttgacggaatatacgcggacatcggcgacgagcagtctatcgatcagtctctttctactttttccgcgcacattacaaaaatttccgcaatcaccgctcacgcgacggaaagctcgctggttcttcttgacgagcttggctccggaaccgacccggaagaaggcggcgcaattgcaatggcggtactggattatctgatagaaaaaaattcgcggatgatagttaccactcatcacgggatattaaaaaattacggctacacaaggcagagcgtagaaaacgcttccgtcgaatttgacgcgcagacgctttcgcccacttacaaaataatcaacggtcttcccggagaaagcagagcgattgacattgccgccgccaacggtcttgacagcgcaattgtgggaaacgccagaaaatacattgacgaaaaaaaatcggatatttcaggattgatcaaagggctggaacaaaaacagagggagcttatcgggatgaacacaaaagcgcaatag

SEQ ID NO: 52298 - protein, 535 aa, Unknown
  Obtained from environmental sample
  DOMAIN (282)...(512): MutS domain V
  misc_feature (1)..(535): Xaa is any amino acid
MTVLAEAAGFAVSEEAAAIIKDSKPFYDADKAAEIKEIVFAIHALIKSRNDEPHSWLPSIGFLLPKTETPGAVLALDEALAIGLFIERAVELTNWLIKDRGDREQETSGRQRLLAMLGEEALPNCAPAASEIFKIIDREGNLRDLPELRAIKKRIGSLEKELKTAVSRYTAEDEYKRMLQSPLPSQRDSRTVLAVKANYRGRISGIVHEVSSSGQTVFIEPLDVVEKNNDILLEKRNLDAEIQKLLRELTEKINAHAENLKTLHTTIIELECLRARAKYSLATKGHFAKDGNGEYETLILKKARHPMLKKAVPINIEMKTSTRTLIITGPNTGGKTVALKTLGLLAMMNQSALALPLEEGSALPLFDGIYADIGDEQSIDQSLSTFSAHITKISAITAHATESSLVLLDELGSGTDPEEGGAIAMAVLDYLIEKNSRMIVTTHHGILKNYGYTRQSVENASVEFDAQTLSPTYKIINGLPGESRAIDIAAANGLDSAIVGNARKYIDEKKSDISGLIKGLEQKQRELIGMNTKAQ

SEQ ID NO: 52299 - DNA, 729 bp, Unknown
  Obtained from environmental sample
  misc_feature (1)..(729): n is a, c, g, or t
atggaattaaagcgcgaatcgctcgggaagcttcaggtttttctgggcgaaagccgtaaaacccttgaaaaccttgtccgcgaattgaaagagggagaagtaaaccgcgaaaaaactttgaaggttaaaggctttttgaatgaccttgcgcataacgctgagatagaaagcgccgcccttgacgaagaagagcgtcttgtaagagaacaatttttaaaaacgcagaaaggcggcgaagaaaatgacagcgctttaaacagcgaagcaaagagcgaaactttcgcgcccggcacggaagttttcgtaggcgcttcaaaacagaggggcgttattgtccgcgccgacaagaaaagcacgacgggaaattcatggatagtaaagaccggctcattaaaaataagttttccggaaaatgaattggttcccgccgctcctgtaaatatcaaaaaatcctcatcatgggaggttgaatacaactcgggagaagcggtttttgaattaaaactattaggaatgaggcttggagaggcaacggaagccctgcgccgccagatagacgccgctgttctttccggcctaaaaaacttttccgttattcacggcatgggcacgggaattttacaaaagggaattcatgagtatttgaaaaacgatccggcggtagcggattattatttcgcgcgcccggaactgggcgggttcggcaggacggaagtggtactgcgttga

SEQ ID NO: 52300 - protein, 242 aa, Unknown
  Obtained from environmental sample
  DOMAIN (167)...(242): Smr domain
  misc_feature (1)..(242): Xaa is any amino acid
MELKRESLGKLQVFLGESRKTLENLVRELKEGEVNREKTLKVKGFLNDLAHNAEIESAALDEEERLVREQFLKTQKGGEENDSALNSEAKSETFAPGTEVFVGASKQRGVIVRADKKSTTGNSWIVKTGSLKISFPENELVPAAPVNIKKSSSWEVEYNSGEAVFELKLLGMRLGEATEALRRQIDAAVLSGLKNFSVIHGMGTGILQKGIHEYLKNDPAVADYYFARPELGGFGRTEVVLR

SEQ ID NO: 52301 - DNA, 528 bp, Unknown
  Obtained from environmental sample
  misc_feature (1)..(528): n is a, c, g, or t
atgatcagatcggccgagtacacacgactacataccgatcaggcgggaaaagccaaaatgatttatgacatggtaaaagaagtgaatgagcgctataaagcggcatttccatctgaaacgcggctccttatcgaaggcataggaatgcaggagcaccataatgcgggcgtaccggcaagcgcgataaaagacacattgaacctgtttaagccgctgggagtaaaaatatctgtcagcgagcttgatgttctgatagtaacttatcaggagtttgcgccttatggtcaggggcctaacaaacaaaatttaatgccggaagatagaaggatcgagggactaaaaaaacaggcggaactatacggcgaatactttaaagtatatctggaattcagtgatatcattgagcgtgtatcgttttggggcgtcactgatgataaaagctggcgatctgccgccttgccgcttatatttgatgccgccggaaaacctaaagatgcttactacagcgtgattggatcgctaaaataa

SEQ ID NO: 52302 - protein, 175 aa, Unknown
  Obtained from environmental sample
  DOMAIN (4)...(174): Glycosyl hydrolase family 10
  misc_feature (1)..(175): Xaa is any amino acid
MIRSAEYTRLHTDQAGKAKMIYDMVKEVNERYKAAFPSETRLLIEGIGMQEHHNAGVPASAIKDTLNLFKPLGVKISVSELDVLIVTYQEFAPYGQGPNKQNLMPEDRRIEGLKKQAELYGEYFKVYLEFSDIIERVSFWGVTDDKSWRSAALPLIFDAAGKPKDAYYSVIGSLK

SEQ ID NO: 52303 - DNA, 1167 bp, Unknown
  Obtained from environmental sample
  misc_feature (1)..(1167): n is a, c, g, or t
ttgaaatatggaattgtcgtgactatgaaaaaacagggctttaatccatatctgccttcatgggagtatattcccgacggagaaccttatttgtttaacggcagaatatatgtgtacggttctcatgataaattcaacggctatgcttattgcctgaacgattatgtgtgctggtctgcgccggaggacgatttaagcgattggcgttatgagggagttatatatccaaaaaccagcgatcccttcaatgaggacggaagcatgtgcctttacgcgccggatgtaacgctcgggccggatgggcggtactatttgttttatgtgcttgacaaggtaaatgttgtgtccgtagcggtttgcgaaacgcctgccggagaatttaaattccacggctatgtgcattatcccgacggaacaaagcttggcgatcggaagggagaccagccccagtttgatccgggcgttttaacggaaggcgataaaacatatctctttacgggtttttgcgggcgcgacgataaaacaagaataggcgcaacagcggtaacgctgggaaaggatatgctgacagtgcttaatgaacctgttcttatcgctcccggagtgcataacagcaaaggcacaagttttgaaggatatgagttttttgaagctccgtccgtaagaaaacacggcgatacttattattttatatattcatcaattgcgtctaacgaactttgttacgcagtcagtaaaagtcccgtaaaagattatgtttacggcggcgtaatcatcagcaacgcagatgtgtatatagccacatataaacccgccgataaacccatgggctgcggcggcaataatcacggaagcatcatcgaaataaaagggaaatggtatatcttttatcacagacataccaacggaaacgagttcagccgccagggatgccttgagcctattgaaataaaagctgacggttttattccgcaggttgagatgacttcatgcggaccgaacggaaagccgcttgacggcaaaggggaatatccggcatatattgcgtgtaatatattttccgtggcgaataaccggcagttagaaaggcaatggccgcttcacaaacagtctctgccgaaaatttcacaggacgggcgggacggcgatgaagaacaggttttgtga

SEQ ID NO: 52304 - protein, 388 aa, Unknown
  Obtained from environmental sample
  DOMAIN (26)...(323): Glycosyl hydrolases family 43
  misc_feature (1)..(388): Xaa is any amino acid
MKYGIVVTMKKQGFNPYLPSWEYIPDGEPYLFNGRIYVYGSHDKFNGYAYCLNDYVCWSAPEDDLSDWRYEGVIYPKTSDPFNEDGSMCLYAPDVTLGPDGRYYLFYVLDKVNVVSVAVCETPAGEFKFHGYVHYPDGTKLGDRKGDQPQFDPGVLTEGDKTYLFTGFCGRDDKTRIGATAVTLGKDMLTVLNEPVLIAPGVHNSKGTSFEGYEFFEAPSVRKHGDTYYFIYSSIASNELCYAVSKSPVKDYVYGGVIISNADVYIATYKPADKPMGCGGNNHGSIIEIKGKWYIFYHRHTNGNEFSRQGCLEPIEIKADGFIPQVEMTSCGPNGKPLDGKGEYPAYIACNIFSVANNRQLERQWPLHKQSLPKISQDGRDGDEEQVL

SEQ ID NO: 52305 - DNA, 600 bp, Unknown
  Obtained from environmental sample
  misc_feature (1)..(600): n is a, c, g, or t
atggatataaaacaggctattaccgaaaataaaacttcccttggaatagaacttggttccacgcggataaaggcggtattaattgacgatacttactcgcctgtcgcgcaaggcagtcatgattgggaaaacaaactggaagacggggtttggacgtatcacttagacgatgtccggaaaggaatgcaggactgttttaagaacttggctttagatgtaaaaaaccgctatggccttgccctttcttcggtcggttctgtcggcatttccgcaatgatgcacggataccttgtatttgacaaaaccggcaatcagcttgttcccttccgcacatggcgcaataccacaaccgaaaaagccgccgcccttcttaccgaagaatttaaattcaatataccccagcgctggagcatagctcatttgtatcaggcaatcctgaacaaagaaattcatgttaaggatattgattttataaccactctcgccggttatgtacattggaaattaacaggtaaaaaagttcttggcataggcgacgcttccggcatgttccctatagaaaacggtaaatataatccttttaatgttaaaacagtttga

SEQ ID NO: 52306 - protein, 199 aa, Unknown
  Obtained from environmental sample
  misc_feature (1)..(199): Xaa is any amino acid
MDIKQAITENKTSLGIELGSTRIKAVLIDDTYSPVAQGSHDWENKLEDGVWTYHLDDVRKGMQDCFKNLALDVKNRYGLALSSVGSVGISAMMHGYLVFDKTGNQLVPFRTWRNTTTEKAAALLTEEFKFNIPQRWSIAHLYQAILNKEIHVKDIDFITTLAGYVHWKLTGKKVLGIGDASGMFPIENGKYNPFNVKTV

SEQ ID NO: 52307 - DNA, 660 bp, Unknown
  Obtained from environmental sample
  misc_feature (1)..(660): n is a, c, g, or t
gtgcttgaaagcctgggagttgacatcacaataccgccggaaaaaaccctgaaccttttgaagaccattaacctttgttttcttttcgcgcagaattaccatatctcaatgaagtatgtggccccggtccgcaaggaattgggcatcaggacgatttttaacattctcggccctctggtaaatccggccggcgccaatatggaactgctgggcgtgtatgacgcggaccttattgagcctatggcaaaggttctgtgcaaccttggggtaaaaagcggcatggtggtatacggccaggacgggttagatgaaatttccctaagttcgactaccagcgtctgcgagcttagggacggcgattttaaaagttatacgatagagccggaacagttcggttttacccggtgcaaaaaagaagaactaatgggcggaacccctgaggaaaacgcgcggattacccgcgatatactgagcggcgcaaagggaccccgccgcgacgcggcgctgctcaactcggcggcggcgattcacattgcccggcccgatcttgcaatgaaagacgctcttgcccttgccgcgcagaccattgattcaggaaaagcgcaggcgcagcttgagcggtttatcaaattgtcccgcgccatggaaacagttcaatga

SEQ ID NO: 52308 - protein, 219 aa, Unknown
  Obtained from environmental sample
  DOMAIN (2)...(202): Glycosyl transferase family, a/b domain
  misc_feature (1)..(219): Xaa is any amino acid
MLESLGVDITIPPEKTLNLLKTINLCFLFAQNYHISMKYVAPVRKELGIRTIFNILGPLVNPAGANMELLGVYDADLIEPMAKVLCNLGVKSGMVVYGQDGLDEISLSSTTSVCELRDGDFKSYTIEPEQFGFTRCKKEELMGGTPEENARITRDILSGAKGPRRDAALLNSAAAIHIARPDLAMKDALALAAQTIDSGKAQAQLERFIKLSRAMETVQ

SEQ ID NO: 52309 - DNA, 798 bp, Unknown
  Obtained from environmental sample
  misc_feature (1)..(798): n is a, c, g, or t
atgacgattctggacgagattgccggcaagacgcgggcgcgagtggcaaaagcaaaaaacgccgcgccttttgaacaaacgcaaagaaaggctcttgccatagctgacaaagaaggctcggaaccatttccttttgagcgcgccctggccttgcccggtctttcctttatctgcgaggtaaaaaaggcctcgccctcaaagggaattatcgttgaggattttccgtatctgcaaatcgcgctggaatacgaaagcgccggagcagccgcaatttccgtcctgaccgagccggattatttcctgggcagcgatcgatacttgcgggaaatcgccgccgcagttgccgtccccacgctcagaaaggattttataattgacccgtaccagatatatgaggcgaaagtcctgggagcaaaggcggttctgttgatctgcgccctgctggatgctgaaacgctggccgaatacatcaaaacctccagtgaacttggtttgtcttcgttagttgaaattcacgacgaggccgaagcggaacaggccgttcaggcgggggcccggattatcggaatcaataaccgcgacctcaaaactttcatggttgatcttgccgttaccgcccgcttacgttcccttatcccggcgggtattcttaccgtggcggaaagcggcgtcaagtctgttgaagacgtccgcgccataagcggcttcggcattgacgcggtactggcaggcgaaagccttatgcgcgcggcggacaagcggaaatttctgatggagttaaaagggagcagtgagtaa

SEQ ID NO: 52310 - protein, 265 aa, Unknown
  Obtained from environmental sample
  DOMAIN (3)...(260): Indole-3-glycerol phosphate synthase
  misc_feature (1)..(265): Xaa is any amino acid
MTILDEIAGKTRARVAKAKNAAPFEQTQRKALAIADKEGSEPFPFERALALPGLSFICEVKKASPSKGIIVEDFPYLQIALEYESAGAAAISVLTEPDYFLGSDRYLREIAAAVAVPTLRKDFIIDPYQIYEAKVLGAKAVLLICALLDAETLAEYIKTSSELGLSSLVEIHDEAEAEQAVQAGARIIGINNRDLKTFMVDLAVTARLRSLIPAGILTVAESGVKSVEDVRAISGFGIDAVLAGESLMRAADKRKFLMELKGSSE

SEQ ID NO: 52311 - DNA, 966 bp, Unknown
  Obtained from environmental sample
  misc_feature (1)..(966): n is a, c, g, or t
atgaactttttagtccggtatgttctgaaacggctcctcttactcgtgccgatacttctggcggtatcagtgctgattttcttccttatccgccttacgccgtccgaccccatcggctctattacgagcggacggaaaatcagcaatgaaacgcgggcctccctgacagcccagtaccatttggacaaaaaccttccccaacagtaccttatctggatcagtaacgcggtaaggggaaatctgggggatagtttcagacaccgccagccggtaggcgcgctccttgcggcaaggcttccaaccactattcagcttgttttgatgagcgcgatttttgcggttctcctggctgttcctgcggggattgtaagcgcggtcaagcggcataccgccgttgaccgcgttctttcggcttttatgatcttttgcgtgtcatcgccggtttttctcaacgccattttattgatgttgctttttgtcctgaggctgaggtggtttccggcatttggagccggacgcggttttatggaaaacctgtattatctgtgcctgcccgcttttgccttaagccttaatatggtggcccttataggccggataatccgggaccgcatgatcggtgaattcaaatcccattatgcccttgccctttccgccaagggaacgcctttctcccgtatcgtgatgacccattgttttaaaaacactttgattccggttatcaccgttgcgggggtgcaaatcggcgctatggttgtaggagccgtgctggtggaaaatgttttcgcccttggcggaataggggccctgcttattgaggggattcaggcatcggactatccggtagtgcagagtattatgctgtttcttgtcacgctgtttcttgttcttaatttgatagtggatatagtctactttatcattgatccccggattcgggctgccagaaatacgggaaggggttaa

SEQ ID NO: 52312 - protein, 321 aa, Unknown
  Obtained from environmental sample
  DOMAIN (99)...(314): Binding-protein-dependent transport system inner membrane component
  misc_feature (1)..(321): Xaa is any amino acid
MNFLVRYVLKRLLLLVPILLAVSVLIFFLIRLTPSDPIGSITSGRKISNETRASLTAQYHLDKNLPQQYLIWISNAVRGNLGDSFRHRQPVGALLAARLPTTIQLVLMSAIFAVLLAVPAGIVSAVKRHTAVDRVLSAFMIFCVSSPVFLNAILLMLLFVLRLRWFPAFGAGRGFMENLYYLCLPAFALSLNMVALIGRIIRDRMIGEFKSHYALALSAKGTPFSRIVMTHCFKNTLIPVITVAGVQIGAMVVGAVLVENVFALGGIGALLIEGIQASDYPVVQSIMLFLVTLFLVLNLIVDIVYFIIDPRIRAARNTGRG

SEQ ID NO: 52313 - DNA, 948 bp, Unknown
  Obtained from environmental sample
  misc_feature (1)..(948): n is a, c, g, or t
atgaacaaacatcgatctttgcttcccaaaggaattttctccaacagcggatccggcgcaaaaaaaaccgaaggcactttttttacatttccattgatggtttcggggattcttctttttcttattattttttgttgcatacttgcgccggtgctcgcgccttacggcgagtccgagcaggatttgtcagcttctcttgccccgccgtcaaaggcgcatatgttgggcgcggataaaatgggaagagaccttttttcacgcctgctgtacggcggcagggtaacgcttatctccgctttgggggtggtaattctttcggtaatcatcggcgcgccgctggggcttttctccggtttttacggcggaaaatttgacgccgttgtatgccgttgctgcgacgtactgctttcttttccttcgttgttgctggcgttcctctttgtaaccgctcttgggcgcggcattacaagcgcggttaccgcgctgggaattgtttatgtgcctatgattacgcgcttgatccgctctcttacgttagtcgaaaaaaataaaacctatgtggaagccgccgaatctatcggcttttcccgcccttacattttattccgacacattttacctaactgcgtttataccatgctggtacagcttaccctggatttggcttacgcaattcttgatcttgccgcgttaagttttatcggtttgggggtaagcccccccacggctgactggggagccatgctgcaggaaggcagaaactttttgctcatgagtccgcttcttgccctcgcgccgggagccgccattgtggtgacggtaataagcctcaatattttcagcgactgcataacccaatatctcgatccccagagcagggttcttccttcttttgagaagattgaaaaacgcggaaacgccgcaaggagcgcgatcaatggaaattga

SEQ ID NO: 52314 - protein, 315 aa, Unknown
  Obtained from environmental sample
  DOMAIN (92)...(294): Binding-protein-dependent transport system inner membrane component
  misc_feature (1)..(315): Xaa is any amino acid
MNKHRSLLPKGIFSNSGSGAKKTEGTFFTFPLMVSGILLFLIIFCCILAPVLAPYGESEQDLSASLAPPSKAHMLGADKMGRDLFSRLLYGGRVTLISALGVVILSVIIGAPLGLFSGFYGGKFDAVVCRCCDVLLSFPSLLLAFLFVTALGRGITSAVTALGIVYVPMITRLIRSLTLVEKNKTYVEAAESIGFSRPYILFRHILPNCVYTMLVQLTLDLAYAILDLAALSFIGLGVSPPTADWGAMLQEGRNFLLMSPLLALAPGAAIVVTVISLNIFSDCITQYLDPQSRVLPSFEKIEKRGNAARSAINGN

SEQ ID NO: 52315 - DNA, 1266 bp, Unknown
  Obtained from environmental sample
  misc_feature (1)..(1266): n is a, c, g, or t
atgatcagatggccgatccatgacgaccgaccgagaaccgcgcttccaagcttcctcaagctcgccgacaagtacaagtcgatgaaagtgcgcgccaacgccgacacgccctccgacgcgaaggtcgcccggagcttcggcgccgaaggtatcggcctcttccgcaccgagcacatgttctacggcgagggcagcgacgagccgctcagctacctgcgccagatgatcctgtccaagaacgtcggggagcgccgcgccgctttggataagctcttccccttcgttaagcgcgacatcaaggcgactatgcacgcgatggcaggcttcccggttaccatccgcctcttagacccgccgctacacgagttcgtgccggagcgccaggagttgcagagcgacctcgctaaaaaattgggtatcacgcccgtcgaggtcagtaatcgcggcaagagccttgaggaggtcaacccgatgctcggccaccgcggcgtccgcctcggcgtcacctaccctgaactaaccgagatgcaggtccgcgccatcctcgaagccgccgccgagctgagcaaagagggcactaaggtcacgccggagatcatgataccggtaacctgcaccccgaaagagctcgcccaccagaaggtcatagtggacaaggtcgccgacgaggtcaaaaagaagtacgaactcaaaaacttcgagtacctctacggcacgatgatagagatcccccgcgcggcgctgctcgccaacgagatggccactgtggcggagttcttctccttcggcaccaacgacctgacgcagatgggcttcggcttcagccgcgacgacatcggcgccttcatgggcgactacctagacaagaagctcctgcccgaagacccgttcctcagcatcgaccagtccggtatcggccagttggtgcgctacggcgttgagcgcggccgcgacgtcagggaaaagctgaaggtcggcgtctgcggcgagcacggcggcgaccccgcttccgtggagttcttctacggtctcggcttgaactacgtgagttgctctcccttccgcgttcccatcgcccgcttagcctccgctcacgcggagataaaggcgaagagggccgcgaagtctcccgccaaaaagtcggcctccgccaagaagtccggcggcaagaaagcggagaagaaggccgagaagaaagcggctaaaccggcggccaagaaagccccggccaaaaaagccgctaagaagggcgcgaagaaaaagtaa

SEQ ID NO: 52316 - protein, 421 aa, Unknown
  Obtained from environmental sample
  DOMAIN (9)...(368): PEP-utilising enzyme, TIM barrel domain
  misc_feature (1)..(421): Xaa is any amino acid
MIRWPIHDDRPRTALPSFLKLADKYKSMKVRANADTPSDAKVARSFGAEGIGLFRTEHMFYGEGSDEPLSYLRQMILSKNVGERRAALDKLFPFVKRDIKATMHAMAGFPVTIRLLDPPLHEFVPERQELQSDLAKKLGITPVEVSNRGKSLEEVNPMLGHRGVRLGVTYPELTEMQVRAILEAAAELSKEGTKVTPEIMIPVTCTPKELAHQKVIVDKVADEVKKKYELKNFEYLYGTMIEIPRAALLANEMATVAEFFSFGTNDLTQMGFGFSRDDIGAFMGDYLDKKLLPEDPFLSIDQSGIGQLVRYGVERGRDVREKLKVGVCGEHGGDPASVEFFYGLGLNYVSCSPFRVPIARLASAHAEIKAKRAAKSPAKKSASAKKSGGKKAEKKAEKKAAKPAAKKAPAKKAAKKGAKKK

SEQ ID NO: 52317 - DNA, 543 bp, Unknown
  Obtained from environmental sample
  misc_feature (1)..(543): n is a, c, g, or t
gtggcttcgattgccatacgcatactgcttatctgcgcggttttgctgctgatactgtcgatccctgaccttatgttccagcgctggcggttcagggaacggaacaaaatgtcccggcaggaaatgaaggaagaaatgagaatgtacgagggagacccgcagatacggaatagaatccgcagccgtttccgggaactcctgaaacagaatattgccacggcggttccccgcgccgacgtggttatcaccaacccgacccactatgccgtggcgctggagtatcaacgggataccatgcccggccctatggtgacggccaagggcgcggatgaaatggcggcgcggatacggaatctggcgcgtgacaacggcgttccgttagttgaaaacaagcccgtcgcccaggctttgttccgggagacggaggtgggggattatatccccgaagcgtattattccgtggttgcgacgatattcagaaaggtgatggatattaacgaactgcggcgcaaggcaaaagcctctgaaagggcaagcgcatga

SEQ ID NO: 52318 - protein, 180 aa, Unknown
  Obtained from environmental sample
  DOMAIN (1)...(163): FlhB HrpN YscU SpaS Family
  misc_feature (1)..(180): Xaa is any amino acid
MASIAIRILLICAVLLLILSIPDLMFQRWRFRERNKMSRQEMKEEMRMYEGDPQIRNRIRSRFRELLKQNIATAVPRADVVITNPTHYAVALEYQRDTMPGPMVTAKGADEMAARIRNLARDNGVPLVENKPVAQALFRETEVGDYIPEAYYSVVATIFRKVMDINELRRKAKASERASA

SEQ ID NO: 52319 - DNA, 816 bp, Unknown
  Obtained from environmental sample
  misc_feature (1)..(816): n is a, c, g, or t
atgagagggactttgaaagcgctgattggtttagctttaagaattttaccacggagtacacggagttacacggaggaaaagaacctcgtatcaaaactccgtggtactccgtgtcctccgtggtttttatttcttcgttccccagtccccagtccccagtccccagtcccttttattcacttgcagtggttttccgatgaggctgaagccgagggcaggactgaacagccgaccgagcataaactcaggcggttgagagaagaagggcaggttccgaaaagtcaggaattggtaggggcggtgactctgtttctccccgcgctgatgctgctctttatggcgccgtccatgctgcgtacctgtgtggaaatgctgcgctttttcttttcgcgggcgacagaactggatcccaccaaggatgccattattgtaggggtcttttttagctatctggtcaggctggtcctgcccatactgattgtagcggtgtttgccgcgttgttttccaacattgtccaggtggggtttttgtttaccaccaagcccattacgcctgattttaccaaagttctgccccgttttgggcagtttttcaaacgtatcttttcgatagacgggctgtttaatttcggaaaatcaattatcaaaatgctgatcatcgggggggtggcgtttcttctgataaaaatggatataaacaaactggcaaatctgcaaaaaggcgggtctctggctggggctggcgacggtggcttcgattgccatacgcatactgcttatctgcgcggttttgctgctgatactgtcgatccctga

SEQ ID NO: 52320 - protein, 271 aa, Unknown
  Obtained from environmental sample
  SIGNAL (1)...(22)
  DOMAIN (69)...(270): FlhB HrpN YscU SpaS Family
  misc_feature (1)..(271): Xaa is any amino acid
MRGTLKALIGLALRILPRSTRSYTEEKNLVSKLRGTPCPPWFLFLRSPVPSPQSPVPFIHLQWFSDEAEAEGRTEQPTEHKLRRLREEGQVPKSQELVGAVTLFLPALMLLFMAPSMLRTCVEMLRFFFSRATELDPTKDAIIVGVFFSYLVRLVLPILIVAVFAALFSNIVQVGFLFTTKPITPDFTKVLPRFGQFFKRIFSIDGLFNFGKSIIKMLIIGGVAFLLIKMDINKLANLQKGGSLAGAGDGGFDCHTHTAYLRGFAADTVDP

SEQ ID NO: 52321 - DNA, 447 bp, Unknown
  Obtained from environmental sample
  misc_feature (1)..(447): n is a, c, g, or t
ttgaaaccccttagggccatacctcaacctggtttcatgttggtatttctggtggttggcggctttcgggaattgtttttgggcggtttctggcgttccgtgcaaagcatcagcatgagcgcgttagtcgcgggcagggaaccggttatcagtctgctggcatcggggctttcgcggctgttcatggacgccattgtcatttccctgccgatactgggaaccctgtttctggtttccctgaccacgggtcttatctccaaagccgcgccccagattaacatattgagtgaaggttttcccatttccataacggtagcttttctgctgatttacagttcccttccctttatgaccgaggcctttgcgcgggtaatcaattccggttttgccagcctgcaaagtttgtacgcgcaaattgggcagcagattgagggagacaagttatga

SEQ ID NO: 52322 - protein, 148 aa, Unknown
  Obtained from environmental sample
  misc_feature (1)..(148): Xaa is any amino acid
MKPLRAIPQPGFMLVFLVVGGFRELFLGGFWRSVQSISMSALVAGREPVISLLASGLSRLFMDAIVISLPILGTLFLVSLTTGLISKAAPQINILSEGFPISITVAFLLIYSSLPFMTEAFARVINSGFASLQSLYAQIGQQIEGDKL

SEQ ID NO: 52323 - DNA, 774 bp, Unknown
  Obtained from environmental sample
  misc_feature (1)..(774): n is a, c, g, or t
ttggggtttataggagacggaataaaaaaagtacaaaaaaaattaaataaagaaaagttaaaaatgtttgatgttttcagcggatcgggtattgttgcaaggtattttaagcaattttcaaaattattaatagtgaatgatcttgaaaagtattcaagcttaataaatgaatgttatttatcaaacgatgacgaaagaaatgaatttactttgcgtaaatattattatgaactaattgagcaggcggaaaacaatcttgttaaggggattatttccgaattatatgctccaaaaaacgataaaaacataaaacaaaacgaacgtgttttctatacaacaagaaacgctatgtatattgatactatacggcaattaattgataatattcctaaagaatatcaaaaatattttcttgctcctttgttatcggaagcgtcaatacatgcaaatacttccggcgtttttaagggattttataaaaataaaaaaaccggtattggtcaattcggcgggataaaccaagacgcattattcagaataaccggagatataaaattgccatttcctgttttcagtaattttaattgtgaaacaatgatttgtaacggagattcaaatgaagttattcattcattgcccgaaacagatatagcgtatttagaccctccttacaatcaacatccttacggttccaattactttatgctcaatttaattttagattataaacatcctgaaaattccagtaagatatccggtataccggaaaattga

SEQ ID NO: 52324 - protein, 257 aa, Unknown
  Obtained from environmental sample
  misc_feature (1)..(257): Xaa is any amino acid
MGFIGDGIKKVQKKLNKEKLKMFDVFSGSGIVARYFKQFSKLLIVNDLEKYSSLINECYLSNDDERNEFTLRKYYYELIEQAENNLVKGIISELYAPKNDKNIKQNERVFYTTRNAMYIDTIRQLIDNIPKEYQKYFLAPLLSEASIHANTSGVFKGFYKNKKTGIGQFGGINQDALFRITGDIKLPFPVFSNFNCETMICNGDSNEVIHSLPETDIAYLDPPYNQHPYGSNYFMLNLILDYKHPENSSKISGIPEN

SEQ ID NO: 52325 - DNA, 543 bp, Unknown
  Obtained from environmental sample
  misc_feature (1)..(543): n is a, c, g, or t
ttgaagaatgagggggaatccgaacggagcctggatattctgcagccgccggaaatgtttggtgaaatggcaatacttgaaggctcgccgcgcagcgccaccgccattgccctggacgaagtaaaggtgctggaattcaacgcgcagaattttgaaatcatcatgaccggaaatccgcagattggcattaatctgctgcggattttcgcaaagagaatttacgattcaaaacggcgtttcatgatccttaccctgcccaccccccagataaagattctcgatgtgtttcttatgcttgatgaaactttgccggatattgacagagaaaccgacacccgtgaattccagactaccattgaagatatagcccattgggcaggagtgaccgtcacagaggtaaaggaagtgcttcacccctttatggcgcagaaccgcctggagatatacatcgaccacatggtggttaaaaacatcaatgattttgcccgtattgtcagttcgcggcgtaaacaggcaaagaacccggccggaattaaaaaatga

SEQ ID NO: 52326 - protein, 180 aa, Unknown
  Obtained from environmental sample
  misc_feature (1)..(180): Xaa is any amino acid
MKNEGESERSLDILQPPEMFGEMAILEGSPRSATAIALDEVKVLEFNAQNFEIIMTGNPQIGINLLRIFAKRIYDSKRRFMILTLPTPQIKILDVFLMLDETLPDIDRETDTREFQTTIEDIAHWAGVTVTEVKEVLHPFMAQNRLEIYIDHMVVKNINDFARIVSSRRKQAKNPAGIKK

SEQ ID NO: 52327 - DNA, 699 bp, Unknown
  Obtained from environmental sample
  misc_feature (1)..(699): n is a, c, g, or t
atggaagatcaagctgaaaaactacgtgaaataatgaagcgaaaaaaagaaggaaccggaacggcgaaaaccgcttccgctacaaagacaaacgtgaaagccgccgataagccgcgcattataacggttacttctggcaagggcggcgtaggaaagaccaacctttccgtgaatatggcgcttgcgtttgcgagaatcggaaaaaaagtaattgtcatggacgcagacttaggtcttgccaatgttaatgttatgctaaacatgattccgaaatacaacctgtaccatgtaattaaaaaacaaaaaacaatccgggagattctggtagagacagaatacggcatttccattgtggccggcgcttccggcttttcacagattgccaatctgggcgaggaagacaggaaggactttataaaagaactggattcgctttccaacgcggatattataattatagatacaagcgcgggcgtttccagcaatgttcttgattttatcgccgccgccgatgatgccgtgataataaccactcccgaaccaaccgcgattaccgacgcttacggcattataaaaattatcgctacagagtatgattcccttaacatggggttaaaacttgttgtcaaccgcgcaaagggagcggcggaagcaaaaagcgtcgccgacaggatgatcaatatttccggccagttttaa

SEQ ID NO: 52328 - protein, 232 aa, Unknown
  Obtained from environmental sample
  DOMAIN (41)...(230): CobQ/CobB/MinD/ParA nucleotide binding domain
  misc_feature (1)..(232): Xaa is any amino acid
MEDQAEKLREIMKRKKEGTGTAKTASATKTNVKAADKPRIITVTSGKGGVGKTNLSVNMALAFARIGKKVIVMDADLGLANVNVMLNMIPKYNLYHVIKKQKTIREILVETEYGISIVAGASGFSQIANLGEEDRKDFIKELDSLSNADIIIIDTSAGVSSNVLDFIAAADDAVIITTPEPTAITDAYGIIKIIATEYDSLNMGLKLVVNRAKGAAEAKSVADRMINISGQF

SEQ ID NO: 52329 - DNA, 756 bp, Unknown
  Obtained from environmental sample
  misc_feature (1)..(756): n is a, c, g, or t
ttggaggatcctaacgcggtacaggagaaaatgctggaatggataggggagagtatcagtatttataaggaagaaacgcctgcccgaaaacccaggattatggttcttgtagggcctacaggcgtaggaaaaaccacaacgatctccaaacttgcggctatttacgggataggaagggaaggaatcccggcggtcgaggtgaggatgatatccatcgacgctttccgcatttgcgcgatagaacagcttgaatcaataggaaatattatgcgcattcccgtttccggcgtggataacaaaatggcgttaagaaaagaaatcgcgcttaactccgagaataccgacctttttctggttgacactataggaaacagccccaaagacgccgcaaagttaggtgaaatgaaagaaattctggaaggctgcggcaggacggcggaatatcatctggttgtttcagccataaccaaaaccagcgatatagaaaacattatgcgccaatttgagccttttaattacaaatccgtaatccttacaaaattggacgagacggaacgagtaggcaatataatatcagtccttgccgaaaaaaataagccgatctcatatataacagacgggcagaagattcccctttatataaataaagctactgtagttagtttcttaatcaatcttgacggtttcaaggtaaacagggaaaaaatggaaaaactatttccgtccaaggaagccgatcaatttaagtggagataa

SEQ ID NO: 52330 - protein, 251 aa, Unknown
  Obtained from environmental sample
  DOMAIN (30)...(228): SRP54-type protein, GTPase domain
  misc_feature (1)..(251): Xaa is any amino acid
MEDPNAVQEKMLEWIGESISIYKEETPARKPRIMVLVGPTGVGKTTTISKLAAIYGIGREGIPAVEVRMISIDAFRICAIEQLESIGNIMRIPVSGVDNKMALRKEIALNSENTDLFLVDTIGNSPKDAAKLGEMKEILEGCGRTAEYHLVVSAITKTSDIENIMRQFEPFNYKSVILTKLDETERVGNIISVLAEKNKPISYITDGQKIPLYINKATVVSFLINLDGFKVNREKMEKLFPSKEADQFKWR

SEQ ID NO: 52331 - DNA, 1674 bp, Unknown
  Obtained from environmental sample
  misc_feature (1)..(1674): n is a, c, g, or t
atggatttctttgataaattcgactgcacggaaatcatcaaaaaaattgatttctcggtcaaaattaagaacgattcgttattccgcaaagaatacctgctatgggcggaggcgaaggcgagcccgaccgatattgctacgatgttggctcaactgattttgacgataggcaaggcaagaatccaccatgacatcttgccgccgccgtttttaggctgcttcgaccgagcgaaaatcgccctaataccgttttccgaaatccaagatgttttttacaaaaacgattttaattggaacgtcgcgccgtctaatcgcgaaacccgcgagtttaaacagattctcggacacataaataaaatcattaacaatgacaaaaaatacgtgtttgattttgagaaagacgagaaagaattaaggcaatttatccgagaaaattttgttgtgggtaagaacgaaacgagcaaaattcaaattgacaggaataattttataagcgtttacaacaaatggctcgaaaaagtcaaaccgaccattgccgtgaattgggaagccgcgaaaaaacgctcactaattgacggatatttttacttggcggatttgctctcagaaaacaataaaacgattaaggaaaatctacgggttgttttaaataacacgcactatacttttgatagagaaatcgacaacgacggttttttttcacaaaaatcggccgcatataacgacggccaaaaagctcatacggaattttgggctaagtatgagcgcccgccgcaaaaagattattgggaatttatgaccttgcggctggatttgctcgttccgcaggacgttcgcgagcgcaaaggcagtttttacactccaaaaatttgggtggaactgtcgcaaaagtatatagctgacgttttgggtaaggattggcaggaagaatattacatatgggactgcgcggcgggaaccggtaatttgcttgtcggtttaaccaataaatacaatatttgggcatccacgcttgaccaagccgatgtggatattatgcacgaccggatagacaacggcgcgaatttactgaaagaacattgttttcggtttgattttttgaacgatgattttgaaaaactgccgcaggggttgcaaaaaattatcaatgaccctaaaaaacgaaagaagcttattatctatataaaccctccgtacgcggaagatactacaaaaacgaccattacaaaaacaggaaagaataaaggaaaagtcgccaagaataaaattcacgataaatacgcaaatttactaaaaaaagcaaaccatgaattatttgcccagtttttgataagaatttataaagaaatccaacgttgcaaaattgcaaattttgcaaagttgaaagcgctatgcgcttccaactttgtggattttagaaaaaattttcaagcaaaactaaagagtttgtttgttgtcccggctgatacgttcgataatgtaaatgggcaattccctataggatttcatatttgggatgcatctcaaaatgagatgtttgaagaaattacggcggatgtttttgataaaaatggaattctcatcgatacaaaaaaactttctataaatgataatatcaaatcagttaacaaatggataaaaatatatgaatataagaatactcggccgatctga

SEQ ID NO: 52332 - protein, 557 aa, Unknown
  Obtained from environmental sample
  misc_feature (1)..(557): Xaa is any amino acid
MDFFDKFDCTEIIKKIDFSVKIKNDSLFRKEYLLWAEAKASPTDIATMLAQLILTIGKARIHHDILPPPFLGCFDRAKIALIPFSEIQDVFYKNDFNWNVAPSNRETREFKQILGHINKIINNDKKYVFDFEKDEKELRQFIRENFVVGKNETSKIQIDRNNFISVYNKWLEKVKPTIAVNWEAAKKRSLIDGYFYLADLLSENNKTIKENLRVVLNNTHYTFDREIDNDGFFSQKSAAYNDGQKAHTEFWAKYERPPQKDYWEFMTLRLDLLVPQDVRERKGSFYTPKIWVELSQKYIADVLGKDWQEEYYIWDCAAGTGNLLVGLTNKYNIWASTLDQADVDIMHDRIDNGANLLKEHCFRFDFLNDDFEKLPQGLQKIINDPKKRKKLIIYINPPYAEDTTKTTITKTGKNKGKVAKNKIHDKYANLLKKANHELFAQFLIRIYKEIQRCKIANFAKLKALCASNFVDFRKNFQAKLKSLFVVPADTFDNVNGQFPIGFHIWDASQNEMFEEITADVFDKNGILIDTKKLSINDNIKSVNKWIKIYEYKNTRPI

SEQ ID NO: 52333 - DNA, 408 bp, Unknown
  Obtained from environmental sample
  misc_feature (1)..(408): n is a, c, g, or t
gtggggatgggaacattttaccccgtaagaagcgaaaacattgaagaccatcccatgcacagcgaacatttcagcatagatgaaaataccgcgcaaaaaataaacaaggcaaaagaagcgggacggaaaattatcgcggtggggacgacaagcgcgcgtactttggaaagcgcgtggagcgaagggaaaattattccgggagaaggaagcaccgcgattttcatttatcccggctacaaatttaaggtattggacgctctttttacaaattttcacactcccgaatccactttgttaatgcttgtgtctgcttttgccggaagggagttgattctggaaagttacgcacaagccgtaaaagaaggataccgctttttcagctacggcgacgctatgttgattatttaa

SEQ ID NO: 52334 - protein, 135 aa, Unknown
  Obtained from environmental sample
  misc_feature (1)..(135): Xaa is any amino acid
MGMGTFYPVRSENIEDHPMHSEHFSIDENTAQKINKAKEAGRKIIAVGTTSARTLESAWSEGKIIPGEGSTAIFIYPGYKFKVLDALFTNFHTPESTLLMLVSAFAGRELILESYAQAVKEGYRFFSYGDAMLII

SEQ ID NO: 52335 - DNA, 444 bp, Unknown
  Obtained from environmental sample
  misc_feature (1)..(444): n is a, c, g, or t
atgaaattanccgacattcaggaagctcctcccccggaaccggaaattccgcaggtggaagccattgccgagaaaatgatagaaaccgacgtcgcgcccgtccaacaggtgcttgcggcgggagtttttcttacagagacgtatcttgcgatgaatcaggtgtccgttcctcccaaatttgactccggtttagttatgaaatcccttgtctatcctcctatcgcgctgcgttccggcattgaaggaaaggtcatccttgaattattcgtagatcgcacaggtacagtgcaaaaaattgtaatcttaaaagaagatcctcccgaccgcggcttcggcgaagcggcggtaaaggcgttcacggacagaaaaggcatacctgcctacgccaacggagaacccgtctccgcaaggtaccgctaccctgtaacatttaagcttaaataa

SEQ ID NO: 52336 - protein, 147 aa, Unknown
  Obtained from environmental sample
  DOMAIN (68)...(102): Gram-negative bacterial tonB protein
  misc_feature (1)..(147): Xaa is any amino acid
MKLXDIQEAPPPEPEIPQVEAIAEKMIETDVAPVQQVLAAGVFLTETYLAMNQVSVPPKFDSGLVMKSLVYPPIALRSGIEGKVILELFVDRTGTVQKIVILKEDPPDRGFGEAAVKAFTDRKGIPAYANGEPVSARYRYPVTFKLK

SEQ ID NO: 52337 - DNA, 633 bp, Unknown
  Obtained from environmental sample
  misc_feature (1)..(633): n is a, c, g, or t
ttgccggaaaaagtaaaggagagttggtttgcctttgatcatttttattctgatatagtttttgaagaagctatccccattgttttctctcacaaaccaaaaaaaattatcgacataggcggaaataccgccaagtttgctatatgctgttgccgccatgaccccaatgtggaagtaaccattgtggaccttcccgggcagactcaggcggcggaacaaaaaatagcgcaagtcggtttttcagacaggataaaaaccctggcccgcaatgttctgaataaagaaactgttattccttccggcgcggatgtaatttggatgagccaatttttggattgtttttctcttgacgaagttaccatgattatggaaaaagttcgtaatgcggttggggctaatacaaatgtttatatacttgaaccattttgggacaaacaacgttttgaagcggcgtctttttcgcttcaggctacatctctttactttacctgtatggcaaacggaaacagtaaaatgtaccgttatggagaacttgcccaatccgttgaaaaggccggttttgatattgttgacgcacggcataatcttggttccaatgattattcgcttctttgttgcaggggtaaattttga

SEQ ID NO: 52338 - protein, 210 aa, Unknown
  Obtained from environmental sample
  misc_feature (1)..(210): Xaa is any amino acid
MPEKVKESWFAFDHFYSDIVFEEAIPIVFSHKPKKIIDIGGNTAKFAICCCRHDPNVEVTIVDLPGQTQAAEQKIAQVGFSDRIKTLARNVLNKETVIPSGADVIWMSQFLDCFSLDEVTMIMEKVRNAVGANTNVYILEPFWDKQRFEAASFSLQATSLYFTCMANGNSKMYRYGELAQSVEKAGFDIVDARHNLGSNDYSLLCCRGKF

SEQ ID NO: 52339 - DNA, 870 bp, Unknown
  Obtained from environmental sample
  misc_feature (1)..(870): n is a, c, g, or t
ttgattttctcaggcggattcttctttgtgggaagctgcatgttacctcctgaactgccttcaatcacaaacaagttcctctatgcttaccgtgtgctgggaaaatggttttcatttttcttttttggtttaagtacgctgatcctggtgataattgtttttcccgttatgtgtcttttctttcatccaaaagaaaagtttaaaaaatacgggcggaaatttgtttcagcttctttcaggttttttgtttcccttatgcactttatcagaattgtaaatctggaaaccgataaccgggaaaattaccgtcatctttcatcaaagatagtagtcgcgaatcatccgtctcttcttgacgtggttatgcttatctcgcttattccaaacgccgactgtattgtgaatacttatttaaaacgtaactttattgtaaaaggagttgtacgtaagctctatatacttaattctctcgatcttgatagtgttttacaggcttgcgccgaatcattaaagaagggaaactgcttaatcatttttccagagggaaccagaactccaagattaggtaaagtgattctcaaaaaaggagccgcccgcgttgctttgtattccggctgtaatattgtcccggtgcatataggaggcacggataaatatggtctggggaaaaaagacccctggaccggctttaattcccgtgagcgctatgtttatgatataagcatgggacatgaaattaactctgcacaatacagggatctccctgcgccaaaagcggtaagggcgattaccagggaaattgcggtttttctgtttccggcaaaagaggcatcgactataagcgtcgaagaaaaagattatgaaaattaa

SEQ ID NO: 52340 - protein, 289 aa, Unknown
  Obtained from environmental sample
  DOMAIN (91)...(214): Acyltransferase
  misc_feature (1)..(289): Xaa is any amino acid
MIFSGGFFFVGSCMLPPELPSITNKFLYAYRVLGKWFSFFFFGLSTLILVIIVFPVMCLFFHPKEKFKKYGRKFVSASFRFFVSLMHFIRIVNLETDNRENYRHLSSKIVVANHPSLLDVVMLISLIPNADCIVNTYLKRNFIVKGVVRKLYILNSLDLDSVLQACAESLKKGNCLIIFPEGTRTPRLGKVILKKGAARVALYSGCNIVPVHIGGTDKYGLGKKDPWTGFNSRERYVYDISMGHEINSAQYRDLPAPKAVRAITREIAVFLFPAKEASTISVEEKDYEN

SEQ ID NO: 52341 - DNA, 546 bp, Unknown
  Obtained from environmental sample
  misc_feature (1)..(546): n is a, c, g, or t
atgaaaattaaatttgcgccgcttttcctgcttcttcttctgtgttcatgcctgactataaatcgcagcagggcggaatccaacatacccccttccgtagtttatttaagttttgatgacggacctaatggtacagacgatacgactgcccgtctgctggacgtgcttgaaaaatatcaaattaaagctatattctgtctgctgggtgtgaatgcggaacgctatcctgatctggtcaagcgtatatatgatgaaggacattgtattgtcaatcacggatattccgacaaatgggcaagcaggatgaacaaagatgaattcaggaataatctgctccggggtgaagcggcgatttcctccgctctggggcacgagatgtcccccaggctgtaccggccccagggcggcttttacacctccgcgcaggaaaaaatcattcgcgatgaagggtatacattggttctgaataatgtcaggntgtatgacgccgttattgacggaacaaaacagggtaaagttgtaaggaatattataggaaaaagttga

SEQ ID NO: 52342 - protein, 181 aa, Unknown
  Obtained from environmental sample
  SIGNAL (1)...(25)
  DOMAIN (27)...(154): Polysaccharide deacetylase
  misc_feature (1)..(181): Xaa is any amino acid
MKIKFAPLFLLLLLCSCLTINRSRAESNIPPSVVYLSFDDGPNGTDDTTARLLDVLEKYQIKAIFCLLGVNAERYPDLVKRIYDEGHCIVNHGYSDKWASRMNKDEFRNNLLRGEAAISSALGHEMSPRLYRPQGGFYTSAQEKIIRDEGYTLVLNNVRXYDAVIDGTKQGKVVRNIIGKS

SEQ ID NO: 52343 - DNA, 1197 bp, Unknown
  Obtained from environmental sample
  misc_feature (1)..(1197): n is a, c, g, or t
gtgcatgagatggccctgcgcccaaagcccgacggcagcggcgatgaagttaatcaagacgcagtcaacgatttgattgactatgcgatagcacatggagtcaactattttgacacggcacccccatacgtgcgcggcctctctgaacgagccactgggatagctctcaagcgccacccgcgagaaaagttttttgttgcgacaaagttgtccaaccagcgggatgacccgcagttgaggtcattcgccggctccaaagccctttatgaaaaatcaaaggaaaatttgcaggttgactaccttgactattatcttctgcattcggtgggcaatgggggaatgaaagacgcgatggagcgtttttacaataatggcatggtggatttcttggtgaaggagagaaacgccgggcgaatccgcaacttggggtggtcttaccacggcgatgtggcagtgttcgattacttgttgtcgcagatggatttgggcaaagtccactgggacttcgcaatgatccaattgaactatattgattggcagcacgcaacgggcagaaacgtcaacgccgaataccttttgggagagcttgaaaagcgaagcgtacccgccatcgtgatggagccgcttttcggcgggcggctgtcaaggataaacgcccaatccttcaaaatcctgaaacaaatccacccaaaagacagcgcggccacgtgggctttccgttacgccggcactcccaaaagcgtcctgactgtgttgagcggaatggtgtacatggagcacctgcaagaaaacatccgcacatattcgccgcttgagccgctgaacgaaatagagtacggtgcattgggcgaagtaaccgaaataatgctgaatagcgaatacgtgcaatgcaccgaatgccagtactgcatgccttgcccttatggcgtggacatccctggcgtttttggccactacaaccgcatagttggagccgaccaaaggctaaaaagttctaaagacccaaattatagtgcggccaggcgggcatttctcgtgggttacgacagaagcgtcccaaaacttcgccaagccaaacactgcataggctgtccatctgtgtgcaaaaaagagtgcccgcagaccttggacataccaagcgagatgcgccgcatagaccaatacgttgaactattgaagcaaaagaatgacttttga

SEQ ID NO: 52344 - protein, 398 aa, Unknown
  Obtained from environmental sample
  DOMAIN (9)...(287): Aldo/keto reductase family
  misc_feature (1)..(398): Xaa is any amino acid
MHEMALRPKPDGSGDEVNQDAVNDLIDYAIAHGVNYFDTAPPYVRGLSERATGIALKRHPREKFFVATKLSNQRDDPQLRSFAGSKALYEKSKENLQVDYLDYYLLHSVGNGGMKDAMERFYNNGMVDFLVKERNAGRIRNLGWSYHGDVAVFDYLLSQMDLGKVHWDFAMIQLNYIDWQHATGRNVNAEYLLGELEKRSVPAIVMEPLFGGRLSRINAQSFKILKQIHPKDSAATWAFRYAGTPKSVLTVLSGMVYMEHLQENIRTYSPLEPLNEIEYGALGEVTEIMLNSEYVQCTECQYCMPCPYGVDIPGVFGHYNRIVGADQRLKSSKDPNYSAARRAFLVGYDRSVPKLRQAKHCIGCPSVCKKECPQTLDIPSEMRRIDQYVELLKQKNDF

SEQ ID NO: 52345 - DNA, 501 bp, Unknown
  Obtained from environmental sample
  misc_feature (1)..(501): n is a, c, g, or t
atgatcgacttcctagtgcggagcggcgtaacgcttctgagcgacgagtttgatatagtgaacggccaagcggtggtaatgggccggctcgacccgaggccgataggcggcttcatgggaaaacgcagagcgggcataggcgaactcatcgtacgggcaagcaacgaaacctccgtcacattgatcaacaacagaacggcgccggggcaaacgaaattatttacgatcaacggaaacacgcccataatcgtgatcgaccacaatcccaaatcgatacatgaatacggcaacgaggtggacttggtgctctccgggcacacgcacaaaggccagctgtttccggtcaaccttatgactaagatgatctacaccgccgactacgggcactacaggaaagaaccgggggcgccgcacctgatagtgacatccggcgcggggacgtggggggcgcctatgagagtggggacgaactgcgagattgtttgcgtgtcggtgttctaa

SEQ ID NO: 52346 - protein, 166 aa, Unknown
  Obtained from environmental sample
  misc_feature (1)..(166): Xaa is any amino acid
MIDFLVRSGVTLLSDEFDIVNGQAVVMGRLDPRPIGGFMGKRRAGIGELIVRASNETSVTLINNRTAPGQTKLFTINGNTPIIVIDHNPKSIHEYGNEVDLVLSGHTHKGQLFPVNLMTKMIYTADYGHYRKEPGAPHLIVTSGAGTWGAPMRVGTNCEIVCVSVF

SEQ ID NO: 52347 - DNA, 402 bp, Unknown
  Obtained from environmental sample
  misc_feature (1)..(402): n is a, c, g, or t
ttgggccagtgctttgaaaaagccctgggcgaaaagcgcggaattcgaaggtcaggaagctgccttttcccgatggacgagaccctggcaagcgccgccgtagatctgtctggccgcccattcctttttatcgacgcaaagctttcgggaacgccgcttatcgcagcctcaagcggcgaagggggagaggtttttaatttccaaaccgacacggtagaagatttttggcagggttttaccaacgctgcgctctgtaacttgcatctggaaattatccgagggcgcagcgatcaccacaaaatagaggccatgtttaaagccgccgcccgcgccctccgcaccgcttgtgaaattgacgagcgaagaggcgacactgttccctcaacaaagggaaggctataa

SEQ ID NO: 52348 - protein, 133 aa, Unknown
  Obtained from environmental sample
  DOMAIN (1)...(113): Imidazoleglycerol-phosphate dehydratase
  misc_feature (1)..(133): Xaa is any amino acid
MGQCFEKALGEKRGIRRSGSCLFPMDETLASAAVDLSGRPFLFIDAKLSGTPLIAASSGEGGEVFNFQTDTVEDFWQGFTNAALCNLHLEIIRGRSDHHKIEAMFKAAARALRTACEIDERRGDTVPSTKGRL

SEQ ID NO: 52349 - DNA, 1365 bp, Unknown
  Obtained from environmental sample
  misc_feature (1)..(1365): n is a, c, g, or t
gtgaaattgacgagcgaagaggcgacactgttccctcaacaaagggaaggctataatttttttcatataggacataatatggtaattgcgtcaattgatattcaaaacgggaaagtcgtccagctaaggcaaggcgccgaattggttcttgaacgggataacgcgatggaactggcagcggaattcgatcgttacggcgaagtagcggtcatcgaccttgatgctgctatgggcaagggctcaaacattgaaatgataaagcccattttacgcaaggcagaatgccgtgtgggtggaggcataaagactccggaacaggcgaaagagctggtgagccttggggcgcggaaaataatagtcggttcgggcgcttttagaagcggaggcgaattcaagccaaatatcccttttctgaaatcaatggcggaaaaaatcggaagggagcggcttattattgcgattgatgcacgcgactgcgagatagttgtagatggatggaagacgcgcaccggccttgacctgtttgataccgcaagggcagttgagccttatgtctctgagttgctttttacctgcgttgagcgtgaaggcgaaatgaaaggtacaaacctggaaactgtgcgcaaactgcgtgatactgtttcctgcctgcttaccgttgcgggcggcgtctcaagtttggatgaagtcgcggaactggcgtcttttaactgcgacattcagttaggcatggccctctataccggcaagattcaactcgccgatgcttttttgtggtcgcttaactggaaaaaatgctgtccgccagcaactgacattaataaatcgcttcttccccttattgttcagtctcctgacggacagacgcttatgacgggctttaccgatgtcgaagcgttagccgaaactttcatgcagggaaacgtttgttttcacagtcgcactcgaaacaagctctggatgaaaggcgaagcttcaggaaatattttgaaacttttaaaaatacgggccgactgtgacagggacgcgcttcttgccgtggcggaacccgccggacctgtttgccatacgggcgcatggtcgtgttttgaaacgggcaggaaatttacctgggaatttttgcagagcattattgtcgagcgtttcagaaatccgccgccgggttcatacaccgcaactttggacgacaaacttgtacgggaaaaacttatggaagaagcggaagaagtttgtacggcaaaaacacatgacgaagttgtctgggaggccgccgatctgctttattttacaaccgtgctgataacccgcgaggggcttaccgttcaggaagttttggacgagcttgaccgcagacacaaaaaataa

SEQ ID NO: 52350 - protein, 454 aa, Unknown
  Obtained from environmental sample
  DOMAIN (371)...(453): Phosphoribosyl-ATP pyrophosphohydrolase
  misc_feature (1)..(454): Xaa is any amino acid
MKLTSEEATLFPQQREGYNFFHIGHNMVIASIDIQNGKVVQLRQGAELVLERDNAMELAAEFDRYGEVAVIDLDAAMGKGSNIEMIKPILRKAECRVGGGIKTPEQAKELVSLGARKIIVGSGAFRSGGEFKPNIPFLKSMAEKIGRERLIIAIDARDCEIVVDGWKTRTGLDLFDTARAVEPYVSELLFTCVEREGEMKGTNLETVRKLRDTVSCLLTVAGGVSSLDEVAELASFNCDIQLGMALYTGKIQLADAFLWSLNWKKCCPPATDINKSLLPLIVQSPDGQTLMTGFTDVEALAETFMQGNVCFHSRTRNKLWMKGEASGNILKLLKIRADCDRDALLAVAEPAGPVCHTGAWSCFETGRKFTWEFLQSIIVERFRNPPPGSYTATLDDKLVREKLMEEAEEVCTAKTHDEVVWEAADLLYFTTVLITREGLTVQEVLDELDRRHKK

SEQ ID NO: 52351 - DNA, 831 bp, Unknown
  Obtained from environmental sample
  misc_feature (1)..(831): n is a, c, g, or t
atgagcaagtactggaatagccgcataaaaaatatctctccttatgtcccaggcgagcagccaagggacaggaagtttatcaagctcaacacaaacgaaaatccgtatcctccttctccaaaagtaattaaaaccctacaggaagcagttaacgagcgcctacggctttatcctgatcctcaatgcacggagcttcgcgaggccattgccaggcggtacggggtaaagagcgagcaggtattcgctggcaacggatcagatgagatactggcgtttgcctttgcggcgttttttgaaagctctggcggtaatcagaacaagccgattctctttcctgacataacgtatagcttttatccggtgtacgccaatctgtgggacattccgtaccgcccagttccggtaagagaagacttttcgataaaaactgccgattacaaaataccttcaagcggtgttgtttttccaaaccccaatgccccgacaggaataccgctttcattgagcgaggttttttcccttgccgaatacctgggaaaattggataaggttttaattgtggacgaagcatacgccgctttcggcgcggaatccgcagttccttttatcaataagtacggcaacattctcaccgtccatacgctttcaaagtccgcgtctcttgccggtttacgcggtggttttgcaatcggaaacagcgagttgatcgaaaggctttgccgcataagggacagctttaattcttatactgttgacaggcttgccctggtcggtgcggaagcggcagtttccgattctgctttatacgatgaaattacccgccgtgtatag

SEQ ID NO: 52352 - protein, 276 aa, Unknown
  Obtained from environmental sample
  DOMAIN (24)...(276): Aminotransferase class I and II
  misc_feature (1)..(276): Xaa is any amino acid
MSKYWNSRIKNISPYVPGEQPRDRKFIKLNTNENPYPPSPKVIKTLQEAVNERLRLYPDPQCTELREAIARRYGVKSEQVFAGNGSDEILAFAFAAFFESSGGNQNKPILFPDITYSFYPVYANLWDIPYRPVPVREDFSIKTADYKIPSSGVVFPNPNAPTGIPLSLSEVFSLAEYLGKLDKVLIVDEAYAAFGAESAVPFINKYGNILTVHTLSKSASLAGLRGGFAIGNSELIERLCRIRDSFNSYTVDRLALVGAEAAVSDSALYDEITRRV

SEQ ID NO: 52353 - DNA, 462 bp, Unknown
  Obtained from environmental sample
  misc_feature (1)..(462): n is a, c, g, or t
gtggaaaagggagcattacagggacgggccgcatggcagggcggcaaccagtgcgcgagcctgcacaaaaggttttcgctgccccaaggaaaagaggcaaggctttgtttcatgctcggcgagggaaaccgcgaagcgggtttggccatacgcaaacagtttgcctcggctcatgcgcgtgacgcggctcttgccgcccttgccgcgtactggcgggggaagcagtcccgtctgcgggtaaatacgcctaacgtcaacatgaataccatgatcaatatctggactctgtaccagagcgagatcaatgtgatgttttcccggttcgccagttttatcgaaacaggcgggcgcaccggactgggctatcgcgatacctcgcaggatgcgatgtgcgttgttcactgcaatccgcagaaatgccgccagcggcttgtccagctcttaaaagctctggtaagctaa

SEQ ID NO: 52354 - protein, 153 aa, Unknown
  Obtained from environmental sample
  misc_feature (1)..(153): Xaa is any amino acid
MEKGALQGRAAWQGGNQCASLHKRFSLPQGKEARLCFMLGEGNREAGLAIRKQFASAHARDAALAALAAYWRGKQSRLRVNTPNVNMNTMINIWTLYQSEINVMFSRFASFIETGGRTGLGYRDTSQDAMCVVHCNPQKCRQRLVQLLKALVS

SEQ ID NO: 52355 - DNA, 912 bp, Unknown
  Obtained from environmental sample
  misc_feature (1)..(912): n is a, c, g, or t
atgagatacggttattttgacaatgaaaaaaacgaatatgtgattgagaatgtcgatactcccatgagctggacaaattacatcggcactgagaacatggtgggcgtattcaaccagacctgcggtggctacctgttttacaagagcgcggaacatcaccgtataacccgtttcaggggaaacgccgtgccgactgaccgccccggccattacgtatatttacgtgatgacgaaacaggcgattactggacaataagctggcagccgacggcgaaacccgttagctgttacagggccaggcacggcctttcctattctgtgtattcatgcgagtacgccggtatttacgcggagcaaaccctgtttatcccaaggggcgcggatgtggagctgtgggatgttaaaatcgaaaaccgttccggcaggccgcggaagataagcgtgttttcttacgccgagcttagctggcatgagattgacggagacaataaaaattttcaatgcacgctgtactgcgccggcgcctcgtataaggacggcgttatcgaacaggagctccattacgagcaaaacggttatcaattttttaccgccgattttgactctgacggttttgagattgagcgcgagcgctttaccggcgtctggcaagcgagagcaatcccgaagcggtggaaaagggagcattacagggacgggccgcatggcagggcggcaaccagtgcgcgagcctgcacaaaaggttttcgctgccccaaggaaaagaggcaaggctttgtttcatgctcggcgagggaaaccgcgaagcgggtttggccatacgcaaacagtttgcctcggctcatgcgcgtgacgcggctcttgccgcccttgccgcgtactggcgggggaagcagtcccgtctgcgggtaa

SEQ ID NO: 52356 - protein, 303 aa, Unknown
  Obtained from environmental sample
  DOMAIN (1)...(63): Putative carbohydrate binding domain
  misc_feature (1)..(303): Xaa is any amino acid
MRYGYFDNEKNEYVIENVDTPMSWTNYIGTENMVGVFNQTCGGYLFYKSAEHHRITRFRGNAVPTDRPGHYVYLRDDETGDYWTISWQPTAKPVSCYRARHGLSYSVYSCEYAGIYAEQTLFIPRGADVELWDVKIENRSGRPRKISVFSYAELSWHEIDGDNKNFQCTLYCAGASYKDGVIEQELHYEQNGYQFFTADFDSDGFEIERERFTGVWQARAIPKRWKREHYRDGPHGRAATSARACTKGFRCPKEKRQGFVSCSARETAKRVWPYANSLPRLMRVTRLLPPLPRTGGGSSPVCG

SEQ ID NO: 52357 - DNA, 405 bp, Unknown
  Obtained from environmental sample
  misc_feature (1)..(405): n is a, c, g, or t
atggacagaggcattgggtctatcctgttgaatttttcagtggcagtctaccttatagccacaggaattttaggcattactagaaatgccaagagtgaaatccaaatagcggtaacttccctttttaaaggcgatttcgccaacgtacttatatatggcttggcagtcattgccatcgcggcgggggttttcatccttatcaaattcttcggtgtttctattggaattaccgagaacttactgctcattctggcagtcacctgggttgttttcgtaatatttgtagacattatccctgctcttaacggcattaagaaaatcgactggatattactcctcgccattggttctcatgtcatggtattgtctggaataatgctgtcgacagagcgtttcgggggctga

SEQ ID NO: 52358 - protein, 134 aa, Unknown
  Obtained from environmental sample
  misc_feature (1)..(134): Xaa is any amino acid
MDRGIGSILLNFSVAVYLIATGILGITRNAKSEIQIAVTSLFKGDFANVLIYGLAVIAIAAGVFILIKFFGVSIGITENLLLILAVTWVVFVIFVDIIPALNGIKKIDWILLLAIGSHVMVLSGIMLSTERFGG

SEQ ID NO: 52359 - DNA, 957 bp, Unknown
  Obtained from environmental sample
  misc_feature (1)..(957): n is a, c, g, or t
gtgataaccgcgtccccggcgggacaggggccgccaggcatgttccgcctttcttttgcgatgcgcatacattcctcaagcagttccggcccggcagcatggtgtatggccccgtcaactccgccgccccccatgaggcttgaattggcggcgtttacgatggcgtcaacttgcatgcgggtaatgtcaccttttagcaattctatcttttcatttttcattattggcattataacatatgaagaggtttatatgaaaagagcaatcgtaaaagcaattatcctgattcttgttcttgtactggcaggatgcgaagcggcgacccagctgccaccatcgaatacacaaaaaaccggcccggtggtttgcctgggagacagccttacagagggttatggcgcttccaagccttctgaaatagataaatcaaaatcctatccggcatttcttgaaaagaaggtaacaattaaagtcataaattccggaattacaggcgataccgcttcgggcggattagccagagtggatgaagacgttttggcccacgatccgcagctagtaataatttcgctgggggcaaatgactttttacttccgaatttgagaccggcaagcgaaacaaaaaaagatttgcaagccattataaacaaggttaaaagcaaagatcggaaaatttatctggcaagttttataggggattccgcctgggaagcttcgtatctgagaatatttccaataatacctcccggcgttatggcgcttcttgaggactacaaaaaaatgtacgctgaactgtggtcagaaaacccgggcctggggcagattcaaaatatctggaaaggcataggagaaaaccagatgtccgacctaattcatccaaacgcggaagggtacggcataatggcaaacaacatccttgcggcagtaaagccctattggcggaaaataacctgttaa

SEQ ID NO: 52360 - protein, 318 aa, Unknown
  Obtained from environmental sample
  DOMAIN (121)...(305): GDSL-like Lipase/Acylhydrolase
  misc_feature (1)..(318): Xaa is any amino acid
MITASPAGQGPPGMFRLSFAMRIHSSSSSGPAAWCMAPSTPPPPMRLELAAFTMASTCMRVMSPFSNSIFSFFIIGIITYEEVYMKRAIVKAIILILVLVLAGCEAATQLPPSNTQKTGPVVCLGDSLTEGYGASKPSEIDKSKSYPAFLEKKVTIKVINSGITGDTASGGLARVDEDVLAHDPQLVIISLGANDFLLPNLRPASETKKDLQAIINKVKSKDRKIYLASFIGDSAWEASYLRIFPIIPPGVMALLEDYKKMYAELWSENPGLGQIQNIWKGIGENQMSDLIHPNAEGYGIMANNILAAVKPYWRKITC

SEQ ID NO: 52361 - DNA, 543 bp, Unknown
  Obtained from environmental sample
  misc_feature (1)..(543): n is a, c, g, or t
atgccaataatgaaaaatgaaaagatagaattgctaaaaggtgacattacccgcatgcaagttgacgccatcgtaaacgccgccaattcaagcctcatggggggcggcggagttgacggggccatacaccatgctgccgggccggaactgcttgaggaatgtatgcgcatcgcaaaagaaaggcggaacatgcctggcggcccctgtcccgccggggacgcggttatcaccggggcgggcaggcttccctgtaaaaaagtgattcacaccgtgggcccaatctggcatggcggcgcaagaggggaggcggcgcttctcgcttcgtgttaccgaaagagcatgatccttgctgaaggggctgggttaaaaagcattgctttcccaaacatcagcaccggaatttacggctacccgaaagacaaggcagctctagtcgcgtttgaagctgtacgcaaaaccctggacgaagcgccaggtattgaacgtgtaatctttgtttgttttgacgaagagaattttgatttatacaagaaaaatatgtga

SEQ ID NO: 52362 - protein, 180 aa, Unknown
  Obtained from environmental sample
  DOMAIN (25)...(146): Appr-1-p processing enzyme family
  misc_feature (1)..(180): Xaa is any amino acid
MPIMKNEKIELLKGDITRMQVDAIVNAANSSLMGGGGVDGAIHHAAGPELLEECMRIAKERRNMPGGPCPAGDAVITGAGRLPCKKVIHTVGPIWHGGARGEAALLASCYRKSMILAEGAGLKSIAFPNISTGIYGYPKDKAALVAFEAVRKTLDEAPGIERVIFVCFDEENFDLYKKNM

SEQ ID NO: 52363 - DNA, 945 bp, Unknown
  Obtained from environmental sample
  misc_feature (1)..(945): n is a, c, g, or t
ttgcaatcatggctggccaaaaagctgggaagcccctttaccgcgtccgtacctttggggcctcccggcggcgcgccctttaagtcgccctacagtctggcggggataattaaaacgctgtatacattggaatacctgggcgtcttcctgctttttatcggagcctcaggccccgttatgcaaatttccgaaacggtatggctgaaccggggcgcggacattctttttgtccttgacacaagcccaagcatggcggcgattgacatggacggatcaaaccggtttaacgccgcgcgcaggctgttaaaggatttttccgaacgccggccttccgacggcataggcctaattgcggtgggtaatgacgcggctctgctgatcccgccgactactgaccgcgatatccttgcggcgcggctggaaaatttacacatcggcgaaatgggcaacggaaccgcccttggcatggggctcgcgatcgccgcttaccatctggaaaaatccaaagcgccgcgaagggcggcagtgcttataagcgacggcgaaaataacgcgggggcgattcatccggaaacggccgccgccatgctcaaggaagtaaacgcgtcgttatgggtaatcggcgtcggatcgggaggcgaagtccccatagattatgtcgatccctatacgcgtatgcgccgcaccggcctgattgactcccgctatgacagtgaggcgctcgcgcgcatagccgcctcgggcggcgggacgtggatacgggcgccctcggccgacgcctttgccgcggctttcgcccgcgttgacgatcaggaaatgctcgtccgccgctcaagctctgttatgcgaaaacgcccctttcatcagcccttcatccttgccgcccttgtcctggttgccgcgtcaagatttgtaaggcgtttcttcctgggggcatggctatga

SEQ ID NO: 52364 - protein, 314 aa, Unknown
  Obtained from environmental sample
  DOMAIN (73)...(265): von Willebrand factor type A domain
  misc_feature (1)..(314): Xaa is any amino acid
MQSWLAKKLGSPFTASVPLGPPGGAPFKSPYSLAGIIKTLYTLEYLGVFLLFIGASGPVMQISETVWLNRGADILFVLDTSPSMAAIDMDGSNRFNAARRLLKDFSERRPSDGIGLIAVGNDAALLIPPTTDRDILAARLENLHIGEMGNGTALGMGLAIAAYHLEKSKAPRRAAVLISDGENNAGAIHPETAAAMLKEVNASLWVIGVGSGGEVPIDYVDPYTRMRRTGLIDSRYDSEALARIAASGGGTWIRAPSADAFAAAFARVDDQEMLVRRSSSVMRKRPFHQPFILAALVLVAASRFVRRFFLGAWL

SEQ ID NO: 52365 - DNA, 996 bp, Unknown
  Obtained from environmental sample
  misc_feature (1)..(996): n is a, c, g, or t
atggctatgaacgaaaactttatttttgacaggccctggattttaatctgccttatttttattttccctcttgtcctgtcaaattatctctcacctctcataaaaaggatccgcgccaaactgccccaccccttgaggataaagtttttcgcgtcgcggttttttttctgtctttttctctgttttctgataaccgccgccgccggcccccgctggggcattggacaggcgagaaacgagtacagacgcgccgtggacgttgtgttcgctattgatgtttccaaaagcatgcttgtatatgacggcaaggccagcggcctccttgccgacggcgccgcggaaagcgttacgcgcttgaaacaggggacgtcaattgtgagggaagccgtcgccgctcttcccatgcgttttgccgtcgctgtcagccggaacaggggcattgtagcaataccattaacatgggacgacggcgcggtgcttgcttttctggaaaccattgacggttcatcgctgacaggaagggggacgaaccttgaatcgcttttggaagccggggcaagcgcgttccagccttccagcccttcaaacagggtgatccttcttgtttcagacggcgaggcgctgacgggctcgataaaaaacgccctttcgcgctgcagccgcaacggcataattgtcacttcaatactgacaggcagtgatgaaggagcgcctgtcccagtcgggcctcttccaggcagtgaagatattatcagccgcagggacgccgcgaccatgcggatggccgcaggacaaacgggcggcattttcattgacgcgaaccgcgaagacgcggccgatgttttgatcaattatcttcgttccctggccgtggaaacagaaagccctgtaagcaatgaaataaaaaaagaacgctggtttgtatttttgttgttagccatagcggcttatggcctgtcgaaattgtctctattgaatatcgggagcaagacatga

SEQ ID NO: 52366 - protein, 331 aa, Unknown
  Obtained from environmental sample
  misc_feature (1)..(331): Xaa is any amino acid
MAMNENFIFDRPWILICLIFIFPLVLSNYLSPLIKRIRAKLPHPLRIKFFASRFFFCLFLCFLITAAAGPRWGIGQARNEYRRAVDVVFAIDVSKSMLVYDGKASGLLADGAAESVTRLKQGTSIVREAVAALPMRFAVAVSRNRGIVAIPLTWDDGAVLAFLETIDGSSLTGRGTNLESLLEAGASAFQPSSPSNRVILLVSDGEALTGSIKNALSRCSRNGIIVTSILTGSDEGAPVPVGPLPGSEDIISRRDAATMRMAAGQTGGIFIDANREDAADVLINYLRSLAVETESPVSNEIKKERWFVFLLLAIAAYGLSKLSLLNIGSKT

SEQ ID NO: 52367 - DNA, 456 bp, Unknown
  Obtained from environmental sample
  misc_feature (1)..(456): n is a, c, g, or t
atgactgtatcaagagaaaacggccgcgttacaaataatttccccgatgtcaggcggcaggctgcaaagtacttagggcagatgggtacgccggaagctcaaagatcgcttatggacattacgcggatggagaacgagcctatggttcttcaggaagcgataaaatccttaggcgacataggcattaacgacaacaatgaaacagtcgcgcatatcgcgtggattgtcagaaaatttgacaacttaaatcccgacaaccttatggcaatcgccacgattgacgcttttgaaaaaatcgccaagaaaaacaacggcattaactcacccgaggcaatccagcttcttgttcgcatttccgagggcaattacgttaccccggttaaggaaagggcaaaacaattattggcggacttgcgttcatatggtgaacccggcagcagaaccaaagatcgataa

SEQ ID NO: 52368 - protein, 151 aa, Unknown
  Obtained from environmental sample
  misc_feature (1)..(151): Xaa is any amino acid
MTVSRENGRVTNNFPDVRRQAAKYLGQMGTPEAQRSLMDITRMENEPMVLQEAIKSLGDIGINDNNETVAHIAWIVRKFDNLNPDNLMAIATIDAFEKIAKKNNGINSPEAIQLLVRISEGNYVTPVKERAKQLLADLRSYGEPGSRTKDR

SEQ ID NO: 52369 - DNA, 858 bp, Unknown
  Obtained from environmental sample
  misc_feature (1)..(858): n is a, c, g, or t
atgatttttgattttctgtttctaaaacggaaaaaagtctttgctcttgtcggagaaagcggcacaggtaaaagttttcgcgcaaaactagttgctcaaaaatacggaatagatttgattatagacgacggtctcttaataaaggataaccgcattctggcgggacattccgctaaaaaagaagtttcctttcttacggcggtaaaggtcgccttattcgacgataaagcgcacagggacgaagtggcgcgcaggctccagaacgaaaaattcaaacgtattctggttttgggtacttccgaaaaaatggtaaaaaaaatcgccgcgcgccttcagcttaaccctccgtcaaaaataattaaaattgaggatatcgcgagtcaggaagaaatagacaaagccataaggacaaggcggattgagggcaagcatgttatccctgtcccgtccatcgaaataaaaagaaattaccccggcattttttacgaagcgataaaaattttcaaaaaacgcataactcccgcgggtttaggccccgtgccgaccatgcacgaaaaatcggtagtaaggccggagtattcaaagcgcggcaaagtaataatttccgaatccgcgttaagccagatggtaatccactgcgtagacgagtacaacaaagaaatcaaaattaaaaagattttagttaaagacgacaaaatgggctaccgcttagtcataacgatagacgtcccctacggcacccaacttggcggaaacatccacaatctccagcagtacataatcgaaaacatcgaacgctatacgggaattttgattgaggaagttaatatcattattgataaaattactgagcaataa

SEQ ID NO: 52370 - protein, 285 aa, Unknown
  Obtained from environmental sample
  misc_feature (1)..(285): Xaa is any amino acid
MIFDFLFLKRKKVFALVGESGTGKSFRAKLVAQKYGIDLIIDDGLLIKDNRILAGHSAKKEVSFLTAVKVALFDDKAHRDEVARRLQNEKFKRILVLGTSEKMVKKIAARLQLNPPSKIIKIEDIASQEEIDKAIRTRRIEGKHVIPVPSIEIKRNYPGIFYEAIKIFKKRITPAGLGPVPTMHEKSVVRPEYSKRGKVIISESALSQMVIHCVDEYNKEIKIKKILVKDDKMGYRLVITIDVPYGTQLGGNIHNLQQYIIENIERYTGILIEEVNIIIDKITEQ

SEQ ID NO: 52371 - DNA, 846 bp, Unknown
  Obtained from environmental sample
  misc_feature (1)..(846): n is a, c, g, or t
gtggacacctgtcttggctccttaaaagaaagaggaattcttcccgatcttgttgttattctggaaagccagcactggaatctgcgcgattttaccggctgttataattggcaggttcctttcgcggttgatttttccgctctgcctcaatcggctcttatgcttgcgggagaaggctttttatttatgacgccatggacgcccttgcaaatctttgaaaggctgaaaaacgcgcaaatgcttcccgccgtccttcctcctctcggctccgttggccttaccgcggttggattgtcccggcggcttacaacaggaaatataatctgcgccggccttgatttttcttttacccccgacaagttccacgcacgcggcacgccggggcatcgcgctctgttaaattcgcagacccgttttcgttcaatttacaattatgccgcttacggtcagtcttcggtcgccgccgtttcaaagacaaggcttcctgtttacactaatcctgccttaaaaaattaccgcgctttgtttgaacaggagtttggcggcgattcgcgcgtttttgacattgagggaattggtctgccgttgggggttaaaacgctttctcttgatggtgcgatggatttattggttaacctgaccactaaaaatactaacaaccaaaaacattctaaaaattccattggtatttttggtggtcaggcacaatacatcacacaaagatcacaaagggacacaaagaacacaaagctcttgtccgaaagattttctttaatccttaattattatcttttaaacgagaatcatgaaagaaatttaataatccttcgaacgacaactttgtga

SEQ ID NO: 52372 - protein, 281 aa, Unknown
  Obtained from environmental sample
  misc_feature (1)..(281): Xaa is any amino acid
MDTCLGSLKERGILPDLVVILESQHWNLRDFTGCYNWQVPFAVDFSALPQSALMLAGEGFLFMTPWTPLQIFERLKNAQMLPAVLPPLGSVGLTAVGLSRRLTTGNIICAGLDFSFTPDKFHARGTPGHRALLNSQTRFRSIYNYAAYGQSSVAAVSKTRLPVYTNPALKNYRALFEQEFGGDSRVFDIEGIGLPLGVKTLSLDGAMDLLVNLTTKNTNNQKHSKNSIGIFGGQAQYITQRSQRDTKNTKLLSERFSLILNYYLLNENHERNLIILRTTTL

SEQ ID NO: 52373 - DNA, 867 bp, Unknown
  Obtained from environmental sample
  misc_feature (1)..(867): n is a, c, g, or t
gtgcttttgggccatgcgccgactccgcaaatggttgaaacttccgtctcaaccgccgcaagcgtttcgcagtttgccatattggtcattttcctaaaagcgttcagcgcgggctgcactgcgctgacgggaatagagggcatatccaacggggtgtcggcgtttaaagagccaagggcccaaaacgcttcaaaggttatgacttggatgctgataatgctggccacgatgttcatgggcgtcacgctgctggccaacaagttcaatttggtctataagcacggcggcgatccaaaggtaatcgcagagacgcttctctcgatgctggccaaggctatttatggcgacgtcgaaacaggtttttccaagatactgtacttggccaccatgagctttacgttcttagtgctaattgttgcggccaattcttcctttgctggttttccaaggctggcagctatgatttcgagaaacaggtacctgccaaaacagttttccacccaaggggacaggctggtgttcagcaatggcatcatcatccttgccatagtcagcagttttttggtgtggctgctgcacgccaatacagatctgctgctgcccctatacgctatgggcgtttttatagggttcaccatcagccaggccagcatggtgatgcactggcggaagtggagggggtcagaaaaaaaatggctgataaaggccgccatcaatggcgttggcgcgatgacgacgggagtggtgcttgtggtcatcgtattcaacaaattcaaggcgcctgaccacctgagcggcgtatggataatcatgctgataataccggcccctgatctggctgtttctgaaaatccactggcactatga

SEQ ID NO: 52374 - protein, 288 aa, Unknown
  Obtained from environmental sample
  misc_feature (1)..(288): Xaa is any amino acid
MLLGHAPTPQMVETSVSTAASVSQFAILVIFLKAFSAGCTALTGIEGISNGVSAFKEPRAQNASKVMTWMLIMLATMFMGVTLLANKFNLVYKHGGDPKVIAETLLSMLAKAIYGDVETGFSKILYLATMSFTFLVLIVAANSSFAGFPRLAAMISRNRYLPKQFSTQGDRLVFSNGIIILAIVSSFLVWLLHANTDLLLPLYAMGVFIGFTISQASMVMHWRKWRGSEKKWLIKAAINGVGAMTTGVVLVVIVFNKFKAPDHLSGVWIIMLIIPAPDLAVSENPLAL

SEQ ID NO: 52375 - DNA, 420 bp, Unknown
  Obtained from environmental sample
  misc_feature (1)..(420): n is a, c, g, or t
ttgtcagcacagaccaaaacattgcgggcagcgatatttccattggcgaatcattggagcaggacgtgccccaagacgcgctggacgagtttgagagggaggccatcattgataaagttaaagttctggctggctaggctctccgaaaaagagaggcgggtgctgcaactgcactacggcattggtgggggcgagccgatgcctttggacaaaataggtttcacattcgatccgccgctgaccagggaatccgtgagaaacatcgaaagacgggccattgcaaaaatccgcaaaaacaacagcgctcttggcgccctgcgcgactatctgtcggcgggccacgatggcagccgagagcctgcgggcggctacttgcactcaatggcgaagaccgctgcgccaaaagaggaagcgagatga

SEQ ID NO: 52376 - protein, 139 aa, Unknown
  Obtained from environmental sample
  DOMAIN (43)...(98): Sigma-70, region 4
  misc_feature (1)..(139): Xaa is any amino acid
MSAQTKTLRAAIFPLANHWSRTCPKTRWTSLRGRPSLIKLKFWLARLSEKERRVLQLHYGIGGGEPMPLDKIGFTFDPPLTRESVRNIERRAIAKIRKNNSALGALRDYLSAGHDGSREPAGGYLHSMAKTAAPKEEAR

SEQ ID NO: 52377 - DNA, 1941 bp, Unknown
  Obtained from environmental sample
  misc_feature (1)..(1941): n is a, c, g, or t
gtggctaaagcgccggccgccagtgcgcctactggcgctcaagcgtcagccggcagccggcttagcgaagacgagttacaggagctaagagagtcagtagacggcgggattccgatctttcaggtatcggttaaatttgatgaaaaaagcctgatgaacaccgtagggggcatccaggtttatgccgccctaaagggaatatgtaccgttcttagaacgatacccgaatttgagagtctttacgaagataatttctacccaactgttgattatttcatcgcttccgccaaaacaccggatgaaatcaaaaaatatgttttgattcctgatgtgtcgcttggtgcggatattattgatgttaccaagccgggaatggcaaaagtggtatcctccgttcaagcgcccccaagaccggcagtaagcgcgccacagcaaccaaaaccgggggccgcgcctcaagctgccgccgcgccagccgctcaagcggcaacaaaaccggccgcagcaggaggcagcagcgcttcggaagacgccaaaaaggccggaaaagaggccggttccatactcagggtggattccaaacgtatcgacgaccttcttaacctggtttcggagacggttattacaaaagctacctttaaccagataaatatgcagtttggggaaatccaaaatcagttgcacactctggaagggcaataccgcgaaaaaataaaggatctctttgactctctgcccgaatacctgggaggtatacaggatggtaaatctgtcaaagatatccgtaaagagatcaacgagcattacggagacattttttcgctctttgacggttttgaggcttctttcaaaaacaacatgggaaaattccgttccacggcgcagaaccttggacggattaccggggaattgcaggaaggcgtcatgcgtatccgcatggttccaatcagccagattttcagccgtttccccaggcttgtgcgcgatctttcaaaatcgctcaataaaaaaatcaacctggtcatcgaaggtgaagagaccgaactggacaagtcggtcatagaagaccttcttgacccgatcatgcactcggtcagaaactccattgaccacggcattgagtcccaggaagagcgccgcgccgccggcaaacccgaagaaggcagggtgcttctgaaagccaccaacgaaggcaacatgatcgtcattgaaataggcgacgacggcaagggtatcgacgtagaagcggttaaggccaaagccgttgaacgcggcttaatcagccccaacaaactgcttaccgacccggaagccttcaacctgatctttgaacccggcttctctaccgccaaacagattaccgccatttcgggccgcggcgtaggtcttgacgttgtgcgccggcagatcgacaaactcaacggtacggtcactgtcacttccgaacacggtaaagggaccaagttcattattaaactgccccttaccctggcgattatccagggactgctggtacgcgtcggcccggagatttattcaatccccatcaccagcgttatagaaagcctcagggtaaaaccgtcggagatcaaaaaaatcgacaattacgaggttttcaacctccgcagtgatgttatatccctgctccgcctcaaccggcttttcggcatcaaaaccgatgaaagacaggattacaacttcattgtcattgtcggcacggccgaaaagaaaatgggctttatggtggacagcctaatcggcgaggaagacgtggttatcaagcccttaagggatcaatttaccaattcacccggaattgccggggcttctatattgggagacggttcggtttcactcataatagacgtcagccagcttctggaattgggactgaaaaaggaaatggagcagcgtcaaatccgcgaagcttcaatacggtag

SEQ ID NO: 52378 - protein, 646 aa, Unknown
  Obtained from environmental sample
  SIGNAL (1)...(15)
  DOMAIN (186)...(311): Signal transducing histidine kinase, homodimeric domain
  misc_feature (1)..(646): Xaa is any amino acid
MAKAPAASAPTGAQASAGSRLSEDELQELRESVDGGIPIFQVSVKFDEKSLMNTVGGIQVYAALKGICTVLRTIPEFESLYEDNFYPTVDYFIASAKTPDEIKKYVLIPDVSLGADIIDVTKPGMAKVVSSVQAPPRPAVSAPQQPKPGAAPQAAAAPAAQAATKPAAAGGSSASEDAKKAGKEAGSILRVDSKRIDDLLNLVSETVITKATFNQINMQFGEIQNQLHTLEGQYREKIKDLFDSLPEYLGGIQDGKSVKDIRKEINEHYGDIFSLFDGFEASFKNNMGKFRSTAQNLGRITGELQEGVMRIRMVPISQIFSRFPRLVRDLSKSLNKKINLVIEGEETELDKSVIEDLLDPIMHSVRNSIDHGIESQEERRAAGKPEEGRVLLKATNEGNMIVIEIGDDGKGIDVEAVKAKAVERGLISPNKLLTDPEAFNLIFEPGFSTAKQITAISGRGVGLDVVRRQIDKLNGTVTVTSEHGKGTKFIIKLPLTLAIIQGLLVRVGPEIYSIPITSVIESLRVKPSEIKKIDNYEVFNLRSDVISLLRLNRLFGIKTDERQDYNFIVIVGTAEKKMGFMVDSLIGEEDVVIKPLRDQFTNSPGIAGASILGDGSVSLIIDVSQLLELGLKKEMEQRQIREASIR

SEQ ID NO: 52379 - DNA, 666 bp, Unknown
  Obtained from environmental sample
  misc_feature (1)..(666): n is a, c, g, or t
atgaacttggtccctttaccgtgttcggaagtgacagtgaccgtaccgttgagtttgtcgatctgccggcgcacaacgtcaagacctacgccgcggcccgaaatggcggtaatctgtttggcggtagagaagccgggttcaaagatcaggttgaaggcttccgggtcggtaagcagtttgttggggctgattaagccgcgttcaacggctttggccttaaccgcttctacgtcgatacccttgccgtcgtcgcctatttcaatgacgatcatgttgccttcgttggtggctttcagaagcaccctgccttcttcgggtttgccggcggcgcggcgctcttcctgggactcaatgccgtggtcaatggagtttctgaccgagtgcatgatcgggtcaagaaggtcttctatgaccgacttgtccagttcggtctcttcaccttcgatgaccaggttgatttttttattgagcgattttgaaagatcgcgcacaagcctggggaaacggctgaaaatctggctgattggaaccatgcggatacgcatgacgccttcctgcaattccccggtaatccgtccaaggttctgcgccgtggaacggaattttcccatgttgtttttgaaagaagcctcaaaaccgtcaaagagcgaaaaaatgtctccgtaa

SEQ ID NO: 52380 - protein, 221 aa, Unknown
  Obtained from environmental sample
  misc_feature (1)..(221): Xaa is any amino acid
MNLVPLPCSEVTVTVPLSLSICRRTTSRPTPRPEMAVICLAVEKPGSKIRLKASGSVSSLLGLIKPRSTALALTASTSIPLPSSPISMTIMLPSLVAFRSTLPSSGLPAARRSSWDSMPWSMEFLTECMIGSRRSSMTDLSSSVSSPSMTRLIFLLSDFERSRTSLGKRLKIWLIGTMRIRMTPSCNSPVIRPRFCAVERNFPMLFLKEASKPSKSEKMSP

SEQ ID NO: 52381 - DNA, 657 bp, Unknown
  Obtained from environmental sample
  misc_feature (1)..(657): n is a, c, g, or t
gtgctattcttgaaacgcttgaacactgtccctgcgggaacggatgcccttcctgtgtgggggcgggcgaacataaagccgccactgcggagtttctgcgcgcttgttcgccatgaaagagcggacattgggggggataaaatggcgtcgaatatgagggacagactaaggcgcatacaggaaataaaaaaaaatgaagcttccggaacggaaatcattcgtaaaacagacgatgaatcatcacaatttgaaaatcttggctggcaggcctgcggttttcagacgttccgacgggttgttgttgctgatacgccgattgggatgcatacctgcctgccacaggcgctgacggttcttgttcctgaccttagacgcataacacttcaaaaaagtatgcccgaacccggagattttattttcttcgatttggaaacaaccggcctttccggcggcgcgggaacaatagcgtttcttgccgctttcgggcaggtggtttctgaggataaactgcgcattacgcaatatttgttgctggactatcccggagagagtgacttccttgaagccgtcctcgcggaattcgcaaataccaattccgtgattgtcacctataacggcaaatgtttcgattcccagatactaaaaacccgtgtctga

SEQ ID NO: 52382 - protein, 218 aa, Unknown
  Obtained from environmental sample
  misc_feature (1)..(218): Xaa is any amino acid
MLFLKRLNTVPAGTDALPVWGRANIKPPLRSFCALVRHERADIGGDKMASNMRDRLRRIQEIKKNEASGTEIIRKTDDESSQFENLGWQACGFQTFRRVVVADTPIGMHTCLPQALTVLVPDLRRITLQKSMPEPGDFIFFDLETTGLSGGAGTIAFLAAFGQVVSEDKLRITQYLLLDYPGESDFLEAVLAEFANTNSVIVTYNGKCFDSQILKTRV

SEQ ID NO: 52383 - DNA, 450 bp, Unknown
  Obtained from environmental sample
  misc_feature (1)..(450): n is a, c, g, or t
atgctcagcgcggaaattgcgcgggctgttctggacagttgcgatcaatatgatattcctgtggcgttggcttttgcgttatgctgggaagaaagcagatttaacccaaacgcgataaacaggaaaaaccgcaacggaagcgtggatcgcggtttatttcaattaaacagcaaatcttttccttatcttgatattatgtctttttacgatattaataccaacgccaattacggagtcggccatttgcggtactgcatgaattcaggcggcagtgaaatttccgctcttgcaatgtacaatgccggcgccggaaggataagatcaacaggcgcgcccgaagtcactctcaattacacaagccgcattttggataaccgtagaagactggaaaaccgtttcttttcaagacttcttaaagaagaagaaaaacgactaaccgaagagaaataa

SEQ ID NO: 52384 - protein, 149 aa, Unknown
  Obtained from environmental sample
  DOMAIN (8)...(122): Transglycosylase SLT domain
  misc_feature (1)..(149): Xaa is any amino acid
MLSAEIARAVLDSCDQYDIPVALAFALCWEESRFNPNAINRKNRNGSVDRGLFQLNSKSFPYLDIMSFYDINTNANYGVGHLRYCMNSGGSEISALAMYNAGAGRIRSTGAPEVTLNYTSRILDNRRRLENRFFSRLLKEEEKRLTEEK

SEQ ID NO: 52385 - DNA, 1176 bp, Unknown
  Obtained from environmental sample
  misc_feature (1)..(1176): n is a, c, g, or t
atgaacgagcctcattatggctttatcgggcagaaggatcttaacattgcggaagatccaatgataccggttggcattcgccccagtccatggcagacaatcctcgccgcgtcaggttgtcagatagaagtgcccgtgtacggcattatgtccatgggtaaacgtattctgcgctatgaaacattcaacgccgaaaaaatttcgctgttcaaggaaggtttttcctgcccgtggaaacaggcgggagtttgggataacggcggtgcgccgaaacttcttaaaagtaattactttagcctgtaccaaaaccgtcccgccgtttttaccgatgattttctaaaacccttcatcataaaatacataaacgctatgaaagaggcaaatgagcaaaactctttctttatagagggtcccccttttagcacaaaagcggaatctcatccgtcatggaataaagcggacccggataaagtaataaacgcgtttcactggtacgacggattctctctttttacaaaaagttttcggtcatggttcaatttaaatcccgatacaaaaaaaataattatcggaaaaaaaaatgtaaaagagtatttcaggaaatgtcttgcaaagggaatcgaaataacaaaagaaaaaatgggaaatgtgccgtgttttcttggagagttcggccttgcttttgacttaaacaaccgcaatggttttaagaaaggcgattattctttgcatgaacaggcgctgtccatgtattacgacgcggtagacgcaattcttcttcactcgacatctgggatttattcggcgagcaacacaaataaatacggcgacagttggaacgacgaagacctttcaatattttcagaaaacagcgaacgcgccgcctccggctggaaacgcccctatccaatggctaccgcaggaaagccgctttttttcagttggaataaaaaacgaaaaaaaatagttttctattttaccgcggaaagcctcattaaagcgccaaccataattttcctgcctgagtacctattcccaacagagccaaaaatagaaatcgtcacaccaacaggggcggctcttaagtgggaactaaaccgtgaagagcaaaaactgcttatctacaacggcgattacaatggtgaagcactggttaaaataaaaaatatcaaataa

SEQ ID NO: 52386 - protein, 391 aa, Unknown
  Obtained from environmental sample
  misc_feature (1)..(391): Xaa is any amino acid
MNEPHYGFIGQKDLNIAEDPMIPVGIRPSPWQTILAASGCQIEVPVYGIMSMGKRILRYETFNAEKISLFKEGFSCPWKQAGVWDNGGAPKLLKSNYFSLYQNRPAVFTDDFLKPFIIKYINAMKEANEQNSFFIEGPPFSTKAESHPSWNKADPDKVINAFHWYDGFSLFTKSFRSWFNLNPDTKKIIIGKKNVKEYFRKCLAKGIEITKEKMGNVPCFLGEFGLAFDLNNRNGFKKGDYSLHEQALSMYYDAVDAILLHSTSGIYSASNTNKYGDSWNDEDLSIFSENSERAASGWKRPYPMATAGKPLFFSWNKKRKKIVFYFTAESLIKAPTIIFLPEYLFPTEPKIEIVTPTGAALKWELNREEQKLLIYNGDYNGEALVKIKNIK

SEQ ID NO: 52387 - DNA, 309 bp, Unknown
  Obtained from environmental sample
  misc_feature (1)..(309): n is a, c, g, or t
atgaaaaatctcctcctcgccctcttcaccctagcatttgcaggcagtgtaatggcacaaaacaaaaacgaaaaagtaaccttttacgtgaactaccattgtgaaatgtgtattaaaaagatcaacaaaaacatccccttcgagaaaggcgttaaagacatcaaaaccgatctcaaaggcaaaagcattgtgattacctacaatcccaaacagaccgacacgagcaaacttcgcaaggctatcgagaagttggattttgtagtgaaagacagctacgaagaaattatgaaacacgaagccaaacactaa

SEQ ID NO: 52388 - protein, 102 aa, Unknown
  Obtained from environmental sample
  SIGNAL (1)...(19)
  misc_feature (1)..(102): Xaa is any amino acid
MKNLLLALFTLAFAGSVMAQNKNEKVTFYVNYHCEMCIKKINKNIPFEKGVKDIKTDLKGKSIVITYNPKQTDTSKLRKAIEKLDFVVKDSYEEIMKHEAKH

SEQ ID NO: 52389 - DNA, 399 bp, Unknown
  Obtained from environmental sample
  misc_feature (1)..(399): n is a, c, g, or t
atgttcaaaaaaattcctcacacatacgccatcatcttcggattgattgtatgtgcagcaattctaacgtggattgtgcctgcgggcgaatttaaccgtgcatcaaccgtaaccgaaagcggacgaacggtgaacgcaattgttcccgattcgtatcatacggttgatgcacaaccgcagacctggcaagtgttttcggcgtttttcaaaggttttcagaaagcgccgggcattattgccttcatcctaatccttggcggaacgttttggattatcaacgagagtaaggctatcgacatcggcgttcaagtgtttttgcaaaaaagcgaacggttgaaacgcttcaaatcatcaactttttgggcattcacaatatcatcattaccgcaatcatgttga

SEQ ID NO: 52390 - protein, 132 aa, Unknown
  Obtained from environmental sample
  SIGNAL (1)...(19)
  misc_feature (1)..(132): Xaa is any amino acid
MFKKIPHTYAIIFGLIVCAAILTWIVPAGEFNRASTVTESGRTVNAIVPDSYHTVDAQPQTWQVFSAFFKGFQKAPGIIAFILILGGTFWIINESKAIDIGVQVFLQKSERLKRFKSSTFWAFTISSLPQSC

SEQ ID NO: 52391 - DNA, 1251 bp, Unknown
  Obtained from environmental sample
  misc_feature (1)..(1251): n is a, c, g, or t
atgaggaagtttctgatattcctgttatttccggctttattggcggtttcatgtccttcatcgcctgtttcaaaacagggggggagtgtaaatctttcttatgtccccaagatcccggatactacaaataactatccgttggaacctatgagcggaaagacggcctttgaatattttcgggatgaaaaaatattgctgggctggaatgtcggaaattctctggacgcgttcaccaacgggcgggcgaacgaaaccggctggggtaaccccatgataaaccaggcgctgtttgacggggttaaaaaagccggttttgatcttgtccgcatcccggttacgtggatgggttacatcggcccggcgccggattatcatattaatgaagattaccttgaccgcgtggccgatgtggcgcagatggcccataaagccggcctcaaggctattatcaacctgcaccacgacggctcaactgaaagcgttaacaaggacaacggctggctttccattaacaaggcccgcgcgagcaaagaaggctacaacgaggtgacgcataaattcgcgcgggtttggaaacagatagcaacctattttaaaaattatggcgactggctgatctttgaaccgatgaacgaaatccatgacggcaggtggggcgaaggaagcgtgcagggtcaacaaactgacattataaacgactggaaccggtttttcacggaaattgtgcgagggaccggcgccaataacgcgactcgttatgtggttatccccggctactgtaccaagccccggcacacgctcgccaattatttttggctgcccccggacagcgcttctgaccggcaaattgtaacttttcactattacgatccttatgaatttggaatagcgggcacgcgctccgaatggggttcagcctcggacaaaagcagggtcagcagtgattttgccccctttaagacccagtatatcgacaaaaaaatcccggtgatcatcggtgaatgtggcgcggtgcggcagttgtatccggatgataaagcaaaagaagacaaggcgcggcagaacaggcttgattacctttcctgggtattcggcaaagccaaagaaaacggcctggttccaatttattgggacaacggggtttttagcggcaatggcgaaaaattcggcctttttgaccgcaatacaggccagccgaattcgccggaaagcgaagcctgcattaacgcgatgattaaagcggttaaatag

SEQ ID NO: 52392 - protein, 416 aa, Unknown
  Obtained from environmental sample
  SIGNAL (1)...(25)
  DOMAIN (71)...(387): Cellulase (glycosyl hydrolase family 5)
  misc_feature (1)..(416): Xaa is any amino acid
MRKFLIFLLFPALLAVSCPSSPVSKQGGSVNLSYVPKIPDTTNNYPLEPMSGKTAFEYFRDEKILLGWNVGNSLDAFTNGRANETGWGNPMINQALFDGVKKAGFDLVRIPVTWMGYIGPAPDYHINEDYLDRVADVAQMAHKAGLKAIINLHHDGSTESVNKDNGWLSINKARASKEGYNEVTHKFARVWKQIATYFKNYGDWLIFEPMNEIHDGRWGEGSVQGQQTDIINDWNRFFTEIVRGTGANNATRYVVIPGYCTKPRHTLANYFWLPPDSASDRQIVTFHYYDPYEFGIAGTRSEWGSASDKSRVSSDFAPFKTQYIDKKIPVIIGECGAVRQLYPDDKAKEDKARQNRLDYLSWVFGKAKENGLVPIYWDNGVFSGNGEKFGLFDRNTGQPNSPESEACINAMIKAVK

SEQ ID NO: 52393 - DNA, 672 bp, Unknown
  Obtained from environmental sample
  misc_feature (1)..(672): n is a, c, g, or t
atgggtatcgtcagggaaataataaatagactcatgtatcataaggcccgggttattaccgtggccgcgcttgccgttctcgtgatcgtgtatttcacggtcggcggatcggggccaaaggatttttccgcaaaataccgaggggcggatttaagcggggcttccgccggcctgtccggaagcatgccggtaagcggcggtgaaacagccgcttccattggcagaaccaacacctatacccgctacatggagcgttacgcgcatattcaacccgccgtttccgacattccgattgatattttttcctggaaatccgcagacgaagtttccacccttaatgattttgccggagaaaggcgggttattcggaccgaagaaacaggttttattgaatatcttgttcatgttgaaaaagccggaatgtacaatgtgtatcttgaatatcatcccctgccgtcgcggggtatcgctattgaacgttccttcaaaataaacggggaaaccccgttcttgggatccgaccggctgatgtttcagcgggtctggggggacgctgacgacgttcgaaaggataaccagggcaacgagatccgcccggcccangttgaaaaaccccggtgggaaaagtcttttttccatgattatttgggttacactaccgagcctttatga

SEQ ID NO: 52394 - protein, 223 aa, Unknown
  Obtained from environmental sample
  misc_feature (1)..(223): Xaa is any amino acid
MGIVREIINRLMYHKARVITVAALAVLVIVYFTVGGSGPKDFSAKYRGADLSGASAGLSGSMPVSGGETAASIGRTNTYTRYMERYAHIQPAVSDIPIDIFSWKSADEVSTLNDFAGERRVIRTEETGFIEYLVHVEKAGMYNVYLEYHPLPSRGIAIERSFKINGETPFLGSDRLMFQRVWGDADDVRKDNQGNEIRPAXVEKPRWEKSFFHDYLGYTTEPL

SEQ ID NO: 52395 - DNA, 1365 bp, Unknown
  Obtained from environmental sample
  misc_feature (1)..(1365): n is a, c, g, or t
ttgatcggcgggcgactgatccgactcggaaaactggcatggaatttcggccggaaacggcggagtatatcaatgggtatttaccgcatttccaaggttaaatggcctgttgtttacaagggcgtagaccccaataccgtttcctttgtgcctctccagtgggatgtcccgcttacaatgagagaaatccttaaacagcacccaaaaggcaaggaatacgcctttattcttgaaaatgaacctttacaccctctgctgacagattctcaggacttcattttctcttatccgcccattatcaactcaaacgacatcggcgctgtacaggttggcgacaatgaggtttttatcgagcttacaggcactgatatgcctacgcttacgcttgccgcctcaattgtagcctgcgaccttgcggacaacggttttactatcgagcctgtcgaggttgagtacgaatatgatacgcctttcggaagaaacgtgataaccccgtattattttcaggaacctgttttctgttctctggcgagagtggaaaaatttctgggcgaaaaattatccgccgatgaatgtgttaaggcccttgcacgaatgggcgtaaaagcggaaaaggcaaacgatgccgaatgcggacagtccggcaagggcgaaggcgtgcgcgcgtggccgcctgaataccgcaacgatttccttcatgccgccgatatcgccgaagatgtgatgattggccgctccctcgcttcgttcaaaccccagcgcccctccgatgccactgtcgggcggcttctgccgattactcttttcagcaggcagataaaagaaacctttatcgggcttggctatcaggaaatgatctataactacctcggttcgcgcaaagaccttgtagaaaatatgcgcgcaagcggaaacaagataatccgcatctttaacccgatgaccgaaaattatgaatatgtacgcgattctgtgcttgcctctcttatgtcgagtgagtccatctcggggcgttccgcgtaccctcacaaaatttttgaggtgggtaaaatagcacggcttaatgagtctgaaaactacaagagcgccacccgccagtacgcgggtttccttcacgccggaacggacgctaactttaacgctgcagcgggcgaactccaaacaatattttactatctttcacgcgaatatgaagtggaagaatcggacgatccacgctttatcccgggaagggcggctgctattctctgcagcggaaaggccatcggcgtatttggcgagatacacccggaagtgctggaaaactggggcgttaccgttccctgtactgcgggcgaaattgatctggatgcgcttctggactag

SEQ ID NO: 52396 - protein, 454 aa, Unknown
  Obtained from environmental sample
  DOMAIN (251)...(452): tRNA synthetases class II core domain (F)
  misc_feature (1)..(454): Xaa is any amino acid
MIGGRLIRLGKLAWNFGRKRRSISMGIYRISKVKWPVVYKGVDPNTVSFVPLQWDVPLTMREILKQHPKGKEYAFILENEPLHPLLTDSQDFIFSYPPIINSNDIGAVQVGDNEVFIELTGTDMPTLTLAASIVACDLADNGFTIEPVEVEYEYDTPFGRNVITPYYFQEPVFCSLARVEKFLGEKLSADECVKALARMGVKAEKANDAECGQSGKGEGVRAWPPEYRNDFLHAADIAEDVMIGRSLASFKPQRPSDATVGRLLPITLFSRQIKETFIGLGYQEMIYNYLGSRKDLVENMRASGNKIIRIFNPMTENYEYVRDSVLASLMSSESISGRSAYPHKIFEVGKIARLNESENYKSATRQYAGFLHAGTDANFNAAAGELQTIFYYLSREYEVEESDDPRFIPGRAAAILCSGKAIGVFGEIHPEVLENWGVTVPCTAGEIDLDALLD

SEQ ID NO: 52397 - DNA, 831 bp, Unknown
  Obtained from environmental sample
  misc_feature (1)..(831): n is a, c, g, or t
ttgttaggcgtaataattttaacatctctgggaacttgggggcttcctcagatggtttccaaattctactcaattaaatccgaaaaaatgatatcaaaaggcgctattgtatcgacgtttttcggacttgttgtagccggcggctgttattttctggggagtttcggaaggttatatgaaaacgccggagtaaaaaacgcaagcggcgccgtaatatatgacgccattgtgcccgctatgctttctaatttttccgacttgttaatcggcatagttattgtattggtttttgccgcgtccatatccacgctttcttctcttgttcttgcttcctcctctacccttacgctcgattttttgaaaggccatgttattaaaaaaatgaacgagaaaagccagcttgttatcattcgcgcgttaatagtagtatttatcgtaattgcttcctttatagccattatccagtataaaggcggaatctcgtttattgcccagcttatgggaatttcatggggcgcgcttgccggctctttcctcgcccccttcctcttcggactgtattggaaacgcgtgacaaaaccggccgtctggtgcaactttattttcagcgtagcgcttatgacgcttaacatctttttcagacccaaattcccggctattttacagtcgccgataaacgccggcgcgtttacaatgcttgccggttttatcattgttccgttaataagcgtattgaccaaagagcccgaaagagtatctgttgaacattgtttcgcgtgttatgaagaaacggtaaaagtaaaagtacgcgacgatttgggagacaaataa

SEQ ID NO: 52398 - protein, 276 aa, Unknown
  Obtained from environmental sample
  misc_feature (1)..(276): Xaa is any amino acid
MLGVIILTSLGTWGLPQMVSKFYSIKSEKMISKGAIVSTFFGLVVAGGCYFLGSFGRLYENAGVKNASGAVIYDAIVPAMLSNFSDLLIGIVIVLVFAASISTLSSLVLASSSTLTLDFLKGHVIKKMNEKSQLVIIRALIVVFIVIASFIAIIQYKGGISFIAQLMGISWGALAGSFLAPFLFGLYWKRVTKPAVWCNFIFSVALMTLNIFFRPKFPAILQSPINAGAFTMLAGFIIVPLISVLTKEPERVSVEHCFACYEETVKVKVRDDLGDK

SEQ ID NO: 52399 - DNA, 1437 bp, Unknown
  Obtained from environmental sample
  misc_feature (1)..(1437): n is a, c, g, or t
atggaagcggcattaggcgtttccttcgcgggaaaacgcgctattgtcaccatgaagcacgttgggcttaatatcgcgtccgacccgtttataaacgccgctcttttgaaaataaagggcggtcttgtcgttgccgtcgcggatgaccccggaatgcacagttcccaaaatgagcaggattcccgtttttacgccaatttcgccatggttccctgtcttgagccgcgcagccagcaggaagcctacgacatggtacgcgaggcgtttgacgtatcggaacgttttaacgttcctgtgcttctgcgtcttgttacccgtctcgctcacgcgcgcgcgggagttgtaattgataagaaaaaaacgcagaataaattttctaaaaccaatgataagtccggctggcttctccttccggcctttgcgcgcaaaaatttcgccaaacttcttgacaaacagcctttatttgaagaatggacgtacaaacaccctgcaaacaaactgacaggcaaaaaaagcgatctaggcataatcacagcgggtctcggctgtaattattatgaggaaaaccttgatgattttatcgccatgcgcaaaaaacagggaaaaaagccgcatcttcatcttcatataggcgcgtatcccctgccctcaaaaaaaataaaacagttatgcgataacgtggaagagataattataattgaagaagggtataatttaatcgcaagaaaaattttcggcgttacaggcggcgcttttacaaatataaagacacttattcagtgcggagaacttgatcctgataatgtaagggccgcactgggacttgccccccggaaaagctctttaaaaattcccgccaaccttccccaaaggccgcctcagctttgtcagggctgccctcacgccgacagttacgagactatcaacaaagcggtgaacgatcttaacccgaacccgcagaaacccgacataggaattaactcagacataggctgttattcgctgggcgctaccccgccttattcggctatcgaaagcgttatctgcatgggcgcctgcataggcatggcgaagggcgcgtccgacgcgggactaaaacactctcttgccgttatcggtgattcaacttttatccattcagggataacgcctcttattgacgcggcggcggcggatactccaatgaccgttatcatattggacaattccaccgttgcgatgaccggctgccaaccgactattgtaccctccggcaacttagtgaacctcattctcggctgtggagtaaaacgcgaacatcttcttgaacttgaagcgaagaaacaactgctggaagaaaataccgctaaattaaaagctgaaatcgagcatcgcggtctttcggttgttattttcaagcgcgagtgtcttgaagcgttcagaaaaaacaaaaaataa

SEQ ID NO: 52400 - protein, 478 aa, Unknown
  Obtained from environmental sample
  DOMAIN (329)...(465): Thiamine pyrophosphate enzyme, C-terminal TPP binding domain
  misc_feature (1)..(478): Xaa is any amino acid
MEAALGVSFAGKRAIVTMKHVGLNIASDPFINAALLKIKGGLVVAVADDPGMHSSQNEQDSRFYANFAMVPCLEPRSQQEAYDMVREAFDVSERFNVPVLLRLVTRLAHARAGVVIDKKKTQNKFSKTNDKSGWLLLPAFARKNFAKLLDKQPLFEEWTYKHPANKLTGKKSDLGIITAGLGCNYYEENLDDFIAMRKKQGKKPHLHLHIGAYPLPSKKIKQLCDNVEEIIIIEEGYNLIARKIFGVTGGAFTNIKTLIQCGELDPDNVRAALGLAPRKSSLKIPANLPQRPPQLCQGCPHADSYETINKAVNDLNPNPQKPDIGINSDIGCYSLGATPPYSAIESVICMGACIGMAKGASDAGLKHSLAVIGDSTFIHSGITPLIDAAAADTPMTVIILDNSTVAMTGCQPTIVPSGNLVNLILGCGVKREHLLELEAKKQLLEENTAKLKAEIEHRGLSVVIFKRECLEAFRKNKK

SEQ ID NO: 52401 - DNA, 1374 bp, Unknown
  Obtained from environmental sample
  misc_feature (1)..(1374): n is a, c, g, or t
atggattttctgattcctggtttgatggcgatagtaggaatcgcgctgattgtatttttgtttatgatgtttctcaaccggacacggggaggtggcccgaaagccacaaaaggccgggatgcgatactaaaatccacaagaaaacgtctggatcaaaacccccgtgatcctcaggctctcgcggaactgggagacttatactacagggaagaagcctgggatcaggcgtacaaaacctacggaacgctagcggaacttggcgcccaggcgcccaatgaatttgaggccaatctgcgcttggggttgtcggccttaaaactgggactgactgaggatgcctataaagccctttatgtggccagaagcatgaatgcgactaattttgacgcggcctacaaccttggagttctggaatttcaaaagaaaaactatgaaaaagccatccagatccttaatcaggccagaattcaagatccggacaatgccgcttgcctcaggactctgggacacgcttatttcaggataaagaaaaacaaagaggctatgaccttcatccgtaaggccattgacctcgcgcctgacgacaaggaatccctctttaccctggctgaatgttactacgaggcaaaccagaccgagcaggccctgcgtattttcacccacttgaggggcgatccggccaatggagccagtgcctgccttacatgcggaattatcaacagcgaactccgccaatacgaaaaagcgattcaggattttgaagttggcctgcgccatgaaaatatcaagccggatgtaaaggttgatcttcgttaccggctggcccaatgttacataaaaaacaacgacatcgccaaagcccttcccttgttaagaagcattatggcggaaaacccgacctacaaagatgtcgcttcattaatagggaaataccaggaacttaacgccaataaaaaccttcagatttttcttatggccccttccggggattttgtcgccctatgcagaaaaatcgttataggctatttccccaaagcaaaggtaaaaatctccaatatttcggtcaacaaaaatgaatgggccgatattcttgccgaagttgacaccccaaaatggtctgacgtaattatgttccgttttatacgtacacagggttccattggggaacttatcgtcagggacttccattcccatctaaaagaagtgaaggccggaaagggcgtttgcgtcactgttgggggcttctccgaagaagcccggcgctacaccgaagccagattaattgacttgatagaaaaagataagttaacagccatacttaacaccgtagacgcgaaagttgaaaacattcagaaaacttctgcgaaacgctaa

SEQ ID NO: 52402 - protein, 457 aa, Unknown
  Obtained from environmental sample
  DOMAIN (338)...(438): Restriction endonuclease
  misc_feature (1)..(457): Xaa is any amino acid
MDFLIPGLMAIVGIALIVFLFMMFLNRTRGGGPKATKGRDAILKSTRKRLDQNPRDPQALAELGDLYYREEAWDQAYKTYGTLAELGAQAPNEFEANLRLGLSALKLGLTEDAYKALYVARSMNATNFDAAYNLGVLEFQKKNYEKAIQILNQARIQDPDNAACLRTLGHAYFRIKKNKEAMTFIRKAIDLAPDDKESLFTLAECYYEANQTEQALRIFTHLRGDPANGASACLTCGIINSELRQYEKAIQDFEVGLRHENIKPDVKVDLRYRLAQCYIKNNDIAKALPLLRSIMAENPTYKDVASLIGKYQELNANKNLQIFLMAPSGDFVALCRKIVIGYFPKAKVKISNISVNKNEWADILAEVDTPKWSDVIMFRFIRTQGSIGELIVRDFHSHLKEVKAGKGVCVTVGGFSEEARRYTEARLIDLIEKDKLTAILNTVDAKVENIQKTSAKR

SEQ ID NO: 52403 - DNA, 1227 bp, Unknown
  Obtained from environmental sample
  misc_feature (1)..(1227): n is a, c, g, or t
ttgaaaacattcagaaaacttctgcgaaacgctaaacgccattcaggcgcacggaaatcaatttcaaaaacaccctctaatcacgataataactgtatggataaaaccatcaggatcacggagtattttgcggatgttgagaccaccaaagaacacaacggctatttttgcagcgtgggggaggcgctgaccgtcgtgatactcggttctttgtgcggcctaagaaacgtcagccaaatcggccgatgggcagccaacgagagaatcaagggctttttagccgggcactttcgcatagaaagaataccgtgttactattggatgctgtgcctgctcgccctaattaagccaacgtctttaaaccaatgcctgaccagacgggtgcaatcgcttttgcctgacggaatgaaggcaatgaccatttcatttgacggcaaaacggtatgttccaccggaaagatggatgcgtacgacagccctctgcacattataagcgcgcaccttgcggaactggggataacccttgcggggcttaagacggacggaaagagcaacgagatacccgccgtgcgggaactgataggcatgcttgaggttgccggctgcgttatcgttgccgatgcgatgcattgccagaaggaaacggcggcgcttgttgtgggaaaacaggcggattaccttttaaacgtcaaagacaaccagcctgcgctgaaaaacgacatagaagagtacgtgcaggacggcggtttgagaaaaaccatggacactttcacgacatgcgagaaaaacggcgggaggattgagatacggagggggtttgtcacgcatgatattgactggctttacggcaaggacgaatggaaaaaccttgcgtgcattggggcaatacaccgacaattcacctacaaggacaaaacaaccgatgaatggcactgctacatttccagccgggaacttaaggcggaaagcctgttaaagcacgcccgtttagaatggtcggtagaatcgatgcattggctgttggatgtgcattttggagaggaccgctgccgtgtcgaaggcgaaagcgtgcagcaggtcttaaatgcggtacgcaaaatcgctataaacagcgttaagacctataaagcaaagaccggctcaaagctccctttgtcgaaaatcatgtttggctgtctgctggattgccagaagctggttcctgtcttgttgtcatgtgaaaattga

SEQ ID NO: 52404 - protein, 408 aa, Unknown
  Obtained from environmental sample
  DOMAIN (140)...(371): Transposase DDE domain
  misc_feature (1)..(408): Xaa is any amino acid
MKTFRKLLRNAKRHSGARKSISKTPSNHDNNCMDKTIRITEYFADVETTKEHNGYFCSVGEALTVVILGSLCGLRNVSQIGRWAANERIKGFLAGHFRIERIPCYYWMLCLLALIKPTSLNQCLTRRVQSLLPDGMKAMTISFDGKTVCSTGKMDAYDSPLHIISAHLAELGITLAGLKTDGKSNEIPAVRELIGMLEVAGCVIVADAMHCQKETAALVVGKQADYLLNVKDNQPALKNDIEEYVQDGGLRKTMDTFTTCEKNGGRIEIRRGFVTHDIDWLYGKDEWKNLACIGAIHRQFTYKDKTTDEWHCYISSRELKAESLLKHARLEWSVESMHWLLDVHFGEDRCRVEGESVQQVLNAVRKIAINSVKTYKAKTGSKLPLSKIMFGCLLDCQKLVPVLLSCEN

SEQ ID NO: 52405 - DNA, 885 bp, Unknown
  Obtained from environmental sample
  misc_feature (1)..(885): n is a, c, g, or t
atgaagcggaaattttcggacgcggttcgggggtgctttatactattgagtagacggaggctcttccgcgttgccgcgggcgcagcaaccctgtttgccgtcctctggctcgtcgctcggttttccccttaccctcagttaaagaaattccttgcccggccatacagcgtccgttactacgaccgcaacgggatattattgcagataacgccacttgcgggcggcatgcgccgcgaaataccgcaggccattccccggcagttgaaagatgtttttgtttttgccgaagaccgccgcttttattatcatattggcgttgacggcctcgccctgcttcgcgcggtttttcagaatatcactggcggcagaagaatcagcggagcgtctactataacaatgcagcttgcacgccttattgcggataacgcacagggaaccggacagcagggcggaaagaacggattgggacggaaaatcggcgaggtaattaacgccctgcgtctggaagcgcggttttcaaaaaatgaaattcttgagatgtatttaaattccctgcccttcggattcaggaccgaaggagcggcttccgccgcccggaatttcttttcaggcgatctttccatgctttccccggcgcagattttctgtctggcggttattccacggcggccgaacctgtacaacccgctggaaaaccccgaagcctgcgtcaaagcggcggcggatttgcaggccgctttttctaaaaataaaaaacttaaatccgcctggcccctgctggcggaaataaacagcgaagactgggaattcgccgcgtcatcggtccgccgtttcgcgtatcctttcgctctgccccacctgatacggcatattaacgctggttga

SEQ ID NO: 52406 - protein, 294 aa, Unknown
  Obtained from environmental sample
  DOMAIN (57)...(233): Transglycosylase
  misc_feature (1)..(294): Xaa is any amino acid
MKRKFSDAVRGCFILLSRRRLFRVAAGAATLFAVLWLVARFSPYPQLKKFLARPYSVRYYDRNGILLQITPLAGGMRREIPQAIPRQLKDVFVFAEDRRFYYHIGVDGLALLRAVFQNITGGRRISGASTITMQLARLIADNAQGTGQQGGKNGLGRKIGEVINALRLEARFSKNEILEMYLNSLPFGFRTEGAASAARNFFSGDLSMLSPAQIFCLAVIPRRPNLYNPLENPEACVKAAADLQAAFSKNKKLKSAWPLLAEINSEDWEFAASSVRRFAYPFALPHLIRHINAG

SEQ ID NO: 52407 - DNA, 570 bp, Unknown
  Obtained from environmental sample
  misc_feature (1)..(570): n is a, c, g, or t
ttgtctggccttccgagggacagcctacaatccctgaactttacccgcagaggcagggggaatatttactacaccgtttccctgcgttatgcgataccgtttgagcttcaaactttccgcgatgagggcatcggggtttttatgagcctgtacgatataaataccaacgaagaaatcaagggaaccgccctgcaaaatggaaagacctaccgcgccagggtaagagtgtcctcaaaccgggatcggacctatgttgccctgcgggttcctgttccttccggcgcggagattctggacgcgacgtttgttaccaccgcttcctacggagacaggggcggtacaagcgggaatgaacagatacggtcaagttcatggttaagcaaccagtttattctggacaacgagattcaatatttctgggatcattttaacaagggtgaatcaacggtaagtttccttttccgtacggcgaggaggggggtgtaccccacgccgccggttcaggcggagtgtatgtatgaagcggaaattttcggacgcggttcgggggtgctttatactattgagtag

SEQ ID NO: 52408 - protein, 189 aa, Unknown
  Obtained from environmental sample
  misc_feature (1)..(189): Xaa is any amino acid
MSGLPRDSLQSLNFTRRGRGNIYYTVSLRYAIPFELQTFRDEGIGVFMSLYDINTNEEIKGTALQNGKTYRARVRVSSNRDRTYVALRVPVPSGAEILDATFVTTASYGDRGGTSGNEQIRSSSWLSNQFILDNEIQYFWDHFNKGESTVSFLFRTARRGVYPTPPVQAECMYEAEIFGRGSGVLYTIE

SEQ ID NO: 52409 - DNA, 1761 bp, Unknown
  Obtained from environmental sample
  misc_feature (1)..(1761): n is a, c, g, or t
gtggaaagcaataaaaaaacctaccgtcccggcgaggaagttaccatgaccctgaccgcgaccaaggacggcaaacccctgcccaacgcggagctgaccctgatggcggtagaccggggcgtattggatcttatcaattaccatgtgcccgacccgatacagtatttttataatgaaagcctctttaagctcatggtggcgggcggcgattcccgttcttggctaatggacccggttacctacagcgtcaaagatctcgcgggcggcgacgcggagggcgacagcaaaattgaggaacgcaaggactttaaccccaccgccgtatttgagccgatgcttataaccgatgattcgggcaaggttacctgcaaattcaagctccctgacacccttaccacatatcgcgtaacggtctttggggtacggggggatatttttgcccttaaagaaaccgagattgccgcccaaaacaaaataaacgtgcgggaagttctgccccggcgcatgcgggaacgggataccgccgaagcgggggtgctaataaccaatcttgatacatcgtcccataccctgtccgtcaggcttgatataggccctcccctgcccaatgacgactcaagcggaataagaaaaattcccgggcaggcttttgttgacggagtttttgaacgccgcataacggtaaaaagcggcgagaacgccgtagtgtattttgacgtggcggcggtaaaggaagggaatgttacgcttaactttaccgtcaattcggctgttctaaatgaaaggctgatacgggaactggtgattgaacatccctatgttatggaaacggttaccactaccggagtcgtggacaaggattctgaaagcgaaggcgttgtcattccctcattcgccgataacggtgtgggcagcctctcggtgactctggacgccacgcgcctgagccttctggattctgctgttacctaccttttccgctatccttacggatgcatggaacagcgcagcgcggcgatcatgccgcttgttattttcggcgaataccttgacgccctgggcttaaggagcgaggtcgccaatccccggcaggtggtggaaaacgagctaaaatcatgggccaaggtacagctttcaagcggcggctttccctactggccgtccggcacgcgggccgatttctatgtcagcctgcgtatagcccatattatcgccatcgctaagtcaaaaaaaatgaacgttccctcctcgctgaatatcgcggagctcaactcctaccttggccgtgagtatcaggaattgcagaagtggcgcaatgattcatcgtcatattattatcaatcgtatttacagtcgtatatgctgtatgtccagtccctgctcggcgaaaaagttgatccctcaaggttagctgaaattttaagccgcgataacgtggatccgtcggtgcttgccttcgtgggcatgacttaccgcgctctgcgccagaataccgacgcctcgaatacagcccagcgccttcgcaaccttgtccgcatgaccgcgaggggcgcggatattaccgatcccctggaggaaaaccgctttaattattacgggggcatggttgagcagcttgccctgaccctgcaattttttgtggatcagtatccgggcgacgatataacacgcggctgctcttttcactgctggagagcaaacgttccggcagtggatatgggaaagtacggcggtaacaatacgggttctttcggcggttga

SEQ ID NO: 52410 - protein, 586 aa, Unknown
  Obtained from environmental sample
  DOMAIN (106)...(201): Alpha-2-macroglobulin family
  misc_feature (1)..(586): Xaa is any amino acid
MESNKKTYRPGEEVTMTLTATKDGKPLPNAELTLMAVDRGVLDLINYHVPDPIQYFYNESLFKLMVAGGDSRSWLMDPVTYSVKDLAGGDAEGDSKIEERKDFNPTAVFEPMLITDDSGKVTCKFKLPDTLTTYRVTVFGVRGDIFALKETEIAAQNKINVREVLPRRMRERDTAEAGVLITNLDTSSHTLSVRLDIGPPLPNDDSSGIRKIPGQAFVDGVFERRITVKSGENAVVYFDVAAVKEGNVTLNFTVNSAVLNERLIRELVIEHPYVMETVTTTGVVDKDSESEGVVIPSFADNGVGSLSVTLDATRLSLLDSAVTYLFRYPYGCMEQRSAAIMPLVIFGEYLDALGLRSEVANPRQVVENELKSWAKVQLSSGGFPYWPSGTRADFYVSLRIAHIIAIAKSKKMNVPSSLNIAELNSYLGREYQELQKWRNDSSSYYYQSYLQSYMLYVQSLLGEKVDPSRLAEILSRDNVDPSVLAFVGMTYRALRQNTDASNTAQRLRNLVRMTARGADITDPLEENRFNYYGGMVEQLALTLQFFVDQYPGDDITRGCSFHCWRANVPAVDMGKYGGNNTGSFGG

SEQ ID NO: 52411 - DNA, 819 bp, Unknown
  Obtained from environmental sample
  misc_feature (1)..(819): n is a, c, g, or t
atgatgtgtaacaggggaggacatttttttatgataactgttaagcaacctacaacctatgaaaagcagattgaaatgcttcgttccagaggttgtaccattggtgatgaatccgaagcaattcagattctatcccgagtcaattattaccgtttgactgcatatttcctgccattccgaaaatctgacagttcatacttccaaggtaccaatttcaaaacagtatatcggatatatgaatttgatcgaaaaataaggcatataatattctcagccattgaagagattgaaatttttatccgttccatttttgcctattatcatgctcatacttttggcgccttgggttatcttgaccataacaattataatcaaagacacaatcatattgaatttatggctcaaatagacaatgagaaaaagaagcaatccaaagaactatttgtacagcatcataattccaagtatggcgggcaattcccgatatgggtaattatcgaacttttttcatttggtactctttcccatttttatactgatttgccgggaagttcccaaaaataccttgccagaaacttttataaaaagcatcaaaaagaacttaccagttggctatactgttgtacgggtctcaaaaatatttgcgctcattcgagcgtttatatttccgaaattccaggtattccaaacggtatcccctctctgatcaaacaaacaatcgcagtctttttgcgctgtcatggctttaaaatcactatatacagatacagacaatgggancaaggaagtatttacttccataaagaatctttntattga

SEQ ID NO: 52412 - protein, 272 aa, Unknown
  Obtained from environmental sample
  DOMAIN (15)...(221): Abi-like protein
  misc_feature (1)..(272): Xaa is any amino acid
MMCNRGGHFFMITVKQPTTYEKQIEMLRSRGCTIGDESEAIQILSRVNYYRLTAYFLPFRKSDSSYFQGTNFKTVYRIYEFDRKIRHIIFSAIEEIEIFIRSIFAYYHAHTFGALGYLDHNNYNQRHNHIEFMAQIDNEKKKQSKELFVQHHNSKYGGQFPIWVIIELFSFGTLSHFYTDLPGSSQKYLARNFYKKHQKELTSWLYCCTGLKNICAHSSVYISEIPGIPNGIPSLIKQTIAVFLRCHGFKITIYRYRQWXQGSIYFHKESXY

SEQ ID NO: 52413 - DNA, 438 bp, Unknown
  Obtained from environmental sample
  misc_feature (1)..(438): n is a, c, g, or t
ttgagaggggatggaacggttgccgcggttgggcataatgattacggtcaatgcgaaacccaggagtggcgtgatattgttgatatctcagccggatttggtcatacggtcggtataaaggcaaacggtactgttataacagccggatgcaaaggcgcagcgcaatgcgcgacacaacactggcaggatattgccgcggtttccgcggggctgacccataccgtaggtttgaaagctgacggaacagttattgtggccggaagcaatgatttcggccaatgcaatgttcaaggctggcggaactatatagctgttcatgccggaatgtctaatactgtgggcttgaaagcggatggcacggtcgttgtatgcggtgacaataaattcggccaatgtaatactcagaactggcggaatattgggttaatgcctgaataa

SEQ ID NO: 52414 - protein, 145 aa, Unknown
  Obtained from environmental sample
  misc_feature (1)..(145): Xaa is any amino acid
MRGDGTVAAVGHNDYGQCETQEWRDIVDISAGFGHTVGIKANGTVITAGCKGAAQCATQHWQDIAAVSAGLTHTVGLKADGTVIVAGSNDFGQCNVQGWRNYIAVHAGMSNTVGLKADGTVVVCGDNKFGQCNTQNWRNIGLMPE

SEQ ID NO: 52415 - DNA, 396 bp, Unknown
  Obtained from environmental sample
  misc_feature (1)..(396): n is a, c, g, or t
atgtatgtcagcggctggcatgatattgcggctgttgttgccagtgacggtcatacagtaggcttaaaagcggacggtactgttgtcgcggttggagataatcatgatgggcagtgtaatgtcagcggctggcgtgatattgttgctgtttctgcttctgatagtcatacagtaggcttaaaaacggacggcacggttgtcgcagttggatatgatctatataggcagtgtaatgtcagcggctggcgtgatattgttgctgttgccgccggttatattcatacaataggcttaaaaacggacggcacggttgtcgcggttggagataatggagttggtcaatgtaatgtcttcgattggcgtgatattggacctgcttctgaaaaaaaagcataa

SEQ ID NO: 52416 - protein, 131 aa, Unknown
  Obtained from environmental sample
  misc_feature (1)..(131): Xaa is any amino acid
MYVSGWHDIAAVVASDGHTVGLKADGTVVAVGDNHDGQCNVSGWRDIVAVSASDSHTVGLKTDGTVVAVGYDLYRQCNVSGWRDIVAVAAGYIHTIGLKTDGTVVAVGDNGVGQCNVFDWRDIGPASEKKA

SEQ ID NO: 52417 - DNA, 840 bp, Unknown
  Obtained from environmental sample
  misc_feature (1)..(840): n is a, c, g, or t
atggaacaagcctttatcgacatattgaaaaaaatcgtaaaagaacaaggcagcgccgtgttaacaacagacacgaaaaaatgcaaggcgtttttgtctgactacactaaaaacgattacaaaaaggaaagccgctttcttttgcaggctgttgacgcggaagtcgcaaaacaaatagacagcgcggacgaccttgcggcgtgcaagaaagcgcaaatcagggaactggaagaagaatataacattaattccgaagctgcggcggacatagtgaacatcctggcgctggtcttgcgcggtgacacaactgtaacattattgcctgccgaagagaaagccgtcgaagaagccagagctgctgccgaagcaaggtttgccgcagaagccagggctgccgaggaagcaagagccgcagcggaagcaagagccgcttccgaagcaagagtcgccgctgaagccaaggccgctgccgaggcaaaagtcgctgccgaagcaagagccgccgcagaagccaaagctgccgctaaagccaaagctgccgctaaagccaaagctgccgctgaggcaaaagccagagctgccgcgttaattcctgtcaacgggaaaaagacatttgaagacggttctgtttatgagggatttttattaaacggcatccctcacggcaaagggaaaagaacatggcctgactacgaagaaacagatagaaggccaaatgccatggttttagctatgctttcttctgttccaacagaaggttttgatgaaagtaaattgaaaaagatacccgtaaaaggcgctgtatacgaaggcgattttgttatggtaaaccaacggtaa

SEQ ID NO: 52418 - protein, 279 aa, Unknown
  Obtained from environmental sample
  DOMAIN (211)...(233): MORN repeat
  misc_feature (1)..(279): Xaa is any amino acid
MEQAFIDILKKIVKEQGSAVLTTDTKKCKAFLSDYTKNDYKKESRFLLQAVDAEVAKQIDSADDLAACKKAQIRELEEEYNINSEAAADIVNILALVLRGDTTVTLLPAEEKAVEEARAAAEARFAAEARAAEEARAAAEARAASEARVAAEAKAAAEAKVAAEARAAAEAKAAAKAKAAAKAKAAAEAKARAAALIPVNGKKTFEDGSVYEGFLLNGIPHGKGKRTWPDYEETDRRPNAMVLAMLSSVPTEGFDESKLKKIPVKGAVYEGDFVMVNQR

SEQ ID NO: 52419 - DNA, 483 bp, Unknown
  Obtained from environmental sample
  misc_feature (1)..(483): n is a, c, g, or t
ttgacaggaattaacgcggcagctctggcttttgcctcagcggcagctttggctttagcggcagctttggctttagcggcagctttggcttctgcggcggctcttgcttcggcagcgacttttgcctcggcagcggccttggcttcagcggcgactcttgcttcggaagcggctcttgcttccgctgcggctcttgcttcctcggcagccctggcttctgcggcaaaccttgcttcggcagcagctctggcttcttcgacggctttctcttcggcaggcaataatgttacagttgtgtcaccgcgcaagaccagcgccaggatgttcactatgtccgccgcagcttcggaattaatgttatattcttcttccagttccctgatttgcgctttcttgcacgccgcaaggtcgtccgcgctgtctatttgttttgcgacttccgcgtcaacagcctgcaaaagaaagcggctttcctttttgtaa

SEQ ID NO: 52420 - protein, 160 aa, Unknown
  Obtained from environmental sample
  SIGNAL (1)...(26)
  misc_feature (1)..(160): Xaa is any amino acid
MTGINAAALAFASAAALALAAALALAAALASAAALASAATFASAAALASAATLASEAALASAAALASSAALASAANLASAAALASSTAFSSAGNNVTVVSPRKTSARMFTMSAAASELMLYSSSSSLICAFLHAARSSALSICFATSASTACKRKRLSFL

SEQ ID NO: 52421 - DNA, 444 bp, Unknown
  Obtained from environmental sample
  misc_feature (1)..(444): n is a, c, g, or t
gtggtaagtattttatccgaagcgattgaagcaatccgcgccgaaggaggcattgccggtattcactgctgcggtaataccgagtggagcatacttatcgatgcgggtgtggacattgtaaactttgacgcgtttgaatacggcgatacaatcgccatttatgccgacagcgtaaaaaaacatcttgagagaggcggtgtgcttgcgtggggcgtggtgcctacttccgaaaaaatcagggagcagaccgtagactcgcttgaaaaacaacttgaaaaagttatggataatcttgcgtcaaaaggtattgataaaaaactgataatcgatcaagcgatgatttctccttcatgcggaacaggctcgctctccgtaagcgacgctgaaaaagttttttcgcttttaagtgagttgaccaaacgaatgaaggaaaaatacgcttaa

SEQ ID NO: 52422 - protein, 147 aa, Unknown
  Obtained from environmental sample
  misc_feature (1)..(147): Xaa is any amino acid
MVSILSEAIEAIRAEGGIAGIHCCGNTEWSILIDAGVDIVNFDAFEYGDTIAIYADSVKKHLERGGVLAWGVVPTSEKIREQTVDSLEKQLEKVMDNLASKGIDKKLIIDQAMISPSCGTGSLSVSDAEKVFSLLSELTKRMKEKYA

SEQ ID NO: 52423 - DNA, 786 bp, Unknown
  Obtained from environmental sample
  misc_feature (1)..(786): n is a, c, g, or t
atgaaaattgcagtttcgggaaagggcggagtaggcaagtccactgtcgccgcttctatcgctttaattctggcgcaaaggggcgtcagggttctcgccctcgacgccgatcctgacgctaaccttgcggcgtctttgggtattcccaaaactgtaaaaattacccctatctcaaaagagattgcgctcattgaggagagaacgggggcgaaggttgatcagtacggacaaatttttaaacttaacccgaatgtcagcgatgtagcggagaagtttgcggtttcacataacgaggtggagcttttggttctgggagccgtgaaaagaggcggaggaggctgtgcctgtcctgaaaatgtttttattaaagcgttggttaacgatcttgttctgtataaaaatgaaactctaataatggatatggaagccggtattgaacatttaggacgcgctacttcaagcggcgtagatgtgatgatcattgtagttgagccgggtcagcgttcgcttgattgtgcggatacggttatcaagatgtcgaaggagatagggcttgccgattttgtaattgtgggtaacaagataacttgcgaagacgataaacgctttatcgaaaacggactttcaggttttaatgtgtccgcttttcttccgtactcggaaaatattcgcaaggcggacagagacggagtttccgcgctggacggaatgaacggcgaagaacgcgccggtttggaaaatcttgtcaatcttattttgaaaatgccgaatcgggataatgtatga

SEQ ID NO: 52424 - protein, 261 aa, Unknown
  Obtained from environmental sample
  DOMAIN (1)...(239): Anion-transporting ATPase
  misc_feature (1)..(261): Xaa is any amino acid
MKIAVSGKGGVGKSTVAASIALILAQRGVRVLALDADPDANLAASLGIPKTVKITPISKEIALIEERTGAKVDQYGQIFKLNPNVSDVAEKFAVSHNEVELLVLGAVKRGGGGCACPENVFIKALVNDLVLYKNETLIMDMEAGIEHLGRATSSGVDVMIIVVEPGQRSLDCADTVIKMSKEIGLADFVIVGNKITCEDDKRFIENGLSGFNVSAFLPYSENIRKADRDGVSALDGMNGEERAGLENLVNLILKMPNRDNV

SEQ ID NO: 52425 - DNA, 759 bp, Unknown
  Obtained from environmental sample
  misc_feature (1)..(759): n is a, c, g, or t
atgagcgcaattaaaaacagcaaattaatcgccataacgggaaagggcggcgttggtaaaaccacaatctgcgcgctgttaataaagaatttattggcggcggggaaatctcccgtgcttgcgatagacgccgaccccaatagctgccttgacgcggcgttaggcgtgtgtgtcaccgataccgtaggcagggcgcgggaagacgttcgcaattcggcgggggcggatgttaatgtttccaagcgcgagcttttacggttaaaactggaaagcgcccttgttgaagaaaagggttttgatcttatcgctatgggaaggccggaaggagaggggtgttactgttacgcgaataacgttcttaaagaaattatagctgagatttcatcgggatacccatatatagtgctggataacgaggcggggcttgaaaatctttcacggcggattgttcaaaaggttgatcttatgatacttgtttccgacgcttccaattcaggattacagactctgcttcgcctttttgaacttgcaggggaaatgaaaatggcttacggcaaacttgcgcttgtagtgaataaattgcgaagcgacaaacttcccgacagaatgaaagaaataagcgaaaaaaccaaagcggatattgtcatcggtcttcccgacgatgatgaagtttcgctctttgcacaggagaacaggaattttttgcagatttctgattcaaatcctgtttataaaaaagtaatggaattagttatataa

SEQ ID NO: 52426 - protein, 252 aa, Unknown
  Obtained from environmental sample
  DOMAIN (9)...(226): CobQ/CobB/MinD/ParA nucleotide binding domain
  misc_feature (1)..(252): Xaa is any amino acid
MSAIKNSKLIAITGKGGVGKTTICALLIKNLLAAGKSPVLAIDADPNSCLDAALGVCVTDTVGRAREDVRNSAGADVNVSKRELLRLKLESALVEEKGFDLIAMGRPEGEGCYCYANNVLKEIIAEISSGYPYIVLDNEAGLENLSRRIVQKVDLMILVSDASNSGLQTLLRLFELAGEMKMAYGKLALVVNKLRSDKLPDRMKEISEKTKADIVIGLPDDDEVSLFAQENRNFLQISDSNPVYKKVMELVI

SEQ ID NO: 52427 - DNA, 1359 bp, Unknown
  Obtained from environmental sample
  misc_feature (1)..(1359): n is a, c, g, or t
ttggtaatcgatcaggcgacgcgcgacgctgcgttggcgcttaaagaaactctggaagaatttaaaattcaagccgaagttaccggcatacgtaaaggccccgtcatcaccctgttcgagattctccccgcgcccggcgtaaaactttcaaaaatcgtcggtttgcaggacaacatcgccctgcgcctggccgcgtcctcggtgcgtattgtagctccgattcccggcaaacacgcggtaggcatagaagttcccaatgcaaaacggaacattgtctctttccgggaaattattgaaggtcagcttcatgacgatcaaaaaatggaaatacctgttgttatgggcaaagatatatccggagaagcgcaaacaatcgatcttgtgcagatgccccatcttttaatcgcgggagcgacaggttcgggaaaatcggtctgcgtcaattcgatgatcctttcgatactttaccagcgcactccggcggaatgccgcctgatgcttatcgatccaaaaatcgttgagctcaaactttataatgatattccccatttattaacgccggtaattaccgagccgaaaaaagcttttcaggctcttcaatactgcatttacgagatggagcgtcgttacgcctgtcttgattcagtgggggtgcgcgacatccgcagttacaacaaacgcattaaagagaagaacattgcgcaggaacacatgccctacattgttgtggtaattgacgagtttgccgacctcatggcgactaccggaaaagagcttgagtctacagtcgcccgtcttgcggcgatgagccgcgctgtcggcattcatcttgtgcttgcgacacagcgcccttcgattgatgtaataacaggtcttatcaaggcaaacattcccagccgtatcgcattcatggttgcgagcaagactgacagccgcatcatcattgatatggtaggcgctgaaaaacttctgggcaagggcgacatgctttactcaggggttgttgatccgttcccaatccgaatgcagggcgcttttatttccgaagaagaagttgaggcggttgtcgagtatgtaaaaactctcggcgagcctgaatacattgacgatgaaattttctttgaggaagaagaagaacagcacgaccgctctcttttttctgacggtgatgatccgctttacgaaaaagctttggaaattgtttatcagcagggcagggcaagcgcaagttatattcagcgccggctgaaaatcggctttaaccgcgccgcaaggctggtagatgaaatggagcataacggagttgtcggtcccgctcagggaagcaaaccgagagagcttcttcggggtatgcagtag

SEQ ID NO: 52428 - protein, 452 aa, Unknown
  Obtained from environmental sample
  DOMAIN (93)...(286): FtsK/SpoIIIE family
  misc_feature (1)..(452): Xaa is any amino acid
MVIDQATRDAALALKETLEEFKIQAEVTGIRKGPVITLFEILPAPGVKLSKIVGLQDNIALRLAASSVRIVAPIPGKHAVGIEVPNAKRNIVSFREIIEGQLHDDQKMEIPVVMGKDISGEAQTIDLVQMPHLLIAGATGSGKSVCVNSMILSILYQRTPAECRLMLIDPKIVELKLYNDIPHLLTPVITEPKKAFQALQYCIYEMERRYACLDSVGVRDIRSYNKRIKEKNIAQEHMPYIVVVIDEFADLMATTGKELESTVARLAAMSRAVGIHLVLATQRPSIDVITGLIKANIPSRIAFMVASKTDSRIIIDMVGAEKLLGKGDMLYSGVVDPFPIRMQGAFISEEEVEAVVEYVKTLGEPEYIDDEIFFEEEEEQHDRSLFSDGDDPLYEKALEIVYQQGRASASYIQRRLKIGFNRAARLVDEMEHNGVVGPAQGSKPRELLRGMQ

SEQ ID NO: 52429 - DNA, 585 bp, Unknown
  Obtained from environmental sample
  misc_feature (1)..(585): n is a, c, g, or t
gtgcctcccaataaatgttatagtaagagaaaaagtaacgggaggccgggaatgacggagaaaagtctatttgcagggttcggaggtcaaggaataatctctttaggacagctttgggtatacttcggaatgcaggaaggaaaaaacgttactttctttccgttttacggcgctgaaaaacgaggcggtgttgcccgagccagtgttattgtctctgatgatgaaatcgcgagccctcttgttacaacgccggattcggcgctggttatgaatatagattcgcttcccatttgtgaaggaagtcttaaagacggcggcttaatgttgataaattcaagtcttgtgaaggaagaaccgaaacgaagcggtttaaaaatcgtcaagattgaagcttccggtattgccgaacaaattggaaatatccttttcgcaaacatggtggctctgggagctatggcaaaacttacaaatgcgttaaatctggctgacatagaaggtatcctgaagaaattttttccgcaggacaagcatcaatttattccgatgaatataaaagctatccaagccggatacagcgcagtttaa

SEQ ID NO: 52430 - protein, 194 aa, Unknown
  Obtained from environmental sample
  DOMAIN (28)...(192): Pyruvate ferredoxin/flavodoxin oxidoreductase
  misc_feature (1)..(194): Xaa is any amino acid
MPPNKCYSKRKSNGRPGMTEKSLFAGFGGQGIISLGQLWVYFGMQEGKNVTFFPFYGAEKRGGVARASVIVSDDEIASPLVTTPDSALVMNIDSLPICEGSLKDGGLMLINSSLVKEEPKRSGLKIVKIEASGIAEQIGNILFANMVALGAMAKLTNALNLADIEGILKKFFPQDKHQFIPMNIKAIQAGYSAV

SEQ ID NO: 52431 - DNA, 714 bp, Unknown
  Obtained from environmental sample
  misc_feature (1)..(714): n is a, c, g, or t
ttgtgcggtccaatcaatgcggattcggtcagggttcctgaatcctttgctgaaagtttctgcccctccatgttccgcgttcctgtccaaaacgatggcctaaaaacaattatgcatctgcgaaaggaccctgcggcagaattttattttagcaataaggtaatgtataagtggcttgatcttgatttgctccatatgtgtttgcttgaggaaaagactgaaaacgtaacgtatgaaggccgcccggccagccgctataccgccctgcttgtggcgggtaaggacgcggtggacgcttcccgcaaatttggccgctacacccgcgttattgttcccggcagtccccttgtcatggatatttgctttgatcttgatccggcactgccggaattgcccagagtcggcgtcagtgtgaaagttccggcttattacaattctatttcatggctgggcgcgggaaatgaggaatcctatcctgaccgtttggcggctgcctttttgggcgaataccacggcagtccggcggagctggaagtgccttacatcgtgccccaggaaaacggcaaccggagcggcgtccgccgtctgaccctttccggcgactcggtaccgcagggaaaaccgcgttccctgagcatccgcccccacaagccgcttaacttcagcgttagccgctatacccaggaaaatcttttcaacgcctgcatacgatag

SEQ ID NO: 52432 - protein, 237 aa, Unknown
  Obtained from environmental sample
  DOMAIN (9)...(237): Beta galactosidase small chain
  misc_feature (1)..(237): Xaa is any amino acid
MCGPINADSVRVPESFAESFCPSMFRVPVQNDGLKTIMHLRKDPAAEFYFSNKVMYKWLDLDLLHMCLLEEKTENVTYEGRPASRYTALLVAGKDAVDASRKFGRYTRVIVPGSPLVMDICFDLDPALPELPRVGVSVKVPAYYNSISWLGAGNEESYPDRLAAAFLGEYHGSPAELEVPYIVPQENGNRSGVRRLTLSGDSVPQGKPRSLSIRPHKPLNFSVSRYTQENLFNACIR

SEQ ID NO: 52433 - DNA, 906 bp, Unknown
  Obtained from environmental sample
  misc_feature (1)..(906): n is a, c, g, or t
gtgcggggcgtttcattcaatcttgcgaaaggcgaaatcctcggcatcgtgggcgaatccggatcgggcaaaagcgttacaaccctgtccataccgggcctgcttccgcataacgccgaggtaacgggcgaagttatttacgagggcaggcaaatactgaacttgagcgaaaaggaatacagggcctaccggggaaagaagatcggcatgatctttcaggagccgggacgctcttacgatccgctccaaaacatgggcagcgttttttacgaaactttccgaaacagtgatcctgcaattacaaaggaagcggctctggacaaggccgccgcccttcttgaggaaacggggcttcccaacggcagatctcgcctttcaaatttcccccaccagttttcagggggccagcttcaacgcatcggcatcgctcttgctttagctcaaggctgcgagcttcttgtcgccgacgagcctacaacagccctggacgttaccattcaaaaacaaatcgtggagcttttaaagactttacgccaaaacaggaagatttcgataatttttatcagccacaacatcgacctggtagccgatatttccgaccgcatcctcgtgatgtacgggggtctattgatggaaagcgccgcctcgggaaccattctttcaggcgcagcacatccttacaccaaggcccttctggcggcaagccctcaattcgggagccactacagcgcccggcggctaaaggtcatcccaggcaaggtggcggatccggctaaccccgatcccggctgtcccttcgcgccccgctgcgccgaagcttcgtccggcggcgagtgccgcgggagcatcccgcccttggttgagattggggaagggcatagcgtccgctgtaaaaccctgacttaa

SEQ ID NO: 52434 - protein, 301 aa, Unknown
  Obtained from environmental sample
  DOMAIN (211)...(279): Oligopeptide/dipeptide transporter, C-terminal region
  misc_feature (1)..(301): Xaa is any amino acid
MRGVSFNLAKGEILGIVGESGSGKSVTTLSIPGLLPHNAEVTGEVIYEGRQILNLSEKEYRAYRGKKIGMIFQEPGRSYDPLQNMGSVFYETFRNSDPAITKEAALDKAAALLEETGLPNGRSRLSNFPHQFSGGQLQRIGIALALAQGCELLVADEPTTALDVTIQKQIVELLKTLRQNRKISIIFISHNIDLVADISDRILVMYGGLLMESAASGTILSGAAHPYTKALLAASPQFGSHYSARRLKVIPGKVADPANPDPGCPFAPRCAEASSGGECRGSIPPLVEIGEGHSVRCKTLT

SEQ ID NO: 52435 - DNA, 1179 bp, Unknown
  Obtained from environmental sample
  misc_feature (1)..(1179): n is a, c, g, or t
atggctgttaaagattcatgcgctatacgccattatttcgactgggctgcctcggcgccttttgaagaatcaattataaatcaaataaacaattcgcgtcttttcggaaacccgtcgtctcagcacggcgaaggcaaggcggcaaaacttgcccttgaacaagcgcgcgcaaggtgcgcggtcgttttaaatgttccgcctgaaacattgttttttacttccggcgggacggaatccaacagcatagctttgttttccaatcttgtaaaaaaaggacagggaagaattatttcttccgccgcggaacattcatccgtaagggaaggaattgaaacgcttgaaaaaatgggaaaaccgacaggcagaatcgccgttgattccgaaggaagggttactcaagagattttcgctaaaacgctcgccaaatacgattgcgtgcgttttgcgtcctgtatgtccgtaaacaatgaaacaggcgctgttacggatatcgcctcattgaaagaccttatacgcaaacaaacaggggctcccgtacatttgcattgcgatattgtgcaggccattggaaaaataccggttgacatttccggttgggaaatagattccgcctcaataagcgcgcataaaataggaggccctagagggattggccttttgtatcttcgccggccttgtgcatccgaagttttttactcgggcggcggacaggaaaacggcgtaaggggcggcactgaaaacactcatggggcgctctgccttgcctcctgtcttgaaaaatacgcggcagccgaaaccgttaacgccgaacacgcccatgcgcgggaacgctggaaaaaacttataacttccctttctgcgtttgaacgctgtacgcttattccgcgccggcgcgccatgcctgaggcacaggacgggttttctccgtatattttacaggcggcttttaagaacatacccggagaagttatggcgcgcgccctcgacgaccttggctttgcggtttctacaggctccgcctgttcttcatcgtcgccagagcggcctgttcttcttgcaatgggcgttgatgaaaaattaagaatagaaggaatccgcatctcacagggatattcaactacagacgaagaaatcgatctgcttgtcgaggcaatagcggaggttttaaaatttctgtaa

SEQ ID NO: 52436 - protein, 392 aa, Unknown
  Obtained from environmental sample
  DOMAIN (11)...(381): Aminotransferase class-V
  misc_feature (1)..(392): Xaa is any amino acid
MAVKDSCAIRHYFDWAASAPFEESIINQINNSRLFGNPSSQHGEGKAAKLALEQARARCAVVLNVPPETLFFTSGGTESNSIALFSNLVKKGQGRIISSAAEHSSVREGIETLEKMGKPTGRIAVDSEGRVTQEIFAKTLAKYDCVRFASCMSVNNETGAVTDIASLKDLIRKQTGAPVHLHCDIVQAIGKIPVDISGWEIDSASISAHKIGGPRGIGLLYLRRPCASEVFYSGGGQENGVRGGTENTHGALCLASCLEKYAAAETVNAEHAHARERWKKLITSLSAFERCTLIPRRRAMPEAQDGFSPYILQAAFKNIPGEVMARALDDLGFAVSTGSACSSSSPERPVLLAMGVDEKLRIEGIRISQGYSTTDEEIDLLVEAIAEVLKFL

SEQ ID NO: 52437 - DNA, 348 bp, Unknown
  Obtained from environmental sample
  misc_feature (1)..(348): n is a, c, g, or t
atgctgggcgaagttaaagtaaagataaaaacgacaaacggacgcttctttcttgaatgtaacgaagaaaattcaggcgtcatcgaggactgcctttcccgtcttattggaatttccggctgggcaaaaaccgttatctgtcaaaaatctgttgaagccgtaactgcggcttgtattgaagaagcgaaaatatttgcgcataacggcattaaaacttttaagataaccgcgcggagaaccgacaaaggtttcccgctgagttcttacgaattatgctgccgcgcgggagaagcggtattaaattcggaaagcggtctaaagttgacattcatgatcccgcaggagtaa

SEQ ID NO: 52438 - protein, 115 aa, Unknown
  Obtained from environmental sample
  misc_feature (1)..(115): Xaa is any amino acid
MLGEVKVKIKTTNGRFFLECNEENSGVIEDCLSRLIGISGWAKTVICQKSVEAVTAACIEEAKIFAHNGIKTFKITARRTDKGFPLSSYELCCRAGEAVLNSESGLKLTFMIPQE

SEQ ID NO: 52439 - DNA, 573 bp, Unknown
  Obtained from environmental sample
  misc_feature (1)..(573): n is a, c, g, or t
atggcgtgcaggggcatgagcgtagacgcgattcattttcacgcgtatccgtacacttcgcttgaagcgaaagagaaagtaatacgccttgcgcaaattgcgggctcttattgcatgggtatcaatctttacatattgaattttacgcaggttcaacagcgcataaaagagcgcgctcccgttgaatggactacggtaatacttagaatggcaatgatggaagccgcggaaaaaaccgcgctgaaaattaaatgcaaatgccttattacgggcgaaagcctttcgcaggtggcaagccagaccatagaaaatttacgctgtaccgaaagcagaataaatcttcccatactgcgcccattaatcggcatggacaaagagaatatcattaaaaaagcgcaaaaactcggtacttatgaagtttcaatactgccctacgctgactgttgtactcttttttcacctgcgcaccctatccttcacggagaacctgagcaagcagacgctatttacgaatctttggaaattgaagggctgatagaagaagcccttaataattacgaggtttataactaa

SEQ ID NO: 52440 - protein, 190 aa, Unknown
  Obtained from environmental sample
  DOMAIN (1)...(175): Thiamine biosynthesis protein (ThiI)
  misc_feature (1)..(190): Xaa is any amino acid
MACRGMSVDAIHFHAYPYTSLEAKEKVIRLAQIAGSYCMGINLYILNFTQVQQRIKERAPVEWTTVILRMAMMEAAEKTALKIKCKCLITGESLSQVASQTIENLRCTESRINLPILRPLIGMDKENIIKKAQKLGTYEVSILPYADCCTLFSPAHPILHGEPEQADAIYESLEIEGLIEEALNNYEVYN

SEQ ID NO: 52441 - DNA, 1353 bp, Unknown
  Obtained from environmental sample
  misc_feature (1)..(1353): n is a, c, g, or t
gtgtataacgacatcgtaccgaagggaagtacctttgacgccgtctccctggagaccgcctgccgctattccgccgaggacgccgatttctgcctcagattaaaacagcatcttgaaggcaaatttggtgaagagagcgcggcgctttttaaagaccttgaaatgccacttcttcccattctggcggagatggaaggggaaggcatcaaaattgagagcaaggttctcaaagactacggagttgaattgggaagggagcttgataacatccaagcaaaaacctacaagatcgtgggccatgaattcaacctctcatccacacagcagcttcagaaagtgctttttgaggagcggaagcttaaacccggcaaaaagaccaaaaccggctattctaccgacatggcggtactggaagagctcgccggggaagacgaggttcccgcactcatcctcaggcaccgtaccctgtcgaaactcaaatcaacctatgtggatagtctgcctgagcaggcggacagggagggtcggatacataccaactttgtgcagaccggcacggcaaccggccggctttccagccgtgagcccaatttgcagaacatccccatccgcgacgaagagggccgccgcatccgcgaagcctttattgccggtccgggtagcgttttgatttccgccgattacagccagatagaactggtagtgctggcgcatctttcgcaggatgaaaaccttattgccgctttcaaagaaggcacggacgttcacgcccgcaccgccgcgctgatattcggcgttgacattgatcaggtaaaagacgatcagcgacgcatcgccaagacgattaactttggcgtgatgtacggcatgagcgccttccgcctttccaatgaactgggaatcagccgcaccgacgcttcaaattttatcgcggcgtactttaacacttacgcgggggtgcggtgttttatcgaagacctgattaaaaaaaccgaagaactgggttatgtttccacgatctttggccgccgccgctatatccgcacgattaactcgcgaaataaaaccgaaaaggccgccgccgagcgcattgcggttaacactcccattcagggttccgcggcggatattgttaaaaccgccatgattaatctggataaacggcttgccgccgaacaaagccccgcccgtcttttactgcaggttcacgatgaacttatcctggaatgtccaaaaaatgccgccgatgaaacggcggctctggttaaagcggaaatggaacaggcggtcagtttgcgtattccgttacgggtaagcgtggaaaccggaaaacgctggggtgattttcactga

SEQ ID NO: 52442 - protein, 450 aa, Unknown
  Obtained from environmental sample
  DOMAIN (71)...(449): DNA polymerase family A
  misc_feature (1)..(450): Xaa is any amino acid
MYNDIVPKGSTFDAVSLETACRYSAEDADFCLRLKQHLEGKFGEESAALFKDLEMPLLPILAEMEGEGIKIESKVLKDYGVELGRELDNIQAKTYKIVGHEFNLSSTQQLQKVLFEERKLKPGKKTKTGYSTDMAVLEELAGEDEVPALILRHRTLSKLKSTYVDSLPEQADREGRIHTNFVQTGTATGRLSSREPNLQNIPIRDEEGRRIREAFIAGPGSVLISADYSQIELVVLAHLSQDENLIAAFKEGTDVHARTAALIFGVDIDQVKDDQRRIAKTINFGVMYGMSAFRLSNELGISRTDASNFIAAYFNTYAGVRCFIEDLIKKTEELGYVSTIFGRRRYIRTINSRNKTEKAAAERIAVNTPIQGSAADIVKTAMINLDKRLAAEQSPARLLLQVHDELILECPKNAADETAALVKAEMEQAVSLRIPLRVSVETGKRWGDFH

SEQ ID NO: 52443 - DNA, 990 bp, Unknown
  Obtained from environmental sample
  misc_feature (1)..(990): n is a, c, g, or t
ttgaaaccgatgatgaccggccttgaccataaacgctccgccctagacgtaaggggaagattctcggtgacaaaggcgaaagccgggaagatgcttgtcgattttaagaacggcgggatgggcggttgcgtgattttatccacgtgcaaccgtatggagttttacgcgtcaaaccgggatgacggcggcttatcgctctccgaagcgttgtgcgccgctcttggtatagacttttccgagtatggatcccatttgattgaaagagaaggtgacagcgttatggaacatctgtgccgcgtcgcgtcagggctcgattcgcagattatcggggacgaccagataatcacgcaggttcgcgaggcgctggaattatcacgcggtcagaaatgtacgggcagctgtatagaaacactgtttaacctcgctatccacgcggcaaaagccatcaaaaataagatattcatcaatacgctaaagacaagctccgtgcctgaaaaaacagtggagaagttaaaggctatgtactctcatcgtctatcaggccgaaaagcgcttgttatcggcaacggtcgaatcggcaggcgagtatgtgatttattgatacgcgaaggtgtgaatgtgacggtcacattgcgttctcataaaagcgggggcggcgttcatattaatgataaagcggatgtcatagattatgataaacgatataacattttggaaaagatcaatatcgtaatcagcgctacggccagcccgcatttaacgctgttgcaaagcgaaatcggtgtgttaacgaagacgccggagattattgtggatttggccgttcccagagacgtggaaccttcggtaggtagtattaacggcgttaccttattgacgatagatgatatatcaggtgacgggtcgcgtctttcaccggagaacgttttgataacggagagtattatcgcggagcatattgagaggtataacaagtggagaaaacactga

SEQ ID NO: 52444 - protein, 329 aa, Unknown
  Obtained from environmental sample
  DOMAIN (159)...(300): Shikimate / quinate 5-dehydrogenase
  misc_feature (1)..(329): Xaa is any amino acid
MKPMMTGLDHKRSALDVRGRFSVTKAKAGKMLVDFKNGGMGGCVILSTCNRMEFYASNRDDGGLSLSEALCAALGIDFSEYGSHLIEREGDSVMEHLCRVASGLDSQIIGDDQIITQVREALELSRGQKCTGSCIETLFNLAIHAAKAIKNKIFINTLKTSSVPEKTVEKLKAMYSHRLSGRKALVIGNGRIGRRVCDLLIREGVNVTVTLRSHKSGGGVHINDKADVIDYDKRYNILEKINIVISATASPHLTLLQSEIGVLTKTPEIIVDLAVPRDVEPSVGSINGVTLLTIDDISGDGSRLSPENVLITESIIAEHIERYNKWRKH

SEQ ID NO: 52445 - DNA, 1098 bp, Unknown
  Obtained from environmental sample
  misc_feature (1)..(1098): n is a, c, g, or t
atgaaggttatattggtcggagccgggcccggaggaatagggcttttaacgattaagggactcgaggcgttgaaaaacgccgacgtcgtgctgtacgaccgttttgtgagcgatgatatccttgccgtgattcctgactccgccgaaaagatagatgtcgggaaacacgccggcagccatccggtgccgcaggaggcaatcaataatcttctgttgaaaaaggccgaggagggaaaaaatgtggttcgattgaagggcggcgacccgtttgtcttcgcgcgaggcggggaggaattggaattattggccgagaatgacatcccctttgaagtcatacccggaatcacgtcggccatagccgccgcggcgtacgccgggattcccataacgcacagggattgcgcctcctccttccatgtgataacggcgcacgttaaaaataacgggccgatgaatattgatttcgccgctctcgtgaaattaaacggtacgttgatatttctgatgggggcctcggcaatcaatgatatttgcgagagatgcgtctcggcgggtatggacaaagatacgcccgccgccgtcgtggagaacgccaccacgaaccgtcagcgtaagtttttggggacgattgccgcattgccgaaaatagccgaagaaaataatgtggaatcgccggcggttatcatcatcggcaaggtatgccgatactcaacccgttacgattggtttgaccggaaaccgctgcggggtaaacgtgtagtcgtttcgtcgataaaatacggtacgtcaaaactgtcttacgctcttcgtgaactcggttgcgatgtcgtcgaaataccgtctctaaagatcgttccgcttatcggtagtgatgatgtgttgagggataaattagagaatataagcggctgctcatggcttatctttacaagcggcgtcggcgtgaatatattttttgactatcttaaagaggcgttgatcgatataaggagattaatcaatatcagaatagcgtgtgtcggtatcgagacggaaaaggaagtccgcaagcgcgggattggggttgaatacgtccccgatgatacaacgggcccttag

SEQ ID NO: 52446 - protein, 365 aa, Unknown
  Obtained from environmental sample
  DOMAIN (2)...(214): Tetrapyrrole (Corrin/Porphyrin) Methylases
  misc_feature (1)..(365): Xaa is any amino acid
MKVILVGAGPGGIGLLTIKGLEALKNADVVLYDRFVSDDILAVIPDSAEKIDVGKHAGSHPVPQEAINNLLLKKAEEGKNVVRLKGGDPFVFARGGEELELLAENDIPFEVIPGITSAIAAAAYAGIPITHRDCASSFHVITAHVKNNGPMNIDFAALVKLNGTLIFLMGASAINDICERCVSAGMDKDTPAAVVENATTNRQRKFLGTIAALPKIAEENNVESPAVIIIGKVCRYSTRYDWFDRKPLRGKRVVVSSIKYGTSKLSYALRELGCDVVEIPSLKIVPLIGSDDVLRDKLENISGCSWLIFTSGVGVNIFFDYLKEALIDIRRLINIRIACVGIETEKEVRKRGIGVEYVPDDTTGP

SEQ ID NO: 52447 - DNA, 747 bp, Unknown
  Obtained from environmental sample
  misc_feature (1)..(747): n is a, c, g, or t
ttggacattccgttggactctgtcgtcggcaaaggcttttttactaaagaacttgaatcggcgctgatggacggcgatatcgacatcgccgttcacagctacaaggatatgcctattgacgataccgaaggtctctctatcgcggcgttatccgttcgagaagcgccttttgacgttctggtattgccgaaaggcggtatcgcgattgacaagtcaaaacctgtaggttcgtcgagccttagaagggcgattcagtttggaaagttgtatgacggggttgagataaagtctgtacgtgggaacgtgcctacccgtttgttgaaattggataacggcgagtattccgctttgatactcgctcaggcgggcctcaaccgcttatcccttcaagacagaatctcacgtgtgttcactgttgacgaaatgatacctgccgcctcacagggaattctcgcggttcagggcaggcgcggcgaggactattctttccttgacgtgtttcacaatatagaatctgagatcgtatcgaaagctgagagacggttcataaagacgttggacggcggctgttcatcgcctgtcgccgtatatgggcggatagataataatacgttattacttacggggatgtatgttgattctcatggcaatatcgaaaaaggaaatatctgcggaggtattgataatagcgaacaactcggcgaaacgcttgccgtgcggttgcgggagagggcgggggatagatga

SEQ ID NO: 52448 - protein, 248 aa, Unknown
  Obtained from environmental sample
  DOMAIN (173)...(245): Porphobilinogen deaminase, C-terminal domain
  misc_feature (1)..(248): Xaa is any amino acid
MDIPLDSVVGKGFFTKELESALMDGDIDIAVHSYKDMPIDDTEGLSIAALSVREAPFDVLVLPKGGIAIDKSKPVGSSSLRRAIQFGKLYDGVEIKSVRGNVPTRLLKLDNGEYSALILAQAGLNRLSLQDRISRVFTVDEMIPAASQGILAVQGRRGEDYSFLDVFHNIESEIVSKAERRFIKTLDGGCSSPVAVYGRIDNNTLLLTGMYVDSHGNIEKGNICGGIDNSEQLGETLAVRLRERAGDR

SEQ ID NO: 52449 - DNA, 546 bp, Unknown
  Obtained from environmental sample
  misc_feature (1)..(546): n is a, c, g, or t
atggaagagaatttggagaaaaaagaggttttagaagaagtagagaggcttgtggaagaggctgaaagtgctccagtagaaaaagagacctccatagccgaggcgcaagaaaaagagagaattgctcaagataaatacttgaggctttttgcggagtttgaaaactaccgtacgcgctcagcaaaggagcaactggagttgataagcacagccaatggcaagcttttggaaaagctttctgaggttaaggataattttgaccgagcctttgccgaagagaacaaaagtggagatttagcggcatttgaaaagggaatcaaattgattcaagagcagtttaacaaggttttaagcgattttggattggaaaccttagaccccgctggggaggaatttgatccaaatctgcatgaggcacttatgaagcagccttctgaaaatgttccagaaggtaaaatcattcaagtgtatcaaaaaggttataaaattaaaaataaactgctgaaaacagcaaaggtaattgtatcaagcggagtatccgcatag

SEQ ID NO: 52450 - protein, 181 aa, Unknown
  Obtained from environmental sample
  DOMAIN (5)...(177): GrpE
  misc_feature (1)..(181): Xaa is any amino acid
MEENLEKKEVLEEVERLVEEAESAPVEKETSIAEAQEKERIAQDKYLRLFAEFENYRTRSAKEQLELISTANGKLLEKLSEVKDNFDRAFAEENKSGDLAAFEKGIKLIQEQFNKVLSDFGLETLDPAGEEFDPNLHEALMKQPSENVPEGKIIQVYQKGYKIKNKLLKTAKVIVSSGVSA

SEQ ID NO: 52451 - DNA, 597 bp, Unknown
  Obtained from environmental sample
  misc_feature (1)..(597): n is a, c, g, or t
gtgcttactcccggcaaggacggcatgaagggcgcaatcagaaaagctgaagagctttcgctcttttttgaaaaatcttttattcctcagcagtttaacaatcccgctaacgcccgcattcaccgcgagaccaccgccgttgaaatctggaacgatttggacggagagcttgacgtatttgtggctggcgtcggaacaggcggcactatcacaggcgtcggcgaagtcttaaaagaaaaaaatcccaagataaaaattgtagccgtggaaccctttgactctcccgtactttcgggcggagttccgggaccgcacaagattcaaggcatcggcgcgggattcattccgaatgtactgaacacaaaagtaatagatgaagtatttaaagtaagaacggaacaagcctttgaaaccgcgcaggacttggcgcggacggaagggcttttagtcggcatatcttcggcggcggcggctttcgcggcggcggagattgcaaaacgttcggaatacaaaggcaagaccgttgtggctctgctgcccgacacgggagaaagatacctttccaccccgttgtttgacagaccgcaagcaatataa

SEQ ID NO: 52452 - protein, 198 aa, Unknown
  Obtained from environmental sample
  DOMAIN (1)...(182): Pyridoxal-phosphate dependent enzyme
  misc_feature (1)..(198): Xaa is any amino acid
MLTPGKDGMKGAIRKAEELSLFFEKSFIPQQFNNPANARIHRETTAVEIWNDLDGELDVFVAGVGTGGTITGVGEVLKEKNPKIKIVAVEPFDSPVLSGGVPGPHKIQGIGAGFIPNVLNTKVIDEVFKVRTEQAFETAQDLARTEGLLVGISSAAAAFAAAEIAKRSEYKGKTVVALLPDTGERYLSTPLFDRPQAI

SEQ ID NO: 52453 - DNA, 1311 bp, Unknown
  Obtained from environmental sample
  misc_feature (1)..(1311): n is a, c, g, or t
gtgaacaggggcgaagtgaataccattaagggaactaacgttccccggactgcaaacctggaagaaaagagagacgcgctcaagtgggaagcaatcgactgggcggcggtggaacaattcattaacaaagcacaaacacgaattgcaaaggcgatggcggcaggaaacaaaaagctggcacgggaactgcaacgtatgctcatacattcacattatgcgaaattgtgggcaatacgcaaagtaaccagtaccaaagggagacggacagcgggaatagacaacgaaaaatgggatacaccggcaaagaaatggcaggcggtaagcaagttgaaagaaaagaactacaaagctaaaccgttaaagcgtgtatacattccgaagaaaaacgggaaaatgcgccccttgagcataccgacaatggacgaccgtgcgaaacaggcactggaagctttagcgctagacccgataatagaaacaacaagcgatatacactcatttgggtttaggaaaggcaggagcagccatgacgcgcgggagcagttattcaactcgctggcaaagaagaagtcggcggaatgggcggtagaaggcgacataaaagcatgttttgacgaaatagcccacgaatggttaatacagaacacaccgatggacaaaaccatactgaaagaatttctgaaagcgggatacgtgtatgagaaagaattattcccaaccgaacggggaaccccccaggggggtgtaattagtacgatattggcaaaccacacactgaacggactggacaaacatcttgaggatacttacaagagagaatacgcaggaagcggagcgacatatcggctggtcgtaccaaaagtaaaccttgtacgctatgcggacgacttaattataacggctccgacgcaagaacgcgccgaacatgtaaaagaaaccgtaaagcaattcatggcggcacgagggctgcaactgtcagaagaaaagacgctcatcacgaacatagcggacggatttgactttctgggatggaactttcgtaaatacaaagggaaactgctcataaagccgtctaagaaagcacaacaaaatgtcatggagaaaatacggaaggttatagacctctgcaaagcaagaactcaggatgagctgataggaaggctcaaccccataataagaggatggtgcaattaccatcaggggactgtggcaagcgggattttttcaagaataaaccatgaaatcttcaaagccctatggcggtgggcgtgccgcaggcaccccaataaagctcgtgccgctcggccgatctga

SEQ ID NO: 52454 - protein, 436 aa, Unknown
  Obtained from environmental sample
  DOMAIN (361)...(436): Group II intron, maturase-specific domain
  misc_feature (1)..(436): Xaa is any amino acid
MNRGEVNTIKGTNVPRTANLEEKRDALKWEAIDWAAVEQFINKAQTRIAKAMAAGNKKLARELQRMLIHSHYAKLWAIRKVTSTKGRRTAGIDNEKWDTPAKKWQAVSKLKEKNYKAKPLKRVYIPKKNGKMRPLSIPTMDDRAKQALEALALDPIIETTSDIHSFGFRKGRSSHDAREQLFNSLAKKKSAEWAVEGDIKACFDEIAHEWLIQNTPMDKTILKEFLKAGYVYEKELFPTERGTPQGGVISTILANHTLNGLDKHLEDTYKREYAGSGATYRLVVPKVNLVRYADDLIITAPTQERAEHVKETVKQFMAARGLQLSEEKTLITNIADGFDFLGWNFRKYKGKLLIKPSKKAQQNVMEKIRKVIDLCKARTQDELIGRLNPIIRGWCNYHQGTVASGIFSRINHEIFKALWRWACRRHPNKARAARPI

SEQ ID NO: 52455 - DNA, 882 bp, Unknown
  Obtained from environmental sample
  misc_feature (1)..(882): n is a, c, g, or t
gtgaaacgccgcctgtacagtcgaaaatactggggaattggaagcccgtatcatcgcgttagcgtgcggcaaagttcccaagggttacgcccggaggacactgcggcttttagcagaaaaatgtgtagaactccgttacagcgacagcatgtcccacacgacaataagtacccttttaaaaaaacgcaacttaagcctcacctgaaaacatgctggtgtataccgcctgagcagaacagtgcttttgtggcggcaatggaagatgttttagcggtttatgagcgtccttacgatgaaaacacgcctgtggtggatatggacgagaagccgtatcaattactgggcgacacccgtgaatcgttaccggtgaaaccaggatcggcacagctggaagattatgaataccagcggaacgggacatgcagcatttttatattcaccgagcctctttcaggctggcgtcatgcacaagcctttccacggcggacaaaaaaagattgggcgcataggataaagtggctgcttgacgagcaataccccaagtcggaaaaggttgtacttgtgatggataatctaaacacgcatacgatttcttcactgtatgaggcatttccgccggaagaagcgttccgccttgcaagacggcttgagattcattttacgcccaagcacgggagctggcttaacatagccgaaattgaattatccgccatgactgcgcaatgtctgggaaagaggcggattcctgacataataaccttaaatgaagaacttaccgcttggcatactcgtcgcaatatgtctcaaaaaagagttgactggcagtttaccgccgccgatgcgcgtatcaaactgaaaaggctttaccctgttattgtgtaa

SEQ ID NO: 52456 - protein, 293 aa, Unknown
  Obtained from environmental sample
  misc_feature (1)..(293): Xaa is any amino acid
MKRRLYSRKYWGIGSPYHRVSVRQSSQGLRPEDTAAFSRKMCRTPLQRQHVPHDNKYPFKKTQLKPHLKTCWCIPPEQNSAFVAAMEDVLAVYERPYDENTPVVDMDEKPYQLLGDTRESLPVKPGSAQLEDYEYQRNGTCSIFIFTEPLSGWRHAQAFPRRTKKDWAHRIKWLLDEQYPKSEKVVLVMDNLNTHTISSLYEAFPPEEAFRLARRLEIHFTPKHGSWLNIAEIELSAMTAQCLGKRRIPDIITLNEELTAWHTRRNMSQKRVDWQFTAADARIKLKRLYPVIV

SEQ ID NO: 52457 - DNA, 318 bp, Unknown
  Obtained from environmental sample
  misc_feature (1)..(318): n is a, c, g, or t
atggagaaaaaacaaattaaattgacacctgaggaacgggcggtattgaagcggttcagcaggacaggggaacgcaacgtaagattagtcaaccgcgcacggataattcttgcccttgacacgtcaggaggcagaaaggctgagaaacaggaagacatagcggaacatatcgatgtcagccggcagacagtcaacaacgcgaaaaatgattttctggcaataaaagacgtaacacgatttttacagcgcaagcaacgtgaaacgccgcctgtacagtcgaaaatactggggaattggaagcccgtatcatcgcgttag

SEQ ID NO: 52458 - protein, 105 aa, Unknown
  Obtained from environmental sample
  misc_feature (1)..(105): Xaa is any amino acid
MEKKQIKLTPEERAVLKRFSRTGERNVRLVNRARIILALDTSGGRKAEKQEDIAEHIDVSRQTVNNAKNDFLAIKDVTRFLQRKQRETPPVQSKILGNWKPVSSR

SEQ ID NO: 52459 - DNA, 873 bp, Unknown
  Obtained from environmental sample
  misc_feature (1)..(873): n is a, c, g, or t
atgctggtcaatccctgcgactgcctgcccccatccaactccaaggcgctcgaaaatttcatcaaggccggggccaagctgggcatcgacgtggagataatcggcaaagacgactacacccgcctgtccgaatacgatgcgctgttcatccgcgaaaccacgctcgtcaacaaccacacctatcgcttcgcccgccgggccgaaattgaaggcatgccggtcattgacgattccctgtccatcctgcgctgcacaaacaaagtctatctggccgaactcatggcctcccaccacatccgcacgcccaaaaccgttatcgtgcatcacgacaatctgaacgcggcccacaaatcgctcggtttcccctgcattctgaaacagccggacagctcgttctcccttggcgtgatcaaggtggaaacgccggaagaattttatgccacggccacggaaatgctggtcaagtccgatctgatcatcgcccaggaatttttgcctacggcctacgactggcgcatcggcgttctgaacggcgaaccgcttttcgcctgcaagtactacatggccgaacaccactggcaggtttacaacccggcctccaagcacgacgacgatcgctggggcatgaccgaaaccttcgccttggccggcgtgccggagcacatcgtcaagaccgccctgcgcgccgccaacctgataggcgccggcctgtacggcgtggatttgaaggaacacaacggcgaagcctgcatcattgaagtcaacgacaaccccagcctggacgccggcattgaagacgaagtgctcggcccggaactgtacgcgcgcatcatgggggtgttcaaagaccgcatcatcaggctgcgacaataa

SEQ ID NO: 52460 - protein, 290 aa, Unknown
  Obtained from environmental sample
  DOMAIN (86)...(279): D-ala D-ala ligase C-terminus
  misc_feature (1)..(290): Xaa is any amino acid
MLVNPCDCLPPSNSKALENFIKAGAKLGIDVEIIGKDDYTRLSEYDALFIRETTLVNNHTYRFARRAEIEGMPVIDDSLSILRCTNKVYLAELMASHHIRTPKTVIVHHDNLNAAHKSLGFPCILKQPDSSFSLGVIKVETPEEFYATATEMLVKSDLIIAQEFLPTAYDWRIGVLNGEPLFACKYYMAEHHWQVYNPASKHDDDRWGMTETFALAGVPEHIVKTALRAANLIGAGLYGVDLKEHNGEACIIEVNDNPSLDAGIEDEVLGPELYARIMGVFKDRIIRLRQ

SEQ ID NO: 52461 - DNA, 1347 bp, Unknown
  Obtained from environmental sample
  misc_feature (1)..(1347): n is a, c, g, or t
ttgccgagcgggaggttattcatgcaaactaaggccgggcagaagatatactcaaagatcacccagatcacaaaggccacctgcagtctgcaggcgaccggggtcgggtatgacgagatggccgttgtgcatgggcgtcttgcccaggtggtcaagatagtcggcgatcgcgttaccctgcagatctttgccggaaccgagggcatacctacgaacgccgaagtggtttttttggggcatccgcccaccattaaggtaggcgaagaactggccgggcgcttctttaacgcctatggcgcgccgattgacggcggccccgaggtcaacggcgaggaacgtgagattggcggtccttcggtcaatcctgttcgccgcaaacagccttccgaacttatcgccacgggcattgccggtatcgacttgaataacaccctggtcaccggacaaaagattccgttctttgccgatcccgatcagccctataaccaggttatggccatggtcgcgatgcgcgcgaaggcggatcgcattatcctgggcggcatggggctttcgaacgacgattacctcttttttaagagcgtttttgaaaacgccggcgcgcttgaccgcatcatcgcctttgtcaataccaccgagaacccgccggtagaacgcctgcttgtaccgcagaccgccctgaccgctgcggagtattttgccgtggatcacaacgaanaggtgctcgtgctgctgaccgacatgacgctctactgcgacgcgctttcgatcgtgtccaaccgcatggaccagatcccctctaaagacagtatgcccggttcgctgtacagcgacttggcgaagatatacgaaaaggccgcccagttcccggacggcggctcgatcacgatcatcgcggtaacgaccctctccggcggcgacatcacgcacgccatccccgacaatacggggtacatcaccgaggggcagttgtatttgcgccgcgataccgacgtgtcgaaggtcatcatcgacccgttccgcagtttgtcgcgtctgaagcagctcgttatcggcaagaagacgagaaaggatcacccgcaggttatgaactgcgccatccgactgttcgccgatgccgcgagcgcgaagacgaagttggaaaacgggttcgacctcacggactacgacacgcggtcgttgcaattcgcgaaagagtattcgcgtgagttgttggcgattgacatcaacattgaaatcgagcacatgcttgatacggcttggaagctgttcggcaagtactttacgcaggacgaggtgggtatcaagaaggagctgatggatcagttctggaaggcgtcggcgtaa

SEQ ID NO: 52462 - protein, 448 aa, Unknown
  Obtained from environmental sample
  DOMAIN (134)...(344): ATP synthase alpha/beta family, nucleotide-binding domain
  misc_feature (1)..(448): Xaa is any amino acid
MPSGRLFMQTKAGQKIYSKITQITKATCSLQATGVGYDEMAVVHGRLAQVVKIVGDRVTLQIFAGTEGIPTNAEVVFLGHPPTIKVGEELAGRFFNAYGAPIDGGPEVNGEEREIGGPSVNPVRRKQPSELIATGIAGIDLNNTLVTGQKIPFFADPDQPYNQVMAMVAMRAKADRIILGGMGLSNDDYLFFKSVFENAGALDRIIAFVNTTENPPVERLLVPQTALTAAEYFAVDHNEXVLVLLTDMTLYCDALSIVSNRMDQIPSKDSMPGSLYSDLAKIYEKAAQFPDGGSITIIAVTTLSGGDITHAIPDNTGYITEGQLYLRRDTDVSKVIIDPFRSLSRLKQLVIGKKTRKDHPQVMNCAIRLFADAASAKTKLENGFDLTDYDTRSLQFAKEYSRELLAIDINIEIEHMLDTAWKLFGKYFTQDEVGIKKELMDQFWKASA

SEQ ID NO: 52463 - DNA, 1194 bp, Unknown
  Obtained from environmental sample
  misc_feature (1)..(1194): n is a, c, g, or t
gtgctcgatttcaatgttgatgtcaatcgccaacaactcacgcgaatactctttcgcgaattgcaacgaccgcgtgtcgtagtccgtgaggtcgaacccgttttccaacttcgtcttcgcgctcgcggcatcggcgaacagtcggatggcgcagttcataacctgcgggtgatcctttctcgtcttcttgccgataacgagctgcttcagacgcgacaaactgcggaacgggtcgatgatgaccttcgacacgtcggtatcgcggcgcaaatacaactgcccctcggtgatgtaccccgtattgtcggggatggcgtgcgtgatgtcgccgccggagagggtcgttaccgcgatgatcgtgatcgagccgccgtccgggaactgggcggccttttcgtatatcttcgccaagtcgctgtacagcgaaccgggcatactgtctttagaggggatctggtccatgcggttggacacgatcgaaagcgcgtcgcagtagagcgtcatgtcggtcagcagcacgagcacctnttcgttgtgatccacggcaaaatactccgcagcggtcagggcggtctgcggtacaagcaggcgttctaccggcgggttctcggtggtattgacaaaggcgatgatgcggtcaagcgcgccggcgttttcaaaaacgctcttaaaaaagaggtaatcgtcgttcgaaagccccatgccgcccaggataatgcgatccgccttcgcgcgcatcgcgaccatggccataacctggttatagggctgatcgggatcggcaaagaacggaatcttttgtccggtgaccagggtgttattcaagtcgataccggcaatgcccgtggcgataagttcggaaggctgtttgcggcgaacaggattgaccgaaggaccgccaatctcacgttcctcgccgttgacctcggggccgccgtcaatcggcgcgccataggcgttaaagaagcgcccggccagttcttcgcctaccttaatggtgggcggatgccccaaaaaaaccacttcggcgttcgtaggtatgccctcggttccggcaaagatctgcagggtaacgcgatcgccgactatcttgaccacctgggcaagacgcccatgcacaacggccatctcgtcatacccgaccccggtcgcctgcagactgcaggtggcctttgtgatctgggtgatctttga

SEQ ID NO: 52464 - protein, 397 aa, Unknown
  Obtained from environmental sample
  misc_feature (1)..(397): Xaa is any amino acid
MLDFNVDVNRQQLTRILFRELQRPRVVVREVEPVFQLRLRARGIGEQSDGAVHNLRVILSRLLADNELLQTRQTAERVDDDLRHVGIAAQIQLPLGDVPRIVGDGVRDVAAGEGRYRDDRDRAAVRELGGLFVYLRQVAVQRTGHTVFRGDLVHAVGHDRKRVAVERHVGQQHEHLFVVIHGKILRSGQGGLRYKQAFYRRVLGGIDKGDDAVKRAGVFKNALKKEVIVVRKPHAAQDNAIRLRAHRDHGHNLVIGLIGIGKERNLLSGDQGVIQVDTGNARGDKFGRLFAANRIDRRTANLTFLAVDLGAAVNRRAIGVKEAPGQFFAYLNGGRMPQKNHFGVRRYALGSGKDLQGNAIADYLDHLGKTPMHNGHLVIPDPGRLQTAGGLCDLGDL

SEQ ID NO: 52465 - DNA, 522 bp, Unknown
  Obtained from environmental sample
  misc_feature (1)..(522): n is a, c, g, or t
atgagcgaaaaaatattccctctggataaagccgcgcttgaaaaaatcgcgcaaaaatatcctacgcctttttatatttacgacgaaaaagccattatcgaaaatgtccgccggataaaggcggcgttttcggttttttcctcttacaaaaaccactttgcggtaaaggctctgcctaacccttatatactaaaacttctcgccgccgaaggcttcggcgccgactgttccagttacccggaactgctattagctgaaatggccggaatgaagggtgaagacatcatgttcactgccaacgaaactccggcaagcgaatacagagccgctctgaaaatgggcgcggttatcaatctggacgatttttcccacattgaatatctggaaaaaacagccggcttgcccgaattagtttccatgcgctacaaccccggccccttgaaagaaagaaacgcgataataggtaagccggaagaggcaaaatacggtcttacccgcgaacagttaattaacggatactga

SEQ ID NO: 52466 - protein, 173 aa, Unknown
  Obtained from environmental sample
  DOMAIN (28)...(173): Pyridoxal-dependent decarboxylase, pyridoxal binding domain
  misc_feature (1)..(173): Xaa is any amino acid
MSEKIFPLDKAALEKIAQKYPTPFYIYDEKAIIENVRRIKAAFSVFSSYKNHFAVKALPNPYILKLLAAEGFGADCSSYPELLLAEMAGMKGEDIMFTANETPASEYRAALKMGAVINLDDFSHIEYLEKTAGLPELVSMRYNPGPLKERNAIIGKPEEAKYGLTREQLINGY

SEQ ID NO: 52467 - DNA, 756 bp, Unknown
  Obtained from environmental sample
  misc_feature (1)..(756): n is a, c, g, or t
ttgaaagaaaagggagttaagcgttttgccctgcacacaatggtagcttcaaacgagctttccgctccctatcacgttgagaccgcaaggatgctttttgagcttgccgttgagataaacaaaagagcggaagtgcgccttgaatttattaatctcggcggaggagtgggaattccctataagcctgaacagacggctgtagactaccaatctttaacagctgttattcaaagagcgtatgacgaaattatcaaacccgccgggcttgatccgattaacatccgcaccgaatggggaagggttattaccggtccttacggctggcttgtatcaagggcgattcacagaagagaaatttaccgcaagtacataggtctggatgcctgcatggcggacttaatgcgccccgctctttacggcgcgtatcatcacataacgattccaggaaaggaaacggccccgctcactgaagtttacgacgtggttggcagtctgtgcgaaaacaacgacaaattcgccgtccagcttattttgcccaagattgatgttacaagcgagaacgggataggccactttgtcgtcattcacgatgccggcgcgcacggaagggcgatgggttttaactacaacggcaaactgcgctgcggggagttgcttctgcgccgggacggctctgtcgtgcagatacgccgccctgaaacggtagaagactatttcgctactttggatattgccggggttaatgattttaagtag

SEQ ID NO: 52468 - protein, 251 aa, Unknown
  Obtained from environmental sample
  DOMAIN (108)...(220): Pyridoxal-dependent decarboxylase, C-terminal sheet domain
  misc_feature (1)..(251): Xaa is any amino acid
MKEKGVKRFALHTMVASNELSAPYHVETARMLFELAVEINKRAEVRLEFINLGGGVGIPYKPEQTAVDYQSLTAVIQRAYDEIIKPAGLDPINIRTEWGRVITGPYGWLVSRAIHRREIYRKYIGLDACMADLMRPALYGAYHHITIPGKETAPLTEVYDVVGSLCENNDKFAVQLILPKIDVTSENGIGHFVVIHDAGAHGRAMGFNYNGKLRCGELLLRRDGSVVQIRRPETVEDYFATLDIAGVNDFK

SEQ ID NO: 52469 - DNA, 447 bp, Unknown
  Obtained from environmental sample
  misc_feature (1)..(447): n is a, c, g, or t
atgttacatggtctgactctattcatgggagttaaagtaatagacgaccagcacaaagggcttttggatttcgttaatgatttattcagtcattctaccggaaacgaaaaggaagaaatggaatactttaagaaagtaatccaacaggcggtaaaatacataaaagagcatttcagtacggaagaaaaattaatgttagcgaccaaatttcccggatacgccgagcataaaaaaattcacgatgaatttacgctgacagtagttaatagcgtgaaggactttgaaggaggaaagcggctggttcttgagaaatttgcctattttctcaaagattgggttttaagccatgtagccgtaatggataagcaatacgccctgtatttcaagaaaatcgccactcgcaacgaggatggcaaactgactatttcaagcgcaaacatagcataa

SEQ ID NO: 52470 - protein, 148 aa, Unknown
  Obtained from environmental sample
  DOMAIN (10)...(68): Hemerythrin HHE cation binding domain
  misc_feature (1)..(148): Xaa is any amino acid
MLHGLTLFMGVKVIDDQHKGLLDFVNDLFSHSTGNEKEEMEYFKKVIQQAVKYIKEHFSTEEKLMLATKFPGYAEHKKIHDEFTLTVVNSVKDFEGGKRLVLEKFAYFLKDWVLSHVAVMDKQYALYFKKIATRNEDGKLTISSANIA

SEQ ID NO: 52471 - DNA, 2025 bp, Unknown
  Obtained from environmental sample
  misc_feature (1)..(2025): n is a, c, g, or t
atgcttcataccatgcgcaacatcggcatcatggcccatattgatgccggcaagaccaccaccaccgagcgtatattattttataccggaaagagccacaggattggcgaggtggacaacggcgaggcgatcatggactggatggagcaggagcagcagcggggaatcactatccagagcgcggcgactaccacctattggaaaaagcaccagattaacattattgacactcccggccatgtggattttaccgcggaagtggagcgatccctgcgcgtgctggacggcgccattgccatttttgacgcggtgcacggggtggaaccccagaccgagactgtctggcggcaggcgcagcgctaccatgtttcctgcgtgggctatgtgaacaaaatggacaggctgggcgcggacttttactttgtgcttgaggatgtgcggaaaaaactcggcgctaatgcggcggcattgcagatacccattattacagaaagctcttttgaaggcgtcatcgatctgattgagatgcgggagatacgctgggaaggaaacgagggcgagaccatggcgctatcgccagttgcgaaagaaagggaagcggccgcaaaggaatggcgggaaaaacttattgacgcgctttccagtgtttccgattccattaccgaaaaatatctggcgggggaagaactcgacgccgctcttatccgcacggaattacgcaaggctgtattgaagcggcaaattcttcctattctaaccggggcttcccgccgtaatatgggagtacagcctgtcattgacgcgattgttgattacctccccgcgcctgatgaaataccgcccgccgtgggccttcatctaaaaaaagaacaggatgtcagcgtgccatgcgatcccaaaggccaacctctgggtattgttttcaaaatacaaaatgaccgtgaggcgggaagcctgtgttatgtgcgcatgtattcaggttcgatcaagccgggcgcagcggtttataatatcggtaaaaaaaagagggagcgcgcaaaccgtattttgcgtatgcattccaacaagagcgacccaatggatgagttaagcgccggggacattggcgtgatcatcgggatgaagcttgcgcagacaggcgataccataggcagcgagggctggccggtactgctggaaaaaatgcaattccccgagcctgtgatctccgtttccattgagcctaaaacaatttccgagcaggacaagcttaaagacatactctcgattctttccaaggaagaccccacgtttaccaccagggaaaacgaggaaacaggccagcttatcatctccggcatgggcgaactgcatctggatgttttggttacgcgtatactcaaggagtacaacctcagcgcgaaagtagggaaaccccaggttacctatcgggagtcgataagcgcgatcgccgagcgaaccgagaatttctcacgcgtaatagccggcaaggaaaacgtcgcgagtttaaccctgcgcgtggagccggcggaacgcggaaaaggaaacaggtattcatgcgcgatcaaaaataacgaaatacccgaggaaattttctacgcggtggagcgcggcattaccggcgcgttttcttccgggatcgttatgggttacccctgtattgatattacggtgactgtcaccagtattatctattctgaaaatggcacggagttcgcttttgaagcctgcgccagcatggcctttgacgaagcctgccgcgccgcttcccccatattactcgaaccgatcatggcggttaaccttaccagcccccatgaatttgtcggcgaggtgatgggccttgtcacccagcgcggcggtcagattttcagcatggacgcaaaggccgacattgacgaaataaaagcccaggcgccaatggcgcagatgttcggctttatgacctcgctgcgcagcgtaagccagggccgcgcgagtttcagcatggaattttcgcatttcgagaaaaagaccggaaaataa

SEQ ID NO: 52472 - protein, 674 aa, Unknown
  Obtained from environmental sample
  DOMAIN (317)...(384): Elongation factor Tu domain 2
  misc_feature (1)..(674): Xaa is any amino acid
MLHTMRNIGIMAHIDAGKTTTTERILFYTGKSHRIGEVDNGEAIMDWMEQEQQRGITIQSAATTTYWKKHQINIIDTPGHVDFTAEVERSLRVLDGAIAIFDAVHGVEPQTETVWRQAQRYHVSCVGYVNKMDRLGADFYFVLEDVRKKLGANAAALQIPIITESSFEGVIDLIEMREIRWEGNEGETMALSPVAKEREAAAKEWREKLIDALSSVSDSITEKYLAGEELDAALIRTELRKAVLKRQILPILTGASRRNMGVQPVIDAIVDYLPAPDEIPPAVGLHLKKEQDVSVPCDPKGQPLGIVFKIQNDREAGSLCYVRMYSGSIKPGAAVYNIGKKKRERANRILRMHSNKSDPMDELSAGDIGVIIGMKLAQTGDTIGSEGWPVLLEKMQFPEPVISVSIEPKTISEQDKLKDILSILSKEDPTFTTRENEETGQLIISGMGELHLDVLVTRILKEYNLSAKVGKPQVTYRESISAIAERTENFSRVIAGKENVASLTLRVEPAERGKGNRYSCAIKNNEIPEEIFYAVERGITGAFSSGIVMGYPCIDITVTVTSIIYSENGTEFAFEACASMAFDEACRAASPILLEPIMAVNLTSPHEFVGEVMGLVTQRGGQIFSMDAKADIDEIKAQAPMAQMFGFMTSLRSVSQGRASFSMEFSHFEKKTGK

SEQ ID NO: 52473 - DNA, 414 bp, Unknown
  Obtained from environmental sample
  misc_feature (1)..(414): n is a, c, g, or t
atgcacgcgccatcggcgtgtaatacgcgcccctgggaatttatagcggtcacaaaacgggaaacgcttgacgaaatcgtcagggtgcacccttacgccggtatgtgcgcgacagccgcggccgccatcattgttgtggcaatcccccaaactgacgccaatgggcccataggcttttacccccaggactgcgccgccgccacgcagaacattctgctggaagcggtctctatcgggcttggatgctgctggtgcggcgtataccccaaagagaatcacatagcatcgattcggcagctctttaacatcaaggaaccaaaaataccatttaatgtaattgcgataggaagccccggcgagacccctgtacgcagaggctttttcgacgaaaaaaaagtaacgtatatcaattaa

SEQ ID NO: 52474 - protein, 137 aa, Unknown
  Obtained from environmental sample
  DOMAIN (1)...(117): Nitroreductase family
  misc_feature (1)..(137): Xaa is any amino acid
MHAPSACNTRPWEFIAVTKRETLDEIVRVHPYAGMCATAAAAIIVVAIPQTDANGPIGFYPQDCAAATQNILLEAVSIGLGCCWCGVYPKENHIASIRQLFNIKEPKIPFNVIAIGSPGETPVRRGFFDEKKVTYIN

SEQ ID NO: 52475 - DNA, 612 bp, Unknown
  Obtained from environmental sample
  misc_feature (1)..(612): n is a, c, g, or t
atgagcagaggtaaagcggttgggcggacgctcttgctgaccgcggttatggtcgcggcgctggccgctccggcggcggcgcggaaggggtcgttcaccgacaaccgggacgggaaggtttacgagacggtgaagatcggcaaacagacttggatggccgagaacctgaattataggacgcaaagcggctcttggtgctacgacaacgatgagtcaaactgcaaaagatacggcaggctgtacgattggaatacggctatgggtgcatgccccgccggatggaagctgccggacacggcggcttgggaggtattgaaggcggcggcgagcgggcgggagaccgccggcaggaagttgaagtcaaggagcggctggaaagaaaacggcggcggcacggacgactacgggttttcggccctgcccggcggccaccgctattccgacggcggtttctacgacgccggcagcataggctactggtggaccgccacggagtacgatgtcagcgacgcctacctccggtacatgaactacggcaacgacggtctgtacgagaactactactacctcgaccggaacgaggggtactccgttcgttgcgttaagcaatag

SEQ ID NO: 52476 - protein, 203 aa, Unknown
  Obtained from environmental sample
  SIGNAL (1)...(22)
  misc_feature (1)..(203): Xaa is any amino acid
MSRGKAVGRTLLLTAVMVAALAAPAAARKGSFTDNRDGKVYETVKIGKQTWMAENLNYRTQSGSWCYDNDESNCKRYGRLYDWNTAMGACPAGWKLPDTAAWEVLKAAASGRETAGRKLKSRSGWKENGGGTDDYGFSALPGGHRYSDGGFYDAGSIGYWWTATEYDVSDAYLRYMNYGNDGLYENYYYLDRNEGYSVRCVKQ

SEQ ID NO: 52477 - DNA, 711 bp, Unknown
  Obtained from environmental sample
  misc_feature (1)..(711): n is a, c, g, or t
atgacgacaatcattgatttccacacccatttcttcccgccggagctggcggagcgggcaatcacgcggcttatagagaacgccgcgccgacaatcgccatgaagaaccataccgacggcacggtcggcggcctcatagagagcatgcgggccggcggaatcggcaagtcggtcaccctcccggtggccacgaagccgtcgcaggtatccacgataaacaggggggtagcggccggtcccgcctacccggagataatccagttcggcgccatgcaccccgaaatggagggtttcgaggcggagatcgactttatggccgcaaacggcattaagggcataaaactgcacccggagtaccaatactgctacgtagacgcccccaaggccttccccatgtacgagaagctagcctcggccggccttatagtcgtcttccactccggcaaagaccccggcccgttcaccaacgaccacgccctcccccccgcgctccgcaaaatccacgaaaccttccccgccctaaaaatggtagcggcgcaccttggcggctggacggtctggaaagaggtcgaagagacgctagccggattagacctctttttcgacacatccgccatctacaagctactcccgccggaaggattttgtccgtatttgcagaaaacacggcatagagaaaatccttttcggcagcgattcaccctggtatga

SEQ ID NO: 52478 - protein, 236 aa, Unknown
  Obtained from environmental sample
  DOMAIN (5)...(233): Amidohydrolase
  misc_feature (1)..(236): Xaa is any amino acid
MTTIIDFHTHFFPPELAERAITRLIENAAPTIAMKNHTDGTVGGLIESMRAGGIGKSVTLPVATKPSQVSTINRGVAAGPAYPEIIQFGAMHPEMEGFEAEIDFMAANGIKGIKLHPEYQYCYVDAPKAFPMYEKLASAGLIVVFHSGKDPGPFTNDHALPPALRKIHETFPALKMVAAHLGGWTVWKEVEETLAGLDLFFDTSAIYKLLPPEGFCPYLQKTRHRENPFRQRFTLV

SEQ ID NO: 52479 - DNA, 873 bp, Unknown
  Obtained from environmental sample
  misc_feature (1)..(873): n is a, c, g, or t
atgtctgtaaatcagtataatacaggcaagggagccaaaagtgaagataatgttcttgtcaaacaagtccccgatactaaaaatattaccggtgaagcgatgaccccagaaggaacggtcaaccgcgccgccctgcccgccgtttttaacccggatgatctgtacgcgctggaagcggcgcttcaaataaaggacgctaacccgggaacaaccgtaaacgtgataacaatgggcccgcccgccgccgccgcagtgctgaaagagtgcctttaccggggagcggactttaccgccctcgtttcggacagaggttttgccggtgcggataccctcgccacttcttacgcgttaaagtgcgcgatagaaaaagtcggcgcttacgatttggtgctgtgcggcagacaggcgattgacggcgacaccgcgcaggtaggcccgcagaccgccgagaaactcggaataaatcagataacgtgcgtttcaaaaatcgaaaaacttgatgggacaaaaaaagaaataaccgcgatacgctcaatagagggcggatgggaaaaagttaaaacgaaactccccgtccttcttacctttaccgaagagggagaaacgccccgtcccgcgtccgcaatcaagacctgcgctttcaagagggctgcccctgccgccggagacgccggctctcccagcgacccgttcgcggaagggacgcagagcgcgaaccccatggcgttatgggacatcgccgcgataaacgccgatcccgtgcagtgcgggctttccggttcgccgaccaaggtgaagaaaatcgattcagtagtgcttaccgccgcggatatcaggtacatagagccgagcgaggcgggcgtcaccgagtga

SEQ ID NO: 52480 - protein, 290 aa, Unknown
  Obtained from environmental sample
  DOMAIN (37)...(234): Electron transfer flavoprotein domain
  misc_feature (1)..(290): Xaa is any amino acid
MSVNQYNTGKGAKSEDNVLVKQVPDTKNITGEAMTPEGTVNRAALPAVFNPDDLYALEAALQIKDANPGTTVNVITMGPPAAAAVLKECLYRGADFTALVSDRGFAGADTLATSYALKCAIEKVGAYDLVLCGRQAIDGDTAQVGPQTAEKLGINQITCVSKIEKLDGTKKEITAIRSIEGGWEKVKTKLPVLLTFTEEGETPRPASAIKTCAFKRAAPAAGDAGSPSDPFAEGTQSANPMALWDIAAINADPVQCGLSGSPTKVKKIDSVVLTAADIRYIEPSEAGVTE

SEQ ID NO: 52481 - DNA, 1335 bp, Unknown
  Obtained from environmental sample
  misc_feature (1)..(1335): n is a, c, g, or t
gtggatgagaacataccgtcaaagttgtacggagatgatctgcgtatcaaacagattttaaataacctgctttccaatgccttcaaatatacggatgagggtgagatttcgctgtccgtcgccaccgaatatgccccacagggcgcccggcaggtaacgcttgtgttaagcgtgagtgacacaggacagggcatgacaagtgagcagttggacaaacttttcgacgagtacacccgctttaatacgggagctaaccgtacaaccgaaggtacgggtttgggcatgagcattacgaagcagctggttaagatgatggacggcgatatttccgtggaaagcgaaccgggtagaggttcgacttttaccgtgcgtttgccacagggaattataggcgccgaggcattgggcagtgatgtagcggacaacctcaggcagttccgtgttgacaaagccgggcaaatgaagaaaggtccgcgaatcataagagagtatatgccttatggcagagttttgattgtggacgatgtggaaacgaacctgtatgtcgcgaggggactgatggctccctacggtttgtcggttgaaactgccacaagcggccttgaagcggttgataaaatcaggaacggctctactttcgacatcatatttatggaccattatatgcctaaaatggatggtattgaagcggcaaaaattattcgcggtctgggttatgtaaatcccatcatcgcgcttacggctaacgccctgatcgggcaggcggagatgtttatgagaaacgggttcgacgggtttatttccaagcctatagatatacggcagctgaacgtttcgttgaacaagctgatacgcgacaagtacccgcccgaggttgttgaagcggcgcggcagcaagtgctcaagctcagtatggaaaaatccgccgcagaggcaggacagccggtttccgatccggaactggcggcagtctttgtgcgggacgccgaaaaggcccttgccagactggaatcaatacaatcacacgcattccgcagaaccgacgatattagggcatttgttatcgacgttcacgcgatgaaaagcgctctcgcgaatatcggcgaaacagagctttccgccgtagcgcttaaactggaacaggcgggacggaccgtagatgttccggtattgagggccgaaaccccggcgtttctggaagcgttgcgtgaagtgaccaaaaaaaacaaaccaaagcaagccgacgatgatgcggttgaagaagaatcagacgatattcgggcgtatttgaacgataaattacttgtcattaaaaaagncgtgcgaggaatatga

SEQ ID NO: 52482 - protein, 444 aa, Unknown
  Obtained from environmental sample
  DOMAIN (320)...(401): Hpt domain
  misc_feature (1)..(444): Xaa is any amino acid
MDENIPSKLYGDDLRIKQILNNLLSNAFKYTDEGEISLSVATEYAPQGARQVTLVLSVSDTGQGMTSEQLDKLFDEYTRFNTGANRTTEGTGLGMSITKQLVKMMDGDISVESEPGRGSTFTVRLPQGIIGAEALGSDVADNLRQFRVDKAGQMKKGPRIIREYMPYGRVLIVDDVETNLYVARGLMAPYGLSVETATSGLEAVDKIRNGSTFDIIFMDHYMPKMDGIEAAKIIRGLGYVNPIIALTANALIGQAEMFMRNGFDGFISKPIDIRQLNVSLNKLIRDKYPPEVVEAARQQVLKLSMEKSAAEAGQPVSDPELAAVFVRDAEKALARLESIQSHAFRRTDDIRAFVIDVHAMKSALANIGETELSAVALKLEQAGRTVDVPVLRAETPAFLEALREVTKKNKPKQADDDAVEEESDDIRAYLNDKLLVIKKXVRGI

SEQ ID NO: 52483 - DNA, 717 bp, Unknown
  Obtained from environmental sample
  misc_feature (1)..(717): n is a, c, g, or t
gtgggcggcgacggcgttgtgctaatactgcggtcgagttttgcagacgcgaaaatgaggatgttcaacctcgacggcagcgaaggcagcataagcggaaacgcgatccgctgcgtcgcgaaatttctttacgacaacgggattgtaaaaaagcgcgatatgcggattgatacaaagagcggcgtgaaagagctttacctttccacacggaatggagcggtatcatcagtcacggtggacatgggacgcgcggagctgcgccccgaaaaaatccccgtcaatttggcgggagaaaacgtgatagcgaaaaaagtaaccataggcgggaaaaagtatgagattacctgcgtctcaatgggcaatcctcacgccgtagtgtttcatgataatctggatgatcttgatttaagtgaaatagggcccctgtttgaaaacgacgctttatttcccgaccgcgtgaacacggaatttgtcagagttgtaaccaggaatcgcttaaaagtacgcttatgggaacgcggttccggtgaaacgctggccagtggcacagccgcctgcgcttcggctgtggccgcagtgctgaacgggcactgcgacaaggacacggacatcaaggtacaactgcccggcggggatttaattatccgttacacggatgaagcagtgtacatgaccggcgattgcataaaagtcttcgacggaacggtggagatatga

SEQ ID NO: 52484 - protein, 238 aa, Unknown
  Obtained from environmental sample
  DOMAIN (1)...(87): Diaminopimelate epimerase
  misc_feature (1)..(238): Xaa is any amino acid
MGGDGVVLILRSSFADAKMRMFNLDGSEGSISGNAIRCVAKFLYDNGIVKKRDMRIDTKSGVKELYLSTRNGAVSSVTVDMGRAELRPEKIPVNLAGENVIAKKVTIGGKKYEITCVSMGNPHAVVFHDNLDDLDLSEIGPLFENDALFPDRVNTEFVRVVTRNRLKVRLWERGSGETLASGTAACASAVAAVLNGHCDKDTDIKVQLPGGDLIIRYTDEAVYMTGDCIKVFDGTVEI

SEQ ID NO: 52485 - DNA, 939 bp, Unknown
  Obtained from environmental sample
  misc_feature (1)..(939): n is a, c, g, or t
atgatcagatggccgagaagcgccagcggcacaggcgaattcctcaagcagcagcttgcccgcatggacatgacgctggacgatatcgacagggttccagaaacagcgaaggtacacgccctttccacccgctgctcggtgtttatgaaaagcgactgtacccaccggctcaacaagcgcgaggcgaccaaagatgacatagtgctttcgctatccgacgtgatggccgtcaaggttatcgactttttgaaacgcgccaaagtgacaaagggcagggtagtgctgacgggcgggattaccctgaacaggcatatcatccgctttatccgcgagaaggccccgcagattgaatttatcatccccgaaacagcgccggtttttgaggcgctgggcgccgcggtaatggccccgcaatcggggagccctctgccccatgtcggcaaactcctcaagaccaacgagatacgtttcggcgcgctgggcgcgctgcgcgactggaaggacaaggtacagttttttgacaagggcgaaggaaaagtccgcgcaagacatcgctatattctgggcgttgacggcggctcgaccactaccaaggcctgtctggttgatatggaaaccgacgagatcgtggcgagccattacggcaggacccacggcgatccggtgaaggccctgaaagagtgcctgcggataattcaggataaggtgatagccgataccggggataaaaagatcgacataagtctggtttccactaccggttccagcagggagatactcggggtattccttgaaactcccggcgtttacaacgagataatcgcccattcggttggcacgactttttttgacgggaagtggaaacgatttttgaaatcggcggacaggacgctaagtatgtgcttcttaaaaacggagtgcctattgattacgcgatga

SEQ ID NO: 52486 - protein, 312 aa, Unknown
  Obtained from environmental sample
  misc_feature (1)..(312): Xaa is any amino acid
MIRWPRSASGTGEFLKQQLARMDMTLDDIDRVPETAKVHALSTRCSVFMKSDCTHRLNKREATKDDIVLSLSDVMAVKVIDFLKRAKVTKGRVVLTGGITLNRHIIRFIREKAPQIEFIIPETAPVFEALGAAVMAPQSGSPLPHVGKLLKTNEIRFGALGALRDWKDKVQFFDKGEGKVRARHRYILGVDGGSTTTKACLVDMETDEIVASHYGRTHGDPVKALKECLRIIQDKVIADTGDKKIDISLVSTTGSSREILGVFLETPGVYNEIIAHSVGTTFFDGKWKRFLKSADRTLSMCFLKTECLLITR

SEQ ID NO: 52487 - DNA, 1614 bp, Unknown
  Obtained from environmental sample
  misc_feature (1)..(1614): n is a, c, g, or t
gtggaaacgatttttgaaatcggcggacaggacgctaagtatgtgcttcttaaaaacggagtgcctattgattacgcgatgaacgaagcctgctctgcgggaacggggtcttttctggaagaatccgcgtcaggcgatctttcgattcacagcgcgaaggacatcggcccgattgcgttagatgcaaattcaccgtgcaagttcggcgaacattgttcggcgtttataaacagcgatatccgcaaggcggttcagcagggcgcgggaagggaaaatatcacggcggggattgtttgttcaattgtatcgaattatcttaaccgtgttgtcggaaaccgcaccataggcgcgaagattttccttcagggaggggttgcgaaaaatccggcagtccctcttgcgtttgcgatgcttttggacaaagagatacttgttccgccgtctcccgagcttatgggttgtttcggggttgctcttcttgcgaaacgcaaacatgacgcaggtcttcttgcggaaaaaagaatcgttattgacgaaatcgtcaaccgtgaaatcgggtatgaacgggtgtttacctgtcagtcgtgtgaaaatctctgtccaattcaggtgttaaacgtaaacaacagcaagtatatgttcggcggcaggtgcaacaaatacaccaacatgcgcaaacatgtaaaggacgttcctgtttttgattatgttgaaaaacggcagaagatgctgtttgaggaatatgccgctcccggaatagaaaacccgaaggactccgatcctaaaaccgcctctgccaaaaactacactgtcggtatcccgcgcgctttttcggttcatacgctgtacccgctttacagntgggtttttcatgagcttggcattaaaacgttcctttctaccgaggtggcgcatgagggggtcgcgcgtgcggaatccacttactgttttccggccgaaatcgcccacggcgcggtgcaggactgcctggacaagaaggccgactatgtgtttctgccgcatttccgggacatgccgtcctatgaaaccgacattcacgcgaacttttgtcccataacgcaggggcttccctattatattgaaaaggcctttcccgatatcgacaaaaaccggtggctgccgttagtcgtcagttttaaattcggcgaggggaaggcgctggagcttttctgcgagatgacaaagcggctgggcattgacgaggctgagacaaagacggcctttaccgtggcgatgtcaaaacagcaggcgtactttgacgcgatacacgcgatgggcaaagaggccctggaagaggcgcgcaaggcggacaggcccgtcatcgccacgcttggccggccctacaacgcctttaccccggaagcgaacatgggcataccccgcaagttcaccactcgcggttattcgatcatccccttcgatatccttcccttccacgacgaggtgatctttccgaacatgtactggtattacggccagcaggatttaaaggccgcgaacctcctcaaaaagaggataatatttatcttagctttattaccaatttttcctgcgctccggattcttttattttgcattacatcaaatgggtga

SEQ ID NO: 52488 - protein, 537 aa, Unknown
  Obtained from environmental sample
  misc_feature (1)..(537): Xaa is any amino acid
METIFEIGGQDAKYVLLKNGVPIDYAMNEACSAGTGSFLEESASGDLSIHSAKDIGPIALDANSPCKFGEHCSAFINSDIRKAVQQGAGRENITAGIVCSIVSNYLNRVVGNRTIGAKIFLQGGVAKNPAVPLAFAMLLDKEILVPPSPELMGCFGVALLAKRKHDAGLLAEKRIVIDEIVNREIGYERVFTCQSCENLCPIQVLNVNNSKYMFGGRCNKYTNMRKHVKDVPVFDYVEKRQKMLFEEYAAPGIENPKDSDPKTASAKNYTVGIPRAFSVHTLYPLYXWVFHELGIKTFLSTEVAHEGVARAESTYCFPAEIAHGAVQDCLDKKADYVFLPHFRDMPSYETDIHANFCPITQGLPYYIEKAFPDIDKNRWLPLVVSFKFGEGKALELFCEMTKRLGIDEAETKTAFTVAMSKQQAYFDAIHAMGKEALEEARKADRPVIATLGRPYNAFTPEANMGIPRKFTTRGYSIIPFDILPFHDEVIFPNMYWYYGQQDLKAANLLKKRIIFILALLPIFPALRILLFCITSNG

SEQ ID NO: 52489 - DNA, 834 bp, Unknown
  Obtained from environmental sample
  misc_feature (1)..(834): n is a, c, g, or t
ttgcattacatcaaatgggtgatggggcaaaagcccttcctcgtgctggaactggattcccattccgccgacgcgggggtggatacgcgggttgaagcgtttctcgacattattgacggataccgggcgaagaaaaacgaactggaagcggagcgttatgacaacggctggcgttttgtcagcaagaaacgggattcaggcgggttcgatctgcggatagacaatgtgaaaaccggcgagcaggttcccatcgcgggcaacaagcgggtaaaggtgctgctctccaacatgggggcgatttccaccgagtacatgggcgcggcggtgcgcagcctgggaatcagcgcggaagctctcccggtggccactgccaaaacgattcagattgcccgcgcccacgcgtcggggaaagagtgcgtccccagccatttggtgctgggcagcgccctggagttctttttcagtgacaggtaccgcaaggacgaattgtacctgctctttgtgccgattaccaccggcccctgccgcaccggccagtattacgtgttttacgaaaatctgttccgcgacttgcagcttgaaaatgtggtggtgtttatcctttccgcggacaattcctacaacgaactgggtcccagctttgcccgggagatgtggaaggggctggtactgtccgattacctcaaggacattcaatgcagccttaaagcttgcgctgccgatccggtcaaggcacaggcggattttgagcatgcatggcgaagggtcatgcacgcggtggagcataatcccaaaaatttgtggaaagaactccggcatgtgccgcggacgtaa

SEQ ID NO: 52490 - protein, 277 aa, Unknown
  Obtained from environmental sample
  misc_feature (1)..(277): Xaa is any amino acid
MHYIKWVMGQKPFLVLELDSHSADAGVDTRVEAFLDIIDGYRAKKNELEAERYDNGWRFVSKKRDSGGFDLRIDNVKTGEQVPIAGNKRVKVLLSNMGAISTEYMGAAVRSLGISAEALPVATAKTIQIARAHASGKECVPSHLVLGSALEFFFSDRYRKDELYLLFVPITTGPCRTGQYYVFYENLFRDLQLENVVVFILSADNSYNELGPSFAREMWKGLVLSDYLKDIQCSLKACAADPVKAQADFEHAWRRVMHAVEHNPKNLWKELRHVPRT

SEQ ID NO: 52491 - DNA, 387 bp, Unknown
  Obtained from environmental sample
  misc_feature (1)..(387): n is a, c, g, or t
atggcgaggataagacattttgtaaaagttttcaataataatatcatatatattgcggaaaagactgatacccatgaaataaccggatggatagcatataatcataaaaaagaatatgtattgatcgaaggattttatttgttcctgaaagaacagcgaaaaggaataggaacaattattttagattattgtataaatatctggagaaataataataaaaaatttgttatattaaaagctctgaaaaacgctccatggtcaattgatttttacaaaaaaaataattttgtcatttatgaaaccggcaaaaaacatgaaaataatcttaatttccttaaatctgaaaagatagaaaaatgggaaatattaatgtacagaaaaatatga

SEQ ID NO: 52492 - protein, 128 aa, Unknown
  Obtained from environmental sample
  DOMAIN (19)...(97): Acetyltransferase (GNAT) family
  misc_feature (1)..(128): Xaa is any amino acid
MARIRHFVKVFNNNIIYIAEKTDTHEITGWIAYNHKKEYVLIEGFYLFLKEQRKGIGTIILDYCINIWRNNNKKFVILKALKNAPWSIDFYKKNNFVIYETGKKHENNLNFLKSEKIEKWEILMYRKI

SEQ ID NO: 52493 - DNA, 1686 bp, Unknown
  Obtained from environmental sample
  misc_feature (1)..(1686): n is a, c, g, or t
atgaaaaaaccgaaaaaaacgtcttttgcgatgttatttattaccgtctctttgcttatgattttatccataacagtatctttatccgttatatttttttacaatcttcgtaaaattgtaatcaatttaacggaattaagcacaaaaacaaacgtcgcgcgctcgcgggatatggtgttatcctttatcaaggaacatgaagaagcaataaaacaattttccgccggcattacgcatcttttcaggcaaagagcggtttccactgagtccgtcgccggatacttgagcgacattaaagaaatagtgcccaacagccttgatctttattttaccaataacgtgatgtggaacaagcctggcggttttgcctcgttcgcaggaggatggattcctgacgacgattgggataatacccagcgctcctggtttaccgacgccaagaaagcacagggcaaaatcgctttttccgaaccctatgtcgattctgaaaccggcgatgttatcattaccctttcaatggcggtatttgacagcgaaggaacggatatcggcgtatcggcggacgatgtcgcggtaaatgtcatgaaagatataattaacgcgatgcgcgattttcccgggcaggaaatgtatattattaactcaggcgggctttttattacccatgaagacatcaacgcggttatggaaaaagatttctttgaggaattaagccttgaaaaatatcgcgcctccgtattgagtccaactgactttttcaatattgacaaaaatatttttatttattcctcagccatacccaataccggctggattctagtatcaacgataccgtcatctgtaatatttaatgatataaatacccttatcctgcgcctgattattttatgcatagcgatgctcgcggtagttgtttttatcttggtcttttttgtcgcgcgaaaaatcagctctccgataaaggcgatccattcggcactggaaaagctaaaggacggggatttaaccgtaaaagtagccgttaaatccgaagatgaaatcggggaattgtcaggttttttcaatatgacactggaaaaaatcaaaacccttgtaggaaccataaaatacaaaatcaacgggcttaaccatatcagttgggaactgtccgccaatatggggaaaacctctaaggcagttcagcaggttagctcgaatctggacaatatgaagaaccttatggtcaaacaggaagccggcacgaccgaagccggcaaggcggtaggggatattaaagaaaacattgacagcctgaacaaaatgatcgatgaacagactgaaagcgtaaacaggtcgtcctccgccatcgaggaaatgacagccaatattaactcggtaacccgtacgctggttgaaaacagtaaaaacgtcactgttttaacagaagcttcagaaatcgggaagacgggccttcagacagtcgcgcaggagatacaggaaatagcccgcgattccgaacgacttctggaaataaacgccgataaaggcccatatcgcaagccagaccaatttactttcgatgaacgccgcgatagaagcggctcacgccggagacgcgggaaggggctttgcagtngtcgccgaggaaatcgcaaaactggcggaaatttccggcgggcagtcaaagatcataggggcggtgcttaa

SEQ ID NO: 52494 - protein, 561 aa, Unknown
  Obtained from environmental sample
  SIGNAL (1)...(27)
  DOMAIN (155)...(235): Cache domain
  misc_feature (1)..(561): Xaa is any amino acid
MKKPKKTSFAMLFITVSLLMILSITVSLSVIFFYNLRKIVINLTELSTKTNVARSRDMVLSFIKEHEEAIKQFSAGITHLFRQRAVSTESVAGYLSDIKEIVPNSLDLYFTNNVMWNKPGGFASFAGGWIPDDDWDNTQRSWFTDAKKAQGKIAFSEPYVDSETGDVIITLSMAVFDSEGTDIGVSADDVAVNVMKDIINAMRDFPGQEMYIINSGGLFITHEDINAVMEKDFFEELSLEKYRASVLSPTDFFNIDKNIFIYSSAIPNTGWILVSTIPSSVIFNDINTLILRLIILCIAMLAVVVFILVFFVARKISSPIKAIHSALEKLKDGDLTVKVAVKSEDEIGELSGFFNMTLEKIKTLVGTIKYKINGLNHISWELSANMGKTSKAVQQVSSNLDNMKNLMVKQEAGTTEAGKAVGDIKENIDSLNKMIDEQTESVNRSSSAIEEMTANINSVTRTLVENSKNVTVLTEASEIGKTGLQTVAQEIQEIARDSERLLEINADKGPYRKPDQFTFDERRDRSGSRRRRGKGLCSXRRGNRKTGGNFRRAVKDHRGGA

SEQ ID NO: 52495 - DNA, 546 bp, Unknown
  Obtained from environmental sample
  misc_feature (1)..(546): n is a, c, g, or t
atgaacgccgcgatagaagcggctcacgccggagacgcgggaaggggctttgcagtngtcgccgaggaaatcgcaaaactggcggaaatttccggcgggcagtcaaagatcataggggcggtgcttaagaagataaaagaatctatagatacaataacaaagtccacagataacgtgcttaacaaatttgaggctattgactcaagtataaacacggtagcccggcaggaagaaaacatccgaagcgcgatggaagagcagaacgagggcagtaatcttcttttgaaaaacaccggcggtttgaacgaaataacccgtcaggtaaagagaggttctcaggaaatgcttgaaggcgcaaaagaagtaatacaggaaagcaacaacctggaaaaattatcgcaggaaatttcaggcggcatgaacgaaatgtcgacaggcgcgggccaaattaatgtggcgataaaccatgttaacgaaataagcgcgaaaaaccgcgagggaatagaggctttgatacgggaagtttccaggtttaaagtggagtag

SEQ ID NO: 52496 - protein, 181 aa, Unknown
  Obtained from environmental sample
  misc_feature (1)..(181): Xaa is any amino acid
MNAAIEAAHAGDAGRGFAVVAEEIAKLAEISGGQSKIIGAVLKKIKESIDTITKSTDNVLNKFEAIDSSINTVARQEENIRSAMEEQNEGSNLLLKNTGGLNEITRQVKRGSQEMLEGAKEVIQESNNLEKLSQEISGGMNEMSTGAGQINVAINHVNEISAKNREGIEALIREVSRFKVE

SEQ ID NO: 52497 - DNA, 948 bp, Unknown
  Obtained from environmental sample
  misc_feature (1)..(948): n is a, c, g, or t
ttgaaggatttttcgcagacaaaagacatgaacgcgatcctctccggcgcggatccaaatatcaggctggaaatactgcagaacggtgaagcgtcaagcctgtacccgcactgcgtgcacgaggacgcggtaaacgcgcccctgcaaaacaggattgaagacgcgaacggcgttaaaatatcgggcgaacttgtccgctccaccccggacaacaccgacgcggttgacgtggacattttcttctacagcgggctgggcaaatacgacaaggacggcaatgtggtgtccgcgtcagtggaggtgaaggcttcgtacaaaccttttgacgcgccggattacgcctacgcgctcctcggatattttaacaacgggagcaataccataaccggatcggagttgaaaactaagcgttgcaagataacaaaatccggccttccaaccggcaaatacacggttaaaatagagcgcgtaacgcccgattcaactgacggtaaaatcatcgatcaggtgtatgtaggttcggtcaggtccataaaatccgtagacgaggacgggaacgccgtgcgccccatccgcgcggagcgccagagggatttgacggttatcgcgctaagggtcctggcgaccagccagttgaacgggacgctcgacagcttcaattacgtggccacggccgtggcgccggtctattccggaggcggctccggcgcgtcgtactggctcaactccgccgaaacgcgcaaccccgcctccgcacttctgcacgccctgcggggcagggcctcgcaacagtcggttgacgacggcgacattgactggccgtcgcttgaggcgttttatacgtggtgcggggaacacgaatacgagtgcaacgcctatctgtcggaatccgtaacgatagcggaactcatgcgcatgatcgaaagcgcccccgcgcagacatcctga

SEQ ID NO: 52498 - protein, 315 aa, Unknown
  Obtained from environmental sample
  misc_feature (1)..(315): Xaa is any amino acid
MKDFSQTKDMNAILSGADPNIRLEILQNGEASSLYPHCVHEDAVNAPLQNRIEDANGVKISGELVRSTPDNTDAVDVDIFFYSGLGKYDKDGNVVSASVEVKASYKPFDAPDYAYALLGYFNNGSNTITGSELKTKRCKITKSGLPTGKYTVKIERVTPDSTDGKIIDQVYVGSVRSIKSVDEDGNAVRPIRAERQRDLTVIALRVLATSQLNGTLDSFNYVATAVAPVYSGGGSGASYWLNSAETRNPASALLHALRGRASQQSVDDGDIDWPSLEAFYTWCGEHEYECNAYLSESVTIAELMRMIESAPAQTS

SEQ ID NO: 52499 - DNA, 1458 bp, Unknown
  Obtained from environmental sample
  misc_feature (1)..(1458): n is a, c, g, or t
atggatgtaaccgaaaagaatagattggccgcggaccagaccatctccgcagttttggccaacgcgagagctcccagtttggaggtggccgacggggcggacgagctgcaaaaattgatagccgaattcgcgaaggccggatgggagaacagcacagaaacgtaccacggcgtcttcgctctgcttgtaatcatgtctataataggcttcgcgttcagcgtaaccttcgggtttttcctttcgcgcagcataagcgcgccgcttctcaaaaccgtccaaatgatcagcgaacagaggaaagggcacctaagcatgcggttgaatatgaagcgcaacgacgagatcggcgagatggcgaaattgatggacgcgttcggcgacgatttgcagttcatcgtagtcaagacaatgaaggagatagcgaacggcgacctcagcgcaaatatcccgtcgcgcgatccgcaagacgagatcggcccggcgctcggccaaactattgaaacgctgcgatgcctcatcatagaagacggcggcaaggtgcttcatgccgccgccgaaaaagacctgtcgcaacgcctcacgagaacgtacaacggcgagtacgcgaagatgaaagacaacatcaacaccctcatgaataacctcgacaactctataagccaagtctccgaagcggtcgtacaggtgacaaacgccagcagtcagatttcacaaggcgcgcagagtttggccgagggagccaacgaacaggcgagttccttagaagaggtgtcgtccagccttgaggagatgtcctccatgacaaagcataacgccgacaactccaacaaggcgaaactcttatcctccgaagcgcgcgccgccgccaacgacggcgacgcctccatgaagaaaatggcccaggctatcagcgacatcaaaacatcggccgacaatacagccaagatcataaagactatcgacgacatagccttccagaccaacctcttggctctcaacgcggctgttgaggcggccagagcgggcgaggccggcaagggcttcgcggtagtggccgaagaggtgcgcaatctggcgatgcgcagcgccgaagcggccaagaacaccgcggacatgattgaggaatcggtgaaaaacgccgacggcggcgtaaaaataaccgaggaggtcgcaaaatcgctgggacaaattgtcgaccgcataagcaaagtgggcgacataatcaccgaaatagcgtcggcctccggcgaacaggcgcagggcatagagaaggtgaacaccgccgtgacgtctatgaaccaagtcacccaaagcaacgccgccaactccgaagagtcagccagcgcctccgaagagctatccaaccaggcgacggaacttgcgaacatggtgagcgagttcaaattgaccgacggcgggtcgcattcaacggggcaaaacaataggcggagggtgtaa

SEQ ID NO: 52500 - protein, 485 aa, Unknown
  Obtained from environmental sample
  DOMAIN (62)...(131): HAMP domain
  misc_feature (1)..(485): Xaa is any amino acid
MDVTEKNRLAADQTISAVLANARAPSLEVADGADELQKLIAEFAKAGWENSTETYHGVFALLVIMSIIGFAFSVTFGFFLSRSISAPLLKTVQMISEQRKGHLSMRLNMKRNDEIGEMAKLMDAFGDDLQFIVVKTMKEIANGDLSANIPSRDPQDEIGPALGQTIETLRCLIIEDGGKVLHAAAEKDLSQRLTRTYNGEYAKMKDNINTLMNNLDNSISQVSEAVVQVTNASSQISQGAQSLAEGANEQASSLEEVSSSLEEMSSMTKHNADNSNKAKLLSSEARAAANDGDASMKKMAQAISDIKTSADNTAKIIKTIDDIAFQTNLLALNAAVEAARAGEAGKGFAVVAEEVRNLAMRSAEAAKNTADMIEESVKNADGGVKITEEVAKSLGQIVDRISKVGDIITEIASASGEQAQGIEKVNTAVTSMNQVTQSNAANSEESASASEELSNQATELANMVSEFKLTDGGSHSTGQNNRRRV

SEQ ID NO: 52501 - DNA, 741 bp, Unknown
  Obtained from environmental sample
  misc_feature (1)..(741): n is a, c, g, or t
ttgttttgccccgttgaatgcgacccgccgtcggtcaatttgaactcgctcaccatgttcgcaagttccgtcgcctggttggatagctcttcggaggcgctggctgactcttcggagttggcggcgttgctttgggtgacttggttcatagacgtcacggcggtgttcaccttctctatgccctgcgcctgttcgccggaggccgacgctatttcggtgattatgtcgcccactttgcttatgcggtcgacaatttgtcccagcgattttgcgacctcctcggttatttttacgccgccgtcggcgtttttcaccgattcctcaatcatgtccgcggtgttcttggccgcttcggcgctgcgcatcgccagattgcgcacctcttcggccactaccgcgaagcccttgccggcctcgcccgctctggccgcctcaacagccgcgttgagagccaagaggttggtctggaaggctatgtcgtcgatagtctttatgatcttggctgtattgtcggccgatgttttgatgtcgctgatagcctgggccattttcttcatggaggcgtcgccgtcgttggcggcggcgcgcgcttcggaggataagagtttcgccttgttggagttgtcggcgttatgctttgtcatggaggacatctcctcaaggctggacgacacctcttctaaggaactcgcctgttcgttggctccctcggccaaactctgcgcgccttgtgaaatctga

SEQ ID NO: 52502 - protein, 246 aa, Unknown
  Obtained from environmental sample
  misc_feature (1)..(246): Xaa is any amino acid
MFCPVECDPPSVNLNSLTMFASSVAWLDSSSEALADSSELAALLWVTWFIDVTAVFTFSMPCACSPEADAISVIMSPTLLMRSTICPSDFATSSVIFTPPSAFFTDSSIMSAVFLAASALRIARLRTSSATTAKPLPASPALAASTAALRAKRLVWKAMSSIVFMILAVLSADVLMSLIAWAIFFMEASPSLAAARASEDKSFALLELSALCFVMEDISSRLDDTSSKELACSLAPSAKLCAPCEI

SEQ ID NO: 52503 - DNA, 471 bp, Unknown
  Obtained from environmental sample
  misc_feature (1)..(471): n is a, c, g, or t
ttgggtgacttggttcatagacgtcacggcggtgttcaccttctctatgccctgcgcctgttcgccggaggccgacgctatttcggtgattatgtcgcccactttgcttatgcggtcgacaatttgtcccagcgattttgcgacctcctcggttatttttacgccgccgtcggcgtttttcaccgattcctcaatcatgtccgcggtgttcttggccgcttcggcgctgcgcatcgccagattgcgcacctcttcggccactaccgcgaagcccttgccggcctcgcccgctctggccgcctcaacagccgcgttgagagccaagaggttggtctggaaggctatgtcgtcgatagtctttatgatcttggctgtattgtcggccgatgttttgatgtcgctgatagcctgggccattttcttcatggaggcgtcgccgtcgttggcggcggcgcgcgcttcggaggataa

SEQ ID NO: 52504 - protein, 156 aa, Unknown
  Obtained from environmental sample
  misc_feature (1)..(156): Xaa is any amino acid
MGDLVHRRHGGVHLLYALRLFAGGRRYFGDYVAHFAYAVDNLSQRFCDLLGYFYAAVGVFHRFLNHVRGVLGRFGAAHRQIAHLFGHYREALAGLARSGRLNSRVESQEVGLEGYVVDSLYDLGCIVGRCFDVADSLGHFLHGGVAVVGGGARFGG

SEQ ID NO: 52505 - DNA, 708 bp, Unknown
  Obtained from environmental sample
  misc_feature (1)..(708): n is a, c, g, or t
gtgtatccactggaaaaagaacgccagcttgtcgcgcttcttcgaaggggaaacaagcaggaggcggaaaaactccttgatgaactgttgtctgtgattgtattctgcaatcaggatcatttcagatatattcaacttagaacgattgaactggcggtgctgcttgcccgcgccggaacaaattccattggcagcgccggaacggaaaacaaggcccgctatatcaagcaaatccaggacgcgaaaaccgttgaggaacttgcggcaatcctgcacaacatggtggaaaaaatagttgtccagatagttttgtttcagggcattcctcacgcttccgccatgaggaaagcggaattttttatcaaagaaaactttacccgaaaaatcagcctgcgcgaagtcgctaaaattgccggcctttccgcgccctatttcagcactattttcaaagaggaaatgggcgaaaacctttccaaatatattaacaggcagagggtagagaaggccagcaggatgcttttggagacggatctttccctgtccgatatttcgaacgcctgctgttttaaggatcaaagctggttctcaaaaatattcaagcactatgccggcataagcccgggaaaataccgaagccagggcggcaaactgacgcccaagattcccgaaataaagttttcggaagatttcccggtagagatagcgtaa

SEQ ID NO: 52506 - protein, 235 aa, Unknown
  Obtained from environmental sample
  DOMAIN (116)...(162): Bacterial regulatory helix-turn-helix proteins, AraC family
  misc_feature (1)..(235): Xaa is any amino acid
MYPLEKERQLVALLRRGNKQEAEKLLDELLSVIVFCNQDHFRYIQLRTIELAVLLARAGTNSIGSAGTENKARYIKQIQDAKTVEELAAILHNMVEKIVVQIVLFQGIPHASAMRKAEFFIKENFTRKISLREVAKIAGLSAPYFSTIFKEEMGENLSKYINRQRVEKASRMLLETDLSLSDISNACCFKDQSWFSKIFKHYAGISPGKYRSQGGKLTPKIPEIKFSEDFPVEIA

SEQ ID NO: 52507 - DNA, 2409 bp, Unknown
  Obtained from environmental sample
  misc_feature (1)..(2409): n is a, c, g, or t
ttggcttacacctggatggactggggacgaaagaacaagtacttcgacagccagaacgatgaaaaggctttttacgatgaaacctgctatacgctcgcacaccagattgcggcccccaacagcccccagtggtttaacaccggcctttacgcggtctacggcatagaagggcctgcccaggggcactactactttgattccgccagcggcgcggtgaaaaagtcggaaagcgcctataagcgcccgcagcctcatgcgtgttttatcctctccgtcgacgataacctggtaaactcaggcggcatcatggacctggttacgcgtgaggcgaggcttttcaagtacgggtcggggacggggtcgaacttttcaaaaatcagagcccataacgagaaactctccgggggcggcgtatcgtcgggactgctttcgtttttgaagataggcgaccgctccgcctcggcaataaaaagcggaggcaccacgcggcgggcagccaagatggttaccctggacgcggatcatccagacattgaagattacatcgcatggaaagccagagaagagcacaaggtcgcttctatggttaccggctcacaaattgtcaataaaaatctttctgaaataaaaaaagccctcgtctccttcaggggcccggatgtggacaggtttaacatccagaaaaaccacgaactcgaaactgccctgcgcaacgcgcttggagataaaatcccaccttcttacctgtatcagcttttaaggcagctccagcagggcgacaaggatctgaaccccgcgattttttctaccgcctgggatgacgaggcctacaacaccgtttccggacagtcgtccaacaacagcgtaaggctgaccgacgattttatgaaagcggttgttgatgacnaggaatggaagctctcaggcagggtaacggggcataccgaaaaagccgtcagggccggaaaaatctggaaagacatcgcccgctctacctgggcctgcgccgaccccgggctccagttccacacgacgataaacgactggcatacctgcccctcaggcggcgagattcgggcgtccaacccctgctcggaatatatgtttctggatgacacggcgtgcaacctggcctcggtcaacctggcccgcttctacgacaagactgcccgaacctttgacgttgaaaaatacctccacgcaataagggtatggacaaccatacttgaaatttccgttgtaatggcccagtttccttccccggaaatcgcggaactatcctacaaataccggactctggggctgggctatgccagcctggggagtctcctcatgatcatgggccttgcctacgactctcctgaaggccgtgcggttgccggttccctctcggcgattcttacaggcgaagcctacgcccagtccgcccggatggctgcggaattcggccccttcgcgcaatacgcggaaaactcaagcgccatgctccgcgttatacgcaaccaccgcagggcctgttacaacgcgcccccttcgcagtacgaggggctccacacgattccccagggaatagatcccgccaaatgcatggcatcaaaatgccaggcggctttcgacttgtcctgcctcctggacgcggcaaagaagagctgggacgacgccctggccattggggaaaagcacggcttccgcaacgcccaggtaagcgcgattgcccccactggaaccataggccttttgatggactgcgacactaccggggtcgagccggattttgcccttgtaaaattcaagaagctcgcgggcggcggaagcttcaagatcataaaccagtccgtcccgcccgcgctggcggccctgggctacagcgaagcggaaatcgaagccattaccgcctacgccacgggacgaaaaaccctgaagggctgtccggccatcaatgccgaaagcctggcggaaaaaggctttacccccgaagctgtcgcgctggcggaagaagcgctaaaaagctcccacagccttgaagccgtatttagcccctgggttcttggcaaggactttatcgaaaagaaactgaaaatcccccaggcatctttctcgcagaacggcttcagcctcttaaagcaccttggcttttcatccgccgaaatcgaagaggcggagctttacgcctgcggaaccatgggccttgaaggtgcgccgggactcaaaaaagagcattacagtgtttttgacaccgccaccccttcgggaaagcacggcaagcgctccatcccctggacagcccatgtggaaatgatggccgcctgtcagccttttatttcgggcgcgatttccaaaacgattaatatgcccaacgccgcgaactatgaagacgtaaaaggcgcttatatgcttgcctggaaatag

SEQ ID NO: 52508 - protein, 802 aa, Unknown
  Obtained from environmental sample
  DOMAIN (87)...(644): Ribonucleotide reductase, barrel domain
  misc_feature (1)..(802): Xaa is any amino acid
MAYTWMDWGRKNKYFDSQNDEKAFYDETCYTLAHQIAAPNSPQWFNTGLYAVYGIEGPAQGHYYFDSASGAVKKSESAYKRPQPHACFILSVDDNLVNSGGIMDLVTREARLFKYGSGTGSNFSKIRAHNEKLSGGGVSSGLLSFLKIGDRSASAIKSGGTTRRAAKMVTLDADHPDIEDYIAWKAREEHKVASMVTGSQIVNKNLSEIKKALVSFRGPDVDRFNIQKNHELETALRNALGDKIPPSYLYQLLRQLQQGDKDLNPAIFSTAWDDEAYNTVSGQSSNNSVRLTDDFMKAVVDDXEWKLSGRVTGHTEKAVRAGKIWKDIARSTWACADPGLQFHTTINDWHTCPSGGEIRASNPCSEYMFLDDTACNLASVNLARFYDKTARTFDVEKYLHAIRVWTTILEISVVMAQFPSPEIAELSYKYRTLGLGYASLGSLLMIMGLAYDSPEGRAVAGSLSAILTGEAYAQSARMAAEFGPFAQYAENSSAMLRVIRNHRRACYNAPPSQYEGLHTIPQGIDPAKCMASKCQAAFDLSCLLDAAKKSWDDALAIGEKHGFRNAQVSAIAPTGTIGLLMDCDTTGVEPDFALVKFKKLAGGGSFKIINQSVPPALAALGYSEAEIEAITAYATGRKTLKGCPAINAESLAEKGFTPEAVALAEEALKSSHSLEAVFSPWVLGKDFIEKKLKIPQASFSQNGFSLLKHLGFSSAEIEEAELYACGTMGLEGAPGLKKEHYSVFDTATPSGKHGKRSIPWTAHVEMMAACQPFISGAISKTINMPNAANYEDVKGAYMLAWK

SEQ ID NO: 52509 - DNA, 489 bp, Unknown
  Obtained from environmental sample
  misc_feature (1)..(489): n is a, c, g, or t
atgaggaaaaaatccgaagctaagtattatttcgtctattcgctgaaaaaaataaaaatcggtattgctcaagaaaacaacgccataacaagggtgtattttggcgctgaaaaaccggccggatttgtcaaagccgaaaccccgctgattaaaaaagccgcggcgcagattggagaataccttaacgggaaacggaaaaaattctccctgccgcttgccatgcgcggcactgaattccagatggatgtctggagggcgctgcaaagcatcccctatggcgagacccgttcctacaaacagattgccgaacttgtacacaggccgaaagcggtccgcgcggtgggcatggcaaaccaccgtaaccccatttcgataatcgtgccatgccaccgcgtgataggccacgacgggactctcacaggttacggcggggggcttccacttaaaaaatatcttttggaactggaaagtgttctgcaagaacactag

SEQ ID NO: 52510 - protein, 162 aa, Unknown
  Obtained from environmental sample
  DOMAIN (76)...(161): 6-O-methylguanine DNA methyltransferase, DNA binding domain
  misc_feature (1)..(162): Xaa is any amino acid
MRKKSEAKYYFVYSLKKIKIGIAQENNAITRVYFGAEKPAGFVKAETPLIKKAAAQIGEYLNGKRKKFSLPLAMRGTEFQMDVWRALQSIPYGETRSYKQIAELVHRPKAVRAVGMANHRNPISIIVPCHRVIGHDGTLTGYGGGLPLKKYLLELESVLQEH

SEQ ID NO: 52511 - DNA, 378 bp, Unknown
  Obtained from environmental sample
  misc_feature (1)..(378): n is a, c, g, or t
atgaaacctgcggtattatactctttttttcaaaaaaacggtaatttaagaagccaaaggcgcggctggcggtgtttttacgtgggattcatcgcgctgcaggttctttttgccgggcggcttggcgccgcgccgctggaaaacggctttgcccttgcccccaaagcatccgcttctccggctgaaaaagacgccgcgtaccgggaagccagggcccgcctgcttaccgcagccggaaaatacgaacgcacgccctaccgttacggcggaatggatcgaaggggtcttgattgttcggggtttgtgtccctgagcttctctgatgccctgggaatttccgtgccgagaagcgccgatggcctgtattcatggggttga

SEQ ID NO: 52512 - protein, 125 aa, Unknown
  Obtained from environmental sample
  misc_feature (1)..(125): Xaa is any amino acid
MKPAVLYSFFQKNGNLRSQRRGWRCFYVGFIALQVLFAGRLGAAPLENGFALAPKASASPAEKDAAYREARARLLTAAGKYERTPYRYGGMDRRGLDCSGFVSLSFSDALGISVPRSADGLYSWG

SEQ ID NO: 52513 - DNA, 2856 bp, Unknown
  Obtained from environmental sample
  misc_feature (1)..(2856): n is a, c, g, or t
gtgtactctttcggtcccggcaaagccgacggtaaagccgagatgaagaatctgttgggtggcaagggcgcgaaccttgccgagatgtgtaatctggggcttcctgtcccggcgggtttcacgatcacgacggagtgctgcaccgactacttcgccaatagaatgaaatttccggcggagctcaagggccaggtcgaaaaggccctcaaagcggtcgagaaggtcatggagatgaagttcggggatcctaagaaccccctgctcgtctcttgccgctccggcgcccgtatgtccatgcccggcatgatggaaaccgtcctgaacgtcggcctctgctccaaaaccatccccggtctcgttgaaaagaccagaaacgagcgcttcgtctgggactcctaccgccgcctcattatgatgtactccgacgtggtgatggaaaaggccgagggcatagagccaaaggacgacaacggcatccgcaagcagctcgaaggcatcatggacgagctgaaggagcgtaagggttacaagagcgacaccgacatgggtgtaagcgacctcaaagagctctgcgaaaagtttaaggtgcgcgtcaaggaggtgctgaagtcctccttcccggacgatcccatggatcagctttggggcggcgtaggcgccgtgttcaagagctggaacggcaagcgcgccatagcctaccgcaacattgagggcatcccccacgagtggggcaccgccaccaacgttcaggccatggtcttcggcaacatgggcgactcctccgccaccggcgtggccttcacgcgcaacccggccaacggcgagaagaagttcttcggcgagtaccttgtcaacgcccagggcgaagacgtcgtcgccggtatccgcacgcccgctcccatcaacgagtcaacaaagagcgagcacaccgcccacctcaagtcgcttgaaaaggagatgcccgaggcctacaagaagctcgacgaaatccagaagaagctcgagaagcactataggaatatgcaggacttggagttcaccatccaagagggaaagctttggatgttgcagacccgcgacggcaagcgcacgggtttggccgcactcaacatggccatggacatgctcgaggagaagctgatcgacgtggagacggcgttgctgcgcgtaaagcccgcgcagctcgacgagcttctccacccggttatcgaccccgtggccgagaagaaggccgcggtgctcggcaaaggtctgccggcgggtccgggcggcgcgtcgggcgcgatagtcttctccgcccaagacgccgtggactgggtaaagagcaaggcgaaaaacgttattttggttcgtgaggagaccaaccccgaagacatcgagggtatgcgcgccgctcagggcatcctgaccgcccgcggcggtatgaccagccacgccgctctcgtcgcccgcgggtggggcaagtgctgcatcgtcggcgccgccgatttccacatcgacgccaagtccaagaccatcacgatcaagggcaagacgctcaaagagggcgacatagtcacgctcaacggcacaaagggcagcgtctacgagggcgcgctccccatgatcgacgcgaccgagaatccgcgcttccagagcttcctgaaactcgccgacaagtacaagtctatgaaggtccgcgccaacgccgacaccccctccgacgcgaaagtcgcccggagcttcggcgccgagggtatcggcctcttccgcaccgagcacatgttctacggcgagggcagcgacgagccgctcagctacctgcgccaaatgatcctctccaagaatgtcggcgagcgccgcgccgccttagataagctcttccccttcgtgaagcgcgacatcaaggcgacgatgcatgctatggccggcttcccggttaccatccgcctcctagacccgccgttgcacgagttcgtgccggagcgtcaggagctgcagagcgacttggctaagaaattgggcatcacgcccgtcgaggtcagcaaccgcggcaagagccttgaagaggtgaacccgatgctcgggcaccgcggcgtccgtctgggcgtcacctatcccgaactcaccgagatgcaggtgcgcgccatcctcgaagccgccgccgagctgagcaaagagggcacgaaggtcacgccggagatcatgatcccggtaacctgcaccccgaaagagctcgcccaccagaaggtcatcgtggacaaggtggccgacgaggtcaagaagaagtacgagatcaagaacttcgaatacctctacggcacgatgatagagatcccccgcgcggcgctcttagccaacgagatggccaccgtcggggagttcttctcgttcggcaccaacgacctgacgcagatgggtttcggcttcagccgcgacgacatcggcgctgtcatgggcgactacctagacaagaagctcctgcccgaagacccgttcctcagcatcgaccagtccggtatcggccaattggtgcgttacggagtcgagcgcggccgttcggtcagggagaagctgaaagtcggcgtctgcggcgagcacggcggcgacccggcttccgttgagttcttctacggcctcggcctaaactacgtgagctgctcccccttccgcgttcccatcgcccgcttagcctccgcgcatgcggagataaaggcgaagagagccgcgaagtcgcccgccaaaaagtcggcttccgcaaagaaagccggcaagaaagcggagaagaaatccgagaagaaagcggctaaaccggcggccaagaagtcggccgcggcgaagaagtccgctaagaagagcggcgcgaagaggaagtaa

SEQ ID NO: 52514 - protein, 951 aa, Unknown
  Obtained from environmental sample
  DOMAIN (424)...(526): PEP-utilising enzyme, mobile domain
  misc_feature (1)..(951): Xaa is any amino acid
MYSFGPGKADGKAEMKNLLGGKGANLAEMCNLGLPVPAGFTITTECCTDYFANRMKFPAELKGQVEKALKAVEKVMEMKFGDPKNPLLVSCRSGARMSMPGMMETVLNVGLCSKTIPGLVEKTRNERFVWDSYRRLIMMYSDVVMEKAEGIEPKDDNGIRKQLEGIMDELKERKGYKSDTDMGVSDLKELCEKFKVRVKEVLKSSFPDDPMDQLWGGVGAVFKSWNGKRAIAYRNIEGIPHEWGTATNVQAMVFGNMGDSSATGVAFTRNPANGEKKFFGEYLVNAQGEDVVAGIRTPAPINESTKSEHTAHLKSLEKEMPEAYKKLDEIQKKLEKHYRNMQDLEFTIQEGKLWMLQTRDGKRTGLAALNMAMDMLEEKLIDVETALLRVKPAQLDELLHPVIDPVAEKKAAVLGKGLPAGPGGASGAIVFSAQDAVDWVKSKAKNVILVREETNPEDIEGMRAAQGILTARGGMTSHAALVARGWGKCCIVGAADFHIDAKSKTITIKGKTLKEGDIVTLNGTKGSVYEGALPMIDATENPRFQSFLKLADKYKSMKVRANADTPSDAKVARSFGAEGIGLFRTEHMFYGEGSDEPLSYLRQMILSKNVGERRAALDKLFPFVKRDIKATMHAMAGFPVTIRLLDPPLHEFVPERQELQSDLAKKLGITPVEVSNRGKSLEEVNPMLGHRGVRLGVTYPELTEMQVRAILEAAAELSKEGTKVTPEIMIPVTCTPKELAHQKVIVDKVADEVKKKYEIKNFEYLYGTMIEIPRAALLANEMATVGEFFSFGTNDLTQMGFGFSRDDIGAVMGDYLDKKLLPEDPFLSIDQSGIGQLVRYGVERGRSVREKLKVGVCGEHGGDPASVEFFYGLGLNYVSCSPFRVPIARLASAHAEIKAKRAAKSPAKKSASAKKAGKKAEKKSEKKAAKPAAKKSAAAKKSAKKSGAKRK

SEQ ID NO: 52515 - DNA, 435 bp, Unknown
  Obtained from environmental sample
  misc_feature (1)..(435): n is a, c, g, or t
ttgagggcatcccccacgagtggggcaccgccaccaacgttcaggccatggtcttcggcaacatgggcgactcctccgccaccggcgtggccttcacgcgcaacccggccaacggcgagaagaagttcttcggcgagtaccttgtcaacgcccagggcgaagacgtcgtcgccggtatccgcacgcccgctcccatcaacgagtcaacaaagagcgagcacaccgcccacctcaagtcgcttgaaaaggagatgcccgaggcctacaagaagctcgacgaaatccagaagaagctcgagaagcactataggaatatgcaggacttggagttcaccatccaagagggaaagctttggatgttgcagacccgcgacggcaagcgcacgggtttggccgcactcaacatggccatggacatgctcgaggagaagctga

SEQ ID NO: 52516 - protein, 144 aa, Unknown
  Obtained from environmental sample
  misc_feature (1)..(144): Xaa is any amino acid
MRASPTSGAPPPTFRPWSSATWATPPPPAWPSRATRPTARRSSSASTLSTPRAKTSSPVSARPLPSTSQQRASTPPTSSRLKRRCPRPTRSSTKSRRSSRSTIGICRTWSSPSKRESFGCCRPATASARVWPHSTWPWTCSRRS

SEQ ID NO: 52517 - DNA, 939 bp, Unknown
  Obtained from environmental sample
  misc_feature (1)..(939): n is a, c, g, or t
ttgagcgacacgctatcctacaccaacggcaatcttctgagcggcgacataggcttcgacgggtacatcaagggcggcgacagttgggtggagcttaccaattgggcgcggaacgagcggaatctccgcgagtccttcgggataaccaaacgggtggagacgaacgggccgacggatcagcacatagactacgccgcgccggcctacttccgtgagttcgccgactacttgcaggcggagaacgcaaatgcttacgcgtggaacgtcagccagttccgccgggcggaggcctccagcgattggctgataggcaaacttataagccagaaccaaaagaatatccctattgccggatgggtggagatgaagaacgacaccgcgccggtgttcaaaaccttcagcgacggcgaagatttccgcgccgcgtggcggacggcgctcaactatgtatggcacggcaatccgcgttactcgtgggatccggtcaatcacgcggtcgtaaacagcagagcgaatacctaccagcgcgacgccgggcagcgcttcgccaagttcttatgggacaggcggcagacgccctggaacgacacctgcgagaagataatcggcgagggctcttggtggggcccctctatgctcaagtaccactactccccggacggcaaggcgctgactgtctacccgcttaactggattcacggcacgggttcgccctccgccgttaccgcccagaacatcgatctgatggccgagatgtaccgccaagccgagcttgaatgggatgttgaggagccgggcgacaggtaccttacgagcacaccgcattactaccacgcgatttttccggctattggggatgactatcctcaccggcaaccaccacgcccccatgaacatgaaaaaatcggcgaacatgaaagtctatctagacgtagataa

SEQ ID NO: 52518 - protein, 312 aa, Unknown
  Obtained from environmental sample
  misc_feature (1)..(312): Xaa is any amino acid
MSDTLSYTNGNLLSGDIGFDGYIKGGDSWVELTNWARNERNLRESFGITKRVETNGPTDQHIDYAAPAYFREFADYLQAENANAYAWNVSQFRRAEASSDWLIGKLISQNQKNIPIAGWVEMKNDTAPVFKTFSDGEDFRAAWRTALNYVWHGNPRYSWDPVNHAVVNSRANTYQRDAGQRFAKFLWDRRQTPWNDTCEKIIGEGSWWGPSMLKYHYSPDGKALTVYPLNWIHGTGSPSAVTAQNIDLMAEMYRQAELEWDVEEPGDRYLTSTPHYYHAIFPAIGDDYPHRQPPRPHEHEKIGEHESLSRRR

SEQ ID NO: 52519 - DNA, 891 bp, Unknown
  Obtained from environmental sample
  misc_feature (1)..(891): n is a, c, g, or t
ttgaatgggatgttgaggagccgggcgacaggtaccttacgagcacaccgcattactaccacgcgatttttccggctattggggatgactatcctcaccggcaaccaccacgcccccatgaacatgaaaaaatcggcgaacatgaaagtctatctagacgtagataaaacctacgcttttgaggacgacacaatcacatatacaatagattatagaaactacggggcggatgaggctaaaggggtgcggatagtcaacaaactgcaccctgactttgtctttatctccggcacaggctcgccttcgtacgacgccgcctcaaataccgtgacttggaacataggcagcgtgcccggattcaagtcgtcgatgcctaccggcgttaccacaaaaggaaccgtaaccctcaaggtaaaaataccgtacgccaaactcaaacgctacgagaacaaagccactatatcatgtacaaacgggccggggtggacgtccaacgagtacccgaacaaaatctcctccgttatgaagcgcaatggggtagacatcgccaaccgcgcgttgcgggtcgaacactccgtttatagggacaccgttaatccggggatgaccgccgtctacacgatagactttgagaatagcgcanaggctgggtggttaaacggcggcaggccgggggtcaacttctcatacgcgcacgacgggacgaatgagagcgccggcagccataggtttatgatcagggcgttcaacgacgctcaagaggcctatatcgactatggaaactatagaatatcgtacttcttgttcgacaaaggaactgggacgaacggatgngattatcgaagagacgtactgtacgtgccggaagccgaagagtcagatcaaatttga

SEQ ID NO: 52520 - protein, 296 aa, Unknown
  Obtained from environmental sample
  misc_feature (1)..(296): Xaa is any amino acid
MNGMLRSRATGTLRAHRITTTRFFRLLGMTILTGNHHAPMNMKKSANMKVYLDVDKTYAFEDDTITYTIDYRNYGADEAKGVRIVNKLHPDFVFISGTGSPSYDAASNTVTWNIGSVPGFKSSMPTGVTTKGTVTLKVKIPYAKLKRYENKATISCTNGPGWTSNEYPNKISSVMKRNGVDIANRALRVEHSVYRDTVNPGMTAVYTIDFENSAXAGWLNGGRPGVNFSYAHDGTNESAGSHRFMIRAFNDAQEAYIDYGNYRISYFLFDKGTGTNGXDYRRDVLYVPEAEESDQI

SEQ ID NO: 52521 - DNA, 1761 bp, Unknown
  Obtained from environmental sample
  misc_feature (1)..(1761): n is a, c, g, or t
atggaaactatagaatatcgtacttcttgttcgacaaaggaactgggacgaacggatgngattatcgaagagacgtactgtacgtgccggaagccgaagagtcagatcaaatttgacgccaaggatgtcacgccgggcgaagacaaaaacggcaagtggaatcagcgcttgatattgcagatagccgacgttcttgatccgtcccgcagcgataccaattgggggactatggccgcgccgacgcagttccttatcaactacagcggcctagaccagcgcgtccaccgcggtatcagcacgccgtttaagggcgtgtgggcggtgtacgccggcaactacgccaaccgcaattggggcggggattggtcgtacaattccaaagccaaaggaactatcagcaacgatgctatgagtagctggggctatccagtaacgaaggatttcaccgacgacccgtctccggacaatcccggtaaggacgtcaggcggttgcatagaaaactttgcggtgccgacgcatccacaacaatagacaacgtgctgatagaggagtgggacggttatacatggaggcgcgtattcggcaacggcccgctgccgggtcgcgaagttgtaaacgtcgtgatccgcgacacggtgccgcagggcgtgactttcatcaatttcatagaaccgtacccgttcggcaaggcgcccaagataaacgggcgcgttatcacttgggaaatagacaagttgttgataggcgaaaaggggagcgtcaaatacaccgttcgcgctgacacgcctgccgacacgaagaacgtcgtgatcaagtcgaacgcgtgggctaccgccgacaaagagtcgccgatgaagagcacaacgacgctggtgatcacgagagactcgctgcctccgccgccgcccgaacccaccacgatgtacaagagggcgaataaaacgacgtactctcccggtgacaccgttgtctacacggtcgcctacaagcagacgcacgggtatcctgccgtcagcagttcgtctagtcagtgggacggtacgaataagtcaatcagtacggatgggaaaaccatctcctttggaacaagcaatgtcgatatgtccttcacgccggcggccggcacgaacgtcacgcttacaggctctatgtccccgcagtcgtacggcccggtattttacatattcgcgaggcgcaccggtaccgccgcgaacaccgccgttgagttgaagtttgagcgtaagtacatacagtcggagaatttcgccggtattatggttacgcttacgtcaaacggccgcgccgtcgacagcgtaggcgtgcccatggccgacgccgagacctccgtcaattacaagttcgtctttaagaatgacagtctgttgatgtggatgggcgacacggccgccgccattccgtttagggtgactaagggcatagccgttcagaagggcgacgccggcgtgcgttatgcgtctaacggtagcggcagttcgtctaagatcaccggttgggcgagccgtaccgatttggcctacgatgtggctatccgcgacaccgttcccttcggcgtgagattcatagccggttcggcctccggcagtatcaataccggaacgctttcgcctaagtctttgaccggaagcgtcagcggcgacgtgatcacttggccggtcgtcagcggctccggcaatccgttaggcgcgaacgattccctcacggtaaagtggagcggtatcgtcgantcgtgccgaatctga

SEQ ID NO: 52522 - protein, 586 aa, Unknown
  Obtained from environmental sample
  misc_feature (1)..(586): Xaa is any amino acid
METIEYRTSCSTKELGRTDXIIEETYCTCRKPKSQIKFDAKDVTPGEDKNGKWNQRLILQIADVLDPSRSDTNWGTMAAPTQFLINYSGLDQRVHRGISTPFKGVWAVYAGNYANRNWGGDWSYNSKAKGTISNDAMSSWGYPVTKDFTDDPSPDNPGKDVRRLHRKLCGADASTTIDNVLIEEWDGYTWRRVFGNGPLPGREVVNVVIRDTVPQGVTFINFIEPYPFGKAPKINGRVITWEIDKLLIGEKGSVKYTVRADTPADTKNVVIKSNAWATADKESPMKSTTTLVITRDSLPPPPPEPTTMYKRANKTTYSPGDTVVYTVAYKQTHGYPAVSSSSSQWDGTNKSISTDGKTISFGTSNVDMSFTPAAGTNVTLTGSMSPQSYGPVFYIFARRTGTAANTAVELKFERKYIQSENFAGIMVTLTSNGRAVDSVGVPMADAETSVNYKFVFKNDSLLMWMGDTAAAIPFRVTKGIAVQKGDAGVRYASNGSGSSSKITGWASRTDLAYDVAIRDTVPFGVRFIAGSASGSINTGTLSPKSLTGSVSGDVITWPVVSGSGNPLGANDSLTVKWSGIVXSCRI

SEQ ID NO: 52523 - DNA, 804 bp, Unknown
  Obtained from environmental sample
  misc_feature (1)..(804): n is a, c, g, or t
atgaacgggaatctgaaaattggattactgttaacgcttctggttgtgttaatatcattaacaagcgtaatctggatacgcggtatatttaatgtacagtataacgctatgaatcctgagattcgtttcatgcctccaggcattgagcatccgcttggaacggacaattttggcagggatgtcctgctgcgaataatagccggatcaaggcatactattgtccttgcgatctgcgttgtcgccggggctgtaatatttggaagcgcgctgggactttttgccggatattccggcggaatccgcgatgaaattgtcatgcggcttatggacgcggtcagctcttttccggggatactttttgcccttgtcatggtcgccgtttttggcaacagccagtttacactcttcgtcgccctgttgattctctttgtccccagctttactcgcattatacgaagcggaacattgcaatacagaaacgccgattttatcctggccgaacggctgctcggggccggcggtgcgagaatcgtattcatccatatattgccgaaccttgcgacacaactgctgccggccgccatcctcggcctttccaacgcaattctcgccgaatccgccatgagctaccttggattggggattcagccgcccgagccaagctgggggaggatgctttccgaatcgcagaattatctgatcaacgcgccctggtgcgcccttgcccccgggatatttatcatgctgacggtcattggcttccatttacttggcgacggcatccgccgctattttggagattag

SEQ ID NO: 52524 - protein, 267 aa, Unknown
  Obtained from environmental sample
  SIGNAL (1)...(21)
  DOMAIN (69)...(266): Binding-protein-dependent transport system inner membrane component
  misc_feature (1)..(267): Xaa is any amino acid
MNGNLKIGLLLTLLVVLISLTSVIWIRGIFNVQYNAMNPEIRFMPPGIEHPLGTDNFGRDVLLRIIAGSRHTIVLAICVVAGAVIFGSALGLFAGYSGGIRDEIVMRLMDAVSSFPGILFALVMVAVFGNSQFTLFVALLILFVPSFTRIIRSGTLQYRNADFILAERLLGAGGARIVFIHILPNLATQLLPAAILGLSNAILAESAMSYLGLGIQPPEPSWGRMLSESQNYLINAPWCALAPGIFIMLTVIGFHLLGDGIRRYFGD

SEQ ID NO: 52525 - DNA, 1059 bp, Unknown
  Obtained from environmental sample
  misc_feature (1)..(1059): n is a, c, g, or t
ttggcttccatttacttggcgacggcatccgccgctattttggagattagcatggcattactggaagttcgcaatttgaccataaatatcagacgcgggaaaaaattctatacggcggtaaatggaatcgattttaagatcgacgcgggggagattatagcccttgcgggagaatccggaagcggcaaaagccttaccgccctgtccgttccgggtctcctttccgcgcgggctaaaatcgcgggcggtgaaattttatattcttctgataacgggactgttgatttatgtaagactgaagaaaaatccctgaggcaaattcgcggaaaagagatcagcatgattttccaggagccgaggcagtcgctaaatcccctgatgaaaattggagcgcagatcaccgaggcgttggaattgcacaatattatttcagggcaaaacaaaaaaacagctaacttgttagcggctaacagactggctatggaaatgctggaaaaactgcaattcccccagccggaaaaaatcatggacgcgtggccccaccagctttcaggcgggatgtgccagcgggtcatgatcgctatcgcggcgatttgccgtccccggctgcttatcgccgacgaaccgacaacggcccttgacacggctaatcaaaaccacattttagaactgctcaaacagataaaccgcgaattcggcgctgcaatattgtttatttcccatgatatttccatggcgcggcacttctgcagccgtttcatggtgatgtattcggggcgcataattgaggaggggccaagcgaagcggttttgtcttccccgctgcacccctatactgttgcccttgccaaggctattccctgcaaagaaaacaggggtaagccccttgcaaacatccccggcagggcgccgccgcttgagataaccctgccgggctgccattttgcatcccgctgtccaaaagcacaaacacggtgtaaaaactccctacccccattggcggaagccggtaatggccgttatgtgcgttgtttctttccggagggaacaaatgcctga

SEQ ID NO: 52526 - protein, 352 aa, Unknown
  Obtained from environmental sample
  DOMAIN (262)...(326): Oligopeptide/dipeptide transporter, C-terminal region
  misc_feature (1)..(352): Xaa is any amino acid
MASIYLATASAAILEISMALLEVRNLTINIRRGKKFYTAVNGIDFKIDAGEIIALAGESGSGKSLTALSVPGLLSARAKIAGGEILYSSDNGTVDLCKTEEKSLRQIRGKEISMIFQEPRQSLNPLMKIGAQITEALELHNIISGQNKKTANLLAANRLAMEMLEKLQFPQPEKIMDAWPHQLSGGMCQRVMIAIAAICRPRLLIADEPTTALDTANQNHILELLKQINREFGAAILFISHDISMARHFCSRFMVMYSGRIIEEGPSEAVLSSPLHPYTVALAKAIPCKENRGKPLANIPGRAPPLEITLPGCHFASRCPKAQTRCKNSLPPLAEAGNGRYVRCFFPEGTNA

SEQ ID NO: 52527 - DNA, 765 bp, Unknown
  Obtained from environmental sample
  misc_feature (1)..(765): n is a, c, g, or t
gtgattatcgccctcctcaaggaagggggcggtacggcctgcaaggcgctgctctttctgggcgttgacctgcgggagttccggcaaaacctggaagaggagcttccacgggtgcggggcgggagcccggtgccggggggggctgccacactgctgccggtggacattccgccgtccaagcgcacccggcagatgctggaaaacgccgccgaagaagcccgcgtacagggaaaggactacattggcacggagcattttctctttgccgccatgcgggagcatgatatgcccgtccggcggttccttgcgttccgggcggtggacgcggaaatgctccgggtggcggtggaaaccacgttaaaccccgtcagaaccagccaggaagtcgccgccaaggcaaagcctgcggtgtatcccgtcctcactcccgtcattaatgagttttcccgcgatttaaccgccctggcaaaagagggaaagctggaccccgtcattggcagggagcgggaaatacagagggcggtgcgggtgctggcccgcagaaccaagaacaaccccatactggtgggcgaaagcggcgtgggaaagacagccattgtagaggggctggcccggtacttcgcgggtattccctcatcccttccttcttcccgcgtggcaggcagcgcggcgggggagcagcacacagccggtacaaccgtgcggaaacagccggaggcggtcaaaatccggagcttttcgcggaaagcggatactcctgcttga

SEQ ID NO: 52528 - protein, 254 aa, Unknown
  Obtained from environmental sample
  DOMAIN (69)...(121): Clp amino terminal domain
  misc_feature (1)..(254): Xaa is any amino acid
MIIALLKEGGGTACKALLFLGVDLREFRQNLEEELPRVRGGSPVPGGAATLLPVDIPPSKRTRQMLENAAEEARVQGKDYIGTEHFLFAAMREHDMPVRRFLAFRAVDAEMLRVAVETTLNPVRTSQEVAAKAKPAVYPVLTPVINEFSRDLTALAKEGKLDPVIGREREIQRAVRVLARRTKNNPILVGESGVGKTAIVEGLARYFAGIPSSLPSSRVAGSAAGEQHTAGTTVRKQPEAVKIRSFSRKADTPA

SEQ ID NO: 52529 - DNA, 555 bp, Unknown
  Obtained from environmental sample
  misc_feature (1)..(555): n is a, c, g, or t
ttgttcccgccactacaagccccatatcaagcaggagtatccgctttccgcgaaaagctccggattttgaccgcctccggctgtttccgcacggttgtaccggctgtgtgctgctcccccgccgcgctgcctgccacgcgggaagaaggaagggatgagggaatacccgcgaagtaccgggccagcccctctacaatggctgtctttcccacgccgctttcgcccaccagtatggggttgttcttggttctgcgggccagcacccgcaccgccctctgtatttcccgctccctgccaatgacggggtccagctttccctcttttgccagggcggttaaatcgcgggaaaactcattaatgacgggagtgaggacgggatacaccgcaggctttgccttggcggcgacttcctggctggttctgacggggtttaacgtggtttccaccgccacccggagcatttccgcgtccaccgcccggaacgcaaggaaccgccggacgggcatatcatgctcccgcatggcggcaaagagaaaatgctccgtgccaatgtag

SEQ ID NO: 52530 - protein, 184 aa, Unknown
  Obtained from environmental sample
  misc_feature (1)..(184): Xaa is any amino acid
MFPPLQAPYQAGVSAFREKLRILTASGCFRTVVPAVCCSPAALPATREEGRDEGIPAKYRASPSTMAVFPTPLSPTSMGLFLVLRASTRTALCISRSLPMTGSSFPSFARAVKSRENSLMTGVRTGYTAGFALAATSWLVLTGFNVVSTATRSISASTARNARNRRTGISCSRMAAKRKCSVPM

SEQ ID NO: 52531 - DNA, 369 bp, Unknown
  Obtained from environmental sample
  misc_feature (1)..(369): n is a, c, g, or t
ttgcggtattcggcaagagttgtcgcgccgatacagcgaatctcgccgcgcgaaagaccgggtttaagcatattcgccgcgtcaagggttccctcagcgccgcccgccccgattatcgaatgtatctcgtctatgaaaaggataatatttccggcttggcttacttcgcgtaaaatcttttttattcgttcttcaaactcgcctcggtattttgttcccgccactacaagccccatatcaagcaggagtatccgctttccgcgaaaagctccggattttgaccgcctccggctgtttccgcacggttgtaccggctgtgtgctgctcccccgccgcgctgcctgccacgcgggaagaaggaagggatga

SEQ ID NO: 52532 - protein, 122 aa, Unknown
  Obtained from environmental sample
  misc_feature (1)..(122): Xaa is any amino acid
MRYSARVVAPIQRISPRERPGLSIFAASRVPSAPPAPIIECISSMKRIIFPAWLTSRKIFFIRSSNSPRYFVPATTSPISSRSIRFPRKAPDFDRLRLFPHGCTGCVLLPRRAACHAGRRKG

SEQ ID NO: 52533 - DNA, 1719 bp, Unknown
  Obtained from environmental sample
  misc_feature (1)..(1719): n is a, c, g, or t
atggggcttgtagtggcgggaacaaaataccgaggcgagtttgaagaacgaataaaaaagattttacgcgaagtaagccaagccggaaatattatccttttcatagacgagatacattcgataatcggggcgggcggcgctgagggaacccttgacgcggcgaatatgcttaaacccggtctttcgcgcggcgagattcgctgtatcggcgcgacaactcttgccgaataccgcaagcattttgaaaaagacgccgctcttgaaaggcgtttccagtctgtaattgtagaggagccttcatttgacgataccgtaaatattttattcggtattcaaaagaaatatgaggaacatcatcaggtaagatacgcacaagaggcgatcccgcttgccgcgaaacttgcccagcgctacatcacggacaaatttatgccggataaggcgattgatattatcgatgaagccgcggctttcaggaaattggaaaaccgcgaacagccgcctgagatcaacggtattgaagatgagatcgccaaattgtgcgaagaaaagacagcctatgtaagcgcgcaggactatgagcatgccgccgaattacgcgataaagtccgcgatttaagagcgcggcttgaagaagtccatgcgtcgtgggaacgcgcttcaatgaacgaatggcctatggtaactgaaaacgacgtgcgccgcgtggtaacagaagcgactggaatcccgataatgcacattgaagaacaagaatcacagcgtctgctttacattgaagatgaactgcataaaagcgtaatagggcaggacgacgcgatacgccgcatagcaaacgcgatacgccgctccatgacgggagtatcatcgccgaaacgccctatgggttcatttattttccttggtccgacgggcgtgggaaaaactctgcttgcaagacagcttgcaaaatatttattcgccaaagaggacgctcttgtaagaattgatatgtcggactacatggaaaaacacaatgcgtcccgtcttgtaggcgctcctcccggatacatcggttatgaagaaggcggaatgctaaccgagaaaataaggcgcaacccttaccgtgtaatattatttgatgaaatagaaaaagcccatcgcgatatttttaacattcttttacaagtgttggaagaaggcgaattaagggacaatcttggacatacggtaaacttccgtaacaccgtcataataatgacaagtaacgccggtgcgagagagatttcaagagaatcaacccttgggtttacgtcaggttcaggcataatgaacgcctcggaaattgaatcggcgtcaatgtcggaacttcgcagaatattcaaccccgaatttttaaacagaatagatgaaattgtagtctttaatccgcttacgcaaaaacaaattaattcaatttttgacattgaatttaaagaactttccgcccgccttgccgagcagaattacagcatagagataactcccgccgcaaaacgcgttcttgtagaaaaaggctgggaccccaaattcggcggaagaccgttacgccgcacaatacaaaaagaacttgaagcgccgttgtctcaactcatgttggaagaaaactgggaagacggtacagtcttcattgcgggcgtgaaaaacgggaagattaagataaccgcgaaaccagccgtaaaactagaagtgtttgcataa

SEQ ID NO: 52534 - protein, 572 aa, Unknown
  Obtained from environmental sample
  DOMAIN (297)...(535): ATPase family associated with various cellular activities (AAA)
  misc_feature (1)..(572): Xaa is any amino acid
MGLVVAGTKYRGEFEERIKKILREVSQAGNIILFIDEIHSIIGAGGAEGTLDAANMLKPGLSRGEIRCIGATTLAEYRKHFEKDAALERRFQSVIVEEPSFDDTVNILFGIQKKYEEHHQVRYAQEAIPLAAKLAQRYITDKFMPDKAIDIIDEAAAFRKLENREQPPEINGIEDEIAKLCEEKTAYVSAQDYEHAAELRDKVRDLRARLEEVHASWERASMNEWPMVTENDVRRVVTEATGIPIMHIEEQESQRLLYIEDELHKSVIGQDDAIRRIANAIRRSMTGVSSPKRPMGSFIFLGPTGVGKTLLARQLAKYLFAKEDALVRIDMSDYMEKHNASRLVGAPPGYIGYEEGGMLTEKIRRNPYRVILFDEIEKAHRDIFNILLQVLEEGELRDNLGHTVNFRNTVIIMTSNAGAREISRESTLGFTSGSGIMNASEIESASMSELRRIFNPEFLNRIDEIVVFNPLTQKQINSIFDIEFKELSARLAEQNYSIEITPAAKRVLVEKGWDPKFGGRPLRRTIQKELEAPLSQLMLEENWEDGTVFIAGVKNGKIKITAKPAVKLEVFA

SEQ ID NO: 52535 - DNA, 411 bp, Unknown
  Obtained from environmental sample
  misc_feature (1)..(411): n is a, c, g, or t
atgcgcaatcttccaccctcaaaaatgaacttttccaacatgaaccagtcaattgccgccgagggttgtatcattaccaacgcaaatattaccaattcaatcgtcggtattcgtacgcttattgaaacgggggcaagtcttaacggagttgtttgtatgggagccgacttctacgagacagaaaagcaaaaaatacataacgccgaggcaagaattcctaatgtgggaataggcaggggcgcgattatcaaaggcgcaattatcgataaaaatgtctgcgtaggcgaagaatgcagaatcggcgttgacgacatcaaacgcacagacggcaattacgggcattattatatcgtggacggtattattgtcattcctaagaatactattctgtatccgggtactgttatttaa

SEQ ID NO: 52536 - protein, 136 aa, Unknown
  Obtained from environmental sample
  misc_feature (1)..(136): Xaa is any amino acid
MRNLPPSKMNFSNMNQSIAAEGCIITNANITNSIVGIRTLIETGASLNGVVCMGADFYETEKQKIHNAEARIPNVGIGRGAIIKGAIIDKNVCVGEECRIGVDDIKRTDGNYGHYYIVDGIIVIPKNTILYPGTVI

SEQ ID NO: 52537 - DNA, 1026 bp, Unknown
  Obtained from environmental sample
  misc_feature (1)..(1026): n is a, c, g, or t
atggaaaaattgataaaacgcaaggaatacatagaaaagcttctatcgtataaagaaaaaggcgttataaaagtagttaccggattgcgaagatccggcaaatccatattgttaaaattatttagaaagcaactgcttaaaactgggattagccaagctcaaatacaattttataattttgaattgcccgaaaattttttaaacaagtcttggaacgatatttattttgaaattaaatcaaaacttcaaaaaggcaaaatgaattttatatttctagatgaaattcaaaatattgaatcttttgaaaaactagttgatgggctatttgcaacaagaaacacggatgtttacattaccggttcaaatgccaacctgctttctggcgaacttgctactctgttaagcggcaggtacatagaaatttcaattctccctttttcttttaaagaatacttagaaattcgcagactcaatttcaaaaacaaatatttgaattatgcaacgcttttttttgattacgtaaatgaaacatcgcttccgaaaggcattggtttgcgttccgaaggttttgataaaatttacgaatatctgagttctatttatgataccataatagaaaaagatattgtgcagagatataaaataaacaataagcgagcttttgaaaacattgccaaatttgcagcggcaaacataggcagtcagttgtcgcctagcaatatatccaaatctttgaaaagcgataatcagagcattcatcacgctactgttgaaaaatttctagaatatcttgtgaaaagctttgttttttataaagttcacagatttgacataaaaggcaaaaaacagcttgccactcaagaaaagtattaccttgttgatttaggcttattgaatattttgcaagggagagaaagaacttccgatagaggacatattctggaaaacattgtgttttggagttgtttcgcagaggttataaaatttggactggcgcgatacgtggctatgaaattgattttgtag

SEQ ID NO: 52538 - protein, 341 aa, Unknown
  Obtained from environmental sample
  DOMAIN (3)...(166): Archaeal ATPase
  misc_feature (1)..(341): Xaa is any amino acid
MEKLIKRKEYIEKLLSYKEKGVIKVVTGLRRSGKSILLKLFRKQLLKTGISQAQIQFYNFELPENFLNKSWNDIYFEIKSKLQKGKMNFIFLDEIQNIESFEKLVDGLFATRNTDVYITGSNANLLSGELATLLSGRYIEISILPFSFKEYLEIRRLNFKNKYLNYATLFFDYVNETSLPKGIGLRSEGFDKIYEYLSSIYDTIIEKDIVQRYKINNKRAFENIAKFAAANIGSQLSPSNISKSLKSDNQSIHHATVEKFLEYLVKSFVFYKVHRFDIKGKKQLATQEKYYLVDLGLLNILQGRERTSDRGHILENIVFWSCFAEVIKFGLARYVAMKLIL

SEQ ID NO: 52539 - DNA, 429 bp, Unknown
  Obtained from environmental sample
  misc_feature (1)..(429): n is a, c, g, or t
atgcgctcttcaaactcgccccggtactttgttcccgctacgacaagccccatatcaaggcacaatatgcgttttccggcaagagcgtcaggaacagcttcacttacaaaaagttgggcaagcccttcgactatggcggtcttacccactccaggctccccgactaaaatcgggttgttctttgtgcgacgcgccaaaatgcgaaccgcgcggttaatttcagcttttctgccaacgacggggtctatcttccccgccctagcgagcgcggtaaggtctcgtgaaaacgcgtccaatactggagtaagcacgggaaatggggctggtttaattctgggttggcgatccgtttccactcccgttctgtggtggacggccgttctttccctgttaataaaatgcggctggaatctttctaaaggaacataa

SEQ ID NO: 52540 - protein, 142 aa, Unknown
  Obtained from environmental sample
  misc_feature (1)..(142): Xaa is any amino acid
MRSSNSPRYFVPATTSPISRHNMRFPARASGTASLTKSWASPSTMAVLPTPGSPTKIGLFFVRRAKMRTARLISAFLPTTGSIFPALASAVRSRENASNTGVSTGNGAGLILGWRSVSTPVLWWTAVLSLLIKCGWNLSKGT

SEQ ID NO: 52541 - DNA, 531 bp, Unknown
  Obtained from environmental sample
  misc_feature (1)..(531): n is a, c, g, or t
ttgcgcgttgtgttctcaaaaattgacgcggacttaaaagtcccgattgtagtagtacagcacatgccccccggctttaccaatgaattcgcgaagagccttgaccgcatctgcccgctggaagttaaagaagccgctgaaggcgactctatagttccgggaagaatccttatcgctcagggcaacaaacaccttgaagtggaaaagaaagccggaagccaagtagtgcacctttccgactctccgcttgtttcgggccaccgcccttccgcggatgtgcttttcgcttctgtagcgatgaattataccaacaacgctcttggagtaataatgaccggcatgggccgcgacggcgcccagcaccttgggacaatttacagggaaggcggcatgacgcttggccaggacgaaaaaagcgcggttgtctacggaatgccccgtgttgcctacgagttgggccatgtaatggaacaggtttctttggataatatggcgcgcagaatttgcgatgtcgcaaaaacgcctcgttag

SEQ ID NO: 52542 - protein, 176 aa, Unknown
  Obtained from environmental sample
  DOMAIN (1)...(171): CheB methylesterase
  misc_feature (1)..(176): Xaa is any amino acid
MRVVFSKIDADLKVPIVVVQHMPPGFTNEFAKSLDRICPLEVKEAAEGDSIVPGRILIAQGNKHLEVEKKAGSQVVHLSDSPLVSGHRPSADVLFASVAMNYTNNALGVIMTGMGRDGAQHLGTIYREGGMTLGQDEKSAVVYGMPRVAYELGHVMEQVSLDNMARRICDVAKTPR

SEQ ID NO: 52543 - DNA, 1497 bp, Unknown
  Obtained from environmental sample
  misc_feature (1)..(1497): n is a, c, g, or t
gtgattcacgaatgtgaattgcgtacacacaaaggcgtgtgtttttttgtggtgggcaataattgcccctacgagggaacatgtgcctttttttttgaggaaaggaatatgaatatgtctcatttaacaaagttgtctttggcagctttactcgctacggctccgaccgtatttgcgcaggcacctgcagaagcagttcctgttgcagaagccgctcctgctctcgttgcagagcctgcaccaccaccaccaccgccagctccggtaccagaagttaaaccggcaccagaagttaaacaagcagaaccggctaaacccgctgcggctggagctaaaatttcattatacggcttcgcacagctcaatgcaatttatgaagacggtgttttaagtgctagccaaaataactggaatctttatgctcccagagataatggcaaaggcggaagccgcacaatgctaaatgtgaatcacacaagaatcggtattaatttttctgattccccaaccgaaagcggcacggaattatccggtaaaatcgaaaccgattttaacaataacgcaaaccgcaatgtcaacggcaacggcggaacaagcaccggagccggatttcgcataagacattcttatggacaagtgaaattcaacgaccttggtttaacccttttgtgcggtcaaaccagcaatgtaatttccccacgcgacccttccatactcagtgaaggctccatgaactattcaggaaatataggtacagctcgcaccccgcaaattcgcttgacgcaagcacttggtcctgcggaaatagccgttgcagcatttgacgaccgctcagtaagtgctccaaaagctcccgctgtgcaagggcgtataggcttaaaaacttccgcagattgggcagacaaaaagcaaaatcttgagtttggcgtttccgggcattttgcgcaccagagaaacaccgacacaaccgagcatcaagttaataagaaagtttcgaaatcttattctttcaatgcagacttgaatttgcctataatagatatcctcggtctttccggagaattttactatggacaaaaccttggaagttacaacggaaatcttaatttaagtaggtctgatttagacccgaccaaaatcaaagacgaagacggcgtaaagtcctctggcttttggacaaacatcggcattaaactgcccgcaagcctaaccctcaacggcggacttggaatggaaagcataagcaacgatgatgatcttctgcctggaaaaataagcagcaatatgggaatattcacgaatttgagatataactttattccaagcgcatttataggcattgagtattggcacatatcaactgcttactcagatagccctaccaaagactcggacggcaaaaatatcaaaggacctgatggcaaggatatccttggtaaaaccaaggatggagcaattaaccgcattgaactagctttcaactattcatttaagtag

SEQ ID NO: 52544 - protein, 498 aa, Unknown
  Obtained from environmental sample
  misc_feature (1)..(498): Xaa is any amino acid
MIHECELRTHKGVCFFVVGNNCPYEGTCAFFFEERNMNMSHLTKLSLAALLATAPTVFAQAPAEAVPVAEAAPALVAEPAPPPPPPAPVPEVKPAPEVKQAEPAKPAAAGAKISLYGFAQLNAIYEDGVLSASQNNWNLYAPRDNGKGGSRTMLNVNHTRIGINFSDSPTESGTELSGKIETDFNNNANRNVNGNGGTSTGAGFRIRHSYGQVKFNDLGLTLLCGQTSNVISPRDPSILSEGSMNYSGNIGTARTPQIRLTQALGPAEIAVAAFDDRSVSAPKAPAVQGRIGLKTSADWADKKQNLEFGVSGHFAHQRNTDTTEHQVNKKVSKSYSFNADLNLPIIDILGLSGEFYYGQNLGSYNGNLNLSRSDLDPTKIKDEDGVKSSGFWTNIGIKLPASLTLNGGLGMESISNDDDLLPGKISSNMGIFTNLRYNFIPSAFIGIEYWHISTAYSDSPTKDSDGKNIKGPDGKDILGKTKDGAINRIELAFNYSFK

SEQ ID NO: 52545 - DNA, 372 bp, Unknown
  Obtained from environmental sample
  misc_feature (1)..(372): n is a, c, g, or t
atgaatacaaacaaatacacccgcgccgatattgccaaaacaataacggatgccggtattgagcgagcgaccgccggggctatcgccctggctatcgttcaggcgatgactgacgctctgaccgccggaaatgtgattgaactccggggcctgggtacgcttgcgctgcgggaacggaaagcccgaacaatgcacaatccccgcactatggtcgcggtagacgttccggcccggcgcgttgtctttttcaagccttccggaaaactgaaaagagcgatcaacggagaatcggatcaagattattgcacaaagcanaaaataacagcattcaacgtattactcacccggcaactttcatataaacttttgtaa

SEQ ID NO: 52546 - protein, 123 aa, Unknown
  Obtained from environmental sample
  DOMAIN (6)...(94): Bacterial DNA-binding protein
  misc_feature (1)..(123): Xaa is any amino acid
MNTNKYTRADIAKTITDAGIERATAGAIALAIVQAMTDALTAGNVIELRGLGTLALRERKARTMHNPRTMVAVDVPARRVVFFKPSGKLKRAINGESDQDYCTKXKITAFNVLLTRQLSYKLL

SEQ ID NO: 52547 - DNA, 1251 bp, Unknown
  Obtained from environmental sample
  misc_feature (1)..(1251): n is a, c, g, or t
atggaaacaacagaatcgaccagtctcttataccgagacataataggggtacaaaccccatgggcaataacagccgtagagaaggatgagcagaagagaaaaataaccataaggatagaacatgcccgggaacacacaataccgtgtccggcatgcggcgagagggcgaaagtatatgaccaccgtataagggtattaagatatttggacacatgccaatatgaaacatttcttgaagtacacatacccagggtgaagtgcaaggaagacggggtgcagcaaatagatataccgttgncggagaagcattcccgatttaccagccgatttgagatggccgtgctggtatggctggaaagcagccccatatcaaaagtagcggagaacttcaatntgagctgggatgaagtggacggtataatgcaaagggctgtacaacgggggcttgcccggcgggaacaggagaaagtgaataacatcgggatagacgaaacgtcacgtcagaaagggcataattatataacgataatactggataaagaccgggatcgcgtaatagacgtgcttgacgaccggaaggcggaaacggtggaaacatggcttaatacgcagaaaagcattgatttaagcgaattggagagcatttccatggatatgtgggatccgtatataaaagcggtaatggcggcgataccggaagcggaccagaagatagcgtttgaccggtttcatgtgagcaagcatataaacgaggcgctggataaagtaaggcggagggaacaccgtgcattcatggaacaggcaggtgaaagcccgttaagcaaaagccggtttcaatggctgacaaactcaaaccggactgacaaccgcagcgggaagcggaaagcgttcatgagtttgtcacagctaaatctggagacagcgagagcatggaggataaaggaggccgccaacagcctgtgggaatatgtgtacatgaatgtagcggaggcggcgtggaagaagctgctgtggtggataagccactgccggataccggaaatgatccaggccggcaagactatacaaaactatttctggggaatactaaacgcaatacgacttagagtaacaaacggaatgctcgaagccaagaacaacagcatccagaagattaaacgaatggcgtgtggatttagaaatccgcaaaggtttaagaacgctatcctctttcatttgggtaaattagacctttttccttccactacatag

SEQ ID NO: 52548 - protein, 416 aa, Unknown
  Obtained from environmental sample
  DOMAIN (159)...(260): Transposase
  misc_feature (1)..(416): Xaa is any amino acid
METTESTSLLYRDIIGVQTPWAITAVEKDEQKRKITIRIEHAREHTIPCPACGERAKVYDHRIRVLRYLDTCQYETFLEVHIPRVKCKEDGVQQIDIPLXEKHSRFTSRFEMAVLVWLESSPISKVAENFNXSWDEVDGIMQRAVQRGLARREQEKVNNIGIDETSRQKGHNYITIILDKDRDRVIDVLDDRKAETVETWLNTQKSIDLSELESISMDMWDPYIKAVMAAIPEADQKIAFDRFHVSKHINEALDKVRRREHRAFMEQAGESPLSKSRFQWLTNSNRTDNRSGKRKAFMSLSQLNLETARAWRIKEAANSLWEYVYMNVAEAAWKKLLWWISHCRIPEMIQAGKTIQNYFWGILNAIRLRVTNGMLEAKNNSIQKIKRMACGFRNPQRFKNAILFHLGKLDLFPSTT

SEQ ID NO: 52549 - DNA, 900 bp, Unknown
  Obtained from environmental sample
  misc_feature (1)..(900): n is a, c, g, or t
atgagatttaagaatgttgatgatcacgatgaatgtgtccgcctgatggtcgcggcggcgcagggcggaataaattattttgacaccgctcccggatattttgaaacaaggagcgaaaccgtctttggcaaaggattcgcggaaatgcgaaagcgaggactgccctacttaagcgcgaccaaaactttgaaaagtaccgagagtgggattcgcagggaaattgacaatcagcttaaacgtatgaatgttgattttatcgacttctaccatatatggtgcatattgagtttggaaaattgggaaaacaggaaaaaagacggtatattgaacactttcaggaagcttaaagaagaaggacttatccgccacatttgcatatcaagccatcttatgaaagacaaaataaaagaattattgttggaaggagtttttgaaggagtgctgttcgggtactccgcctacaatttcagcgcaagacaggatgcgtttaacgctattaagaaaaagaaacttggggccgttattatgaatccgcttgggggaggtgttataccgcaacatcccgagctttttaaatttatttgcagaaagggcgaaagcgtcgtcgccgccgcgcttcgggtcctttgggatcatcctgaaataacaaatacacttgtcggctttgatacaatcgaacatctgcgcgaggcgctccaggcgatggaaggctacaagccccgtacaaaagcggaacttgaagaaacaatcgcaaaagcgcaaacctcatttgaaggcatctgcactggctgcgcgtattgcgataactgtcctgagggaattccaattccatgttacatggacgcgtacaaccaaaagttactcgataaaacaaacaaagacccgattggagagaggtaa

SEQ ID NO: 52550 - protein, 299 aa, Unknown
  Obtained from environmental sample
  DOMAIN (3)...(254): Aldo/keto reductase family
  misc_feature (1)..(299): Xaa is any amino acid
MRFKNVDDHDECVRLMVAAAQGGINYFDTAPGYFETRSETVFGKGFAEMRKRGLPYLSATKTLKSTESGIRREIDNQLKRMNVDFIDFYHIWCILSLENWENRKKDGILNTFRKLKEEGLIRHICISSHLMKDKIKELLLEGVFEGVLFGYSAYNFSARQDAFNAIKKKKLGAVIMNPLGGGVIPQHPELFKFICRKGESVVAAALRVLWDHPEITNTLVGFDTIEHLREALQAMEGYKPRTKAELEETIAKAQTSFEGICTGCAYCDNCPEGIPIPCYMDAYNQKLLDKTNKDPIGER

SEQ ID NO: 52551 - DNA, 708 bp, Unknown
  Obtained from environmental sample
  misc_feature (1)..(708): n is a, c, g, or t
atgggcagtcatacgtcaaaaaacgctccgcccgggcaccttgaaaaattttatataagtgcgcaggaaattgtcagcatgaaagcccgctttgacggacttatcataaccggcgcgcctgtcgaaaccctcccttttgaggaagtcgattattgggacgaacttgccgaaataatcgattattccgaaaaaaacgtcttttcctgcttgcacatctgctggggcgctcaggccggcctttaccacagatacaatatcccaaaagtgccgcttgaaaaaaaaatcttcggggtctttccgcacgcggttaacgaacagcaccatttcctgttccgcggttttgacgatatttttctcgccccccagtcgcggcatacaacctgcgaccgtaacgccatagcaagcaatccgcaccttaaaattcaatccgaatcccatgaagccggcgtttttatcgcgaccgcgagggacggcagggaaatttacgttacgggacatcttgagtacgattccctcactctggaccgtgaataccgcagagacaaagaaaaggggcttgaaattgaagttcctaaaaattattatcctgatgatatgccttcaaaaacgcctattgtgctctggcgggctcatgccaatctttttttcagcaactggctgaattttgtttatcaggaaacgccttttaatttggacgatttggaataa

SEQ ID NO: 52552 - protein, 235 aa, Unknown
  Obtained from environmental sample
  DOMAIN (1)...(229): Homoserine O-succinyltransferase
  misc_feature (1)..(235): Xaa is any amino acid
MGSHTSKNAPPGHLEKFYISAQEIVSMKARFDGLIITGAPVETLPFEEVDYWDELAEIIDYSEKNVFSCLHICWGAQAGLYHRYNIPKVPLEKKIFGVFPHAVNEQHHFLFRGFDDIFLAPQSRHTTCDRNAIASNPHLKIQSESHEAGVFIATARDGREIYVTGHLEYDSLTLDREYRRDKEKGLEIEVPKNYYPDDMPSKTPIVLWRAHANLFFSNWLNFVYQETPFNLDDLE

SEQ ID NO: 52553 - DNA, 729 bp, Unknown
  Obtained from environmental sample
  misc_feature (1)..(729): n is a, c, g, or t
atgatggccgagagcgcttcaaccttattgaaggataacaatttaatacaagaattgaacactactatcgtctcacaggcgaaggcagttgataactcctcagcggaaaccgaagaaataatcacttcgattaaaaacacttcggaaatgtcccttaaacaacaggaatcagtaaaagatttgatggaagttgcgggacttgggcaagaatccatgaaaaaaaccattcaatcaataagtgaaatctctcagtctgttgaaggtataagttcgacaatccgcataatttcttcaatagcggcaaataccaatttgctgtcaatgaatgcggcgattgaagccgcccacgccggagaggcaggaaagggctttgcggtagtcgccggagaaatacgccgtctttcggaaaacaccagagaaaatgcaataggtatttcccatacgctaaaaaatattatcaacggaatatccgacacgacaaaacaatccggcgaaacagacgcgcgaatagcccaaatgtccgaagagataaaagggtttgccgaaactatgtctgtttttatggatacatttaatgaattatcggcaaaaagcggaaacattacctcctcccttgtaagcctaaaagaacaaagttcggcggttaaaacaagttatgcgcaaatgattgaaatgacaaataaacttgccaaagcgctgaaagacttatccgacttgtcaaaaagataa

SEQ ID NO: 52554 - protein, 242 aa, Unknown
  Obtained from environmental sample
  DOMAIN (24)...(237): Methyl-accepting chemotaxis protein (MCP) signaling domain
  misc_feature (1)..(242): Xaa is any amino acid
MMAESASTLLKDNNLIQELNTTIVSQAKAVDNSSAETEEIITSIKNTSEMSLKQQESVKDLMEVAGLGQESMKKTIQSISEISQSVEGISSTIRIISSIAANTNLLSMNAAIEAAHAGEAGKGFAVVAGEIRRLSENTRENAIGISHTLKNIINGISDTTKQSGETDARIAQMSEEIKGFAETMSVFMDTFNELSAKSGNITSSLVSLKEQSSAVKTSYAQMIEMTNKLAKALKDLSDLSKR

SEQ ID NO: 52555 - DNA, 1119 bp, Unknown
  Obtained from environmental sample
  misc_feature (1)..(1119): n is a, c, g, or t
ttgatgaaaaaacgtatcgctgttctaggagcgacaggctctatcggaaaaagttccctcgacataatttcccgcgaccctgaaaactttgaagtagtccttcttaccagccgttccagccgcggcaaacttgaagagttatcaaaacaattccccgccgccgtttgcgtactcgccgacgaacccaacggcaaacaaaatcttctaaccgcaatcgccgaaacaaaacccgacataacaataaacggcatatcaggcgcggcgggactcgaaccctctctcgcggcaatcaatgcgggctctcaccttgctctggcaaacaaggaaacaatcgtcatggcgggtgatttggctatccgctcggcaaaagaaaaaaacgtaaacattattcccgtagactccgaacactccgcaatttttcacctgcttcgcttctttgccgagcaaggcggcggcaaaagtgaaaatgtaagcgaaataattttaacggcgtcaggcggtccttttagatctttgagcgtaaaagacatggaaaaagtaacggtaaaagacgctctcgcccaccccacatggaatatggggcaaaaaataactattgattccgcttcaatggcaaacaaaggcttggaaataatagaggcttgcgttttttttaacatgcccggcgaaaaaataaaagtggcaatccatccgcagagcattgtccactcgatgatccgtctttgcaacggcgtcatttacgcccagctttcaaaacccgatatgcgccaccctattcacgacgctatctattatcccgtaacaactaagtcaactttagagccaatcagctttgattctctcaccctcgaattttcaaaacccgaccccgacaaattccccatgttaaaatacgcgtgggaagccgcgaggcgcggggcgttgtatccatgcgcctacaacgccgcaaacgaaacggcggttacggcgtttttggaacaaaagattggtttcctggatattcctaaaataacggaacatgttttacaggcggattggagcgccggtgttttggatttggaagcagtgcttagagcggacaacgcggcaaggcagagagcgaaggctttgataacgtaa

SEQ ID NO: 52556 - protein, 372 aa, Unknown
  Obtained from environmental sample
  SIGNAL (1)...(20)
  DOMAIN (6)...(115): 1-deoxy-D-xylulose 5-phosphate reductoisomerase
  misc_feature (1)..(372): Xaa is any amino acid
MMKKRIAVLGATGSIGKSSLDIISRDPENFEVVLLTSRSSRGKLEELSKQFPAAVCVLADEPNGKQNLLTAIAETKPDITINGISGAAGLEPSLAAINAGSHLALANKETIVMAGDLAIRSAKEKNVNIIPVDSEHSAIFHLLRFFAEQGGGKSENVSEIILTASGGPFRSLSVKDMEKVTVKDALAHPTWNMGQKITIDSASMANKGLEIIEACVFFNMPGEKIKVAIHPQSIVHSMIRLCNGVIYAQLSKPDMRHPIHDAIYYPVTTKSTLEPISFDSLTLEFSKPDPDKFPMLKYAWEAARRGALYPCAYNAANETAVTAFLEQKIGFLDIPKITEHVLQADWSAGVLDLEAVLRADNAARQRAKALIT

SEQ ID NO: 52557 - DNA, 1104 bp, Unknown
  Obtained from environmental sample
  misc_feature (1)..(1104): n is a, c, g, or t
atgcttgtgatagttgtctttgtattgatcttttttgtcgcgcgaagaatcagttcgccgataaaggctttccactccgctctggaaaaggtaaagaacggggatttaaccgtaaaagtagacgttaagtaccaggatgaaatcggggaattatcaggctacttcaatatgaccatggaaaaaataagaaaccttattgtcgccattaagggggaagctacaaacctgtccgatgtcggcggcgatctttcttcacaaatgcagcagaccgcggaggcggtacatcacattaccgttaacattggggctgtcaaagaaaaagtaaccggccagtccgcttcggtttccgaaacaagcgccacaatggaacaggtaacggacaacatcgacaaactcggcaaaaatgtggaagcccaaaccgaaagcgtgtcccggtcttcttcggcgatagaagagatgatcgccaacatagaaagcgtcacccaaacattggggcgtaacgcggaaagcgtacaggaattgatcaaagtttccgatattggccggaacagcctgcaaaaagtaacgcaggatattcaggaaatcgaaaaagaatccgcagggcttttggaaatcaactcggtcatggaaaatatttccggtcagaccaacttgctttcaatgaacgcggcgattgaggccgcccatgccggagacgcgggcatgggcttcgcggtggtcgccggcgagatacgccgcctttcggaaagcaccagggaaaattcgcagaacatttcccgcaccctgaaaaatatcattaacggcatctccgttacctcaaaacaatccggcgacacggacggccggattaccgaaatgtccaaagagataaacggttttgccgaaacaatgaccaacctgatcaaaaccctcagcgaactgtccacgggaagcgatgaaattaccgccgcgttaagaaacctccgcaaccagagcaacgtgatgaaaaccaactatgccgagatactgacaaagacaaaccaactgcataccgcgatgctcgagcttaccgacatatcgggacataatcagttatcacccgccatccaggcggctgcccggtaa

SEQ ID NO: 52558 - protein, 367 aa, Unknown
  Obtained from environmental sample
  DOMAIN (1)...(64): HAMP domain
  misc_feature (1)..(367): Xaa is any amino acid
MLVIVVFVLIFFVARRISSPIKAFHSALEKVKNGDLTVKVDVKYQDEIGELSGYFNMTMEKIRNLIVAIKGEATNLSDVGGDLSSQMQQTAEAVHHITVNIGAVKEKVTGQSASVSETSATMEQVTDNIDKLGKNVEAQTESVSRSSSAIEEMIANIESVTQTLGRNAESVQELIKVSDIGRNSLQKVTQDIQEIEKESAGLLEINSVMENISGQTNLLSMNAAIEAAHAGDAGMGFAVVAGEIRRLSESTRENSQNISRTLKNIINGISVTSKQSGDTDGRITEMSKEINGFAETMTNLIKTLSELSTGSDEITAALRNLRNQSNVMKTNYAEILTKTNQLHTAMLELTDISGHNQLSPAIQAAAR

SEQ ID NO: 52559 - DNA, 768 bp, Unknown
  Obtained from environmental sample
  misc_feature (1)..(768): n is a, c, g, or t
gtggacaatgggccgcttatccacgacaggggtttgaccatggtgcggaatatctatgcagagctgtacaaaaccgcagactacagggacaggctcgacatcgaaaagtacgccatccagagcgaatcggtcaggaggcggaaggctttcgtggaggcggctagctggattccctgccttaacgccgcgaccgacgaccttgaccggaacccatggctcctcaacgccgagaacgggaccatcgacctgaagactggggagctgctcccacaccgccaggaagacatgatcaccaaaatcgcggaggtgcgctatgactcggaagccgacagcccgatgtggaagcagttcgtccgggagatcatgggctacaagcccgagctgattgactatctccaagttgcggcgggctgggcgataagcggggacaccagcgagcagtccatgttcatactctacgggacaggggcgaacgggaaaagcacgttcctcaacgtcatccagcgcattttgggggattacgccatcgcgacctatgccgaaacttttatgaagcggaacaacgacacggcgaccaacgacatcgcccggctgcggggcacgcgctttgttaccacgcctgaaaccgagcaggggaagcggctttcggaacacctgatcaagcaggtgacgggcaacgattccatgactgcgaggttcctgtacggggagtatttcacttcgtaccgactttcaagattttcatggcaagcaaccacaagcctgtaa

SEQ ID NO: 52560 - protein, 255 aa, Unknown
  Obtained from environmental sample
  DOMAIN (74)...(254): Poxvirus D5 protein-like
  misc_feature (1)..(255): Xaa is any amino acid
MDNGPLIHDRGLTMVRNIYAELYKTADYRDRLDIEKYAIQSESVRRRKAFVEAASWIPCLNAATDDLDRNPWLLNAENGTIDLKTGELLPHRQEDMITKIAEVRYDSEADSPMWKQFVREIMGYKPELIDYLQVAAGWAISGDTSEQSMFILYGTGANGKSTFLNVIQRILGDYAIATYAETFMKRNNDTATNDIARLRGTRFVTTPETEQGKRLSEHLIKQVTGNDSMTARFLYGEYFTSYRLSRFSWQATTSL

SEQ ID NO: 52561 - DNA, 468 bp, Unknown
  Obtained from environmental sample
  misc_feature (1)..(468): n is a, c, g, or t
atggcaagcaaccacaagcctgtaatcagggggacggatcacggaatatggcggcggataaagctaatacccttcactaccacaattccggaagaaaagatggacaggtatttggagcagaagctcctggaagagaagccgggaatactgaactggcttattgagggggcgctccggtggcagaaggaaaggctgaggactcccgcgataatcgccaacgccactgacgagtaccggggcgagatggacgtaatagggaactttatcatggaacggtgcgtccagacgcctgagctgtcgatacgggcaagggagctgttccgtgtctatcaggaatggtgcggggagaacaacgagcttgctaccagcgagcggatgttcgggcttcgcatgaaggagctggggatgtcgcaaaaacgagcagccgatgggcggtactggctgggcttggggctgatgcagggttga

SEQ ID NO: 52562 - protein, 155 aa, Unknown
  Obtained from environmental sample
  misc_feature (1)..(155): Xaa is any amino acid
MASNHKPVIRGTDHGIWRRIKLIPFTTTIPEEKMDRYLEQKLLEEKPGILNWLIEGALRWQKERLRTPAIIANATDEYRGEMDVIGNFIMERCVQTPELSIRARELFRVYQEWCGENNELATSERMFGLRMKELGMSQKRAADGRYWLGLGLMQG

SEQ ID NO: 52563 - DNA, 1008 bp, Unknown
  Obtained from environmental sample
  misc_feature (1)..(1008): n is a, c, g, or t
atgaaaaaatacgcggaagaaaaaagaaccgagtatctttttatcaatataagattggcgtggcttctgccttatgtcgacaatccggaagatatgaagactttacagttagcgaaagaattcggcattccgaatgaaagactggttatagaaattacggaagaagattttaacgcgagcgaagaataccttcgcgccatagtccactacaaaaaagccggctgcagaatagcgttagacgattacggaaaagaagccagtaatattgacaggctggcgaaacttcagcccgacattatcaaaataaatattgattatattcataactgcgaaacctcttatcattaccgcgaatacttgcgagccatctccacattcgccgattctgtaggcattgaggttttgcacgagggcgtggaaacggaacgccagcttgacgtttgtatttcggcaaaaggaagattttatcaggggtatttactttcataccctcagccttccatgatagaccctaacgtaaacaagtttgttttttccgcgttaatcgcaacttcttattcaatgatacaaaccacggtagccgccgcggaaaaccaaaaaaattccattgacgttctgattgagcgtttttttaaagaaaacgcttttagttacgaaaaaataaataacaacgaatatcttacaaaaattttccacgcgcttccggaagtgatacgtgtttatttatgcaacagaaaaggcatgcagctttcaaacaaccttgaaaaacaagatgataaagttgtatgcaggaattttcaaaacaaaaactgggcgtggcgcggatattttcacgaaataataaaggcttttatccgcggcagaaaaagctgtcttacaaacccgtaccgcgattttaccacaaaagaaaaaatatgcacctattgttacgcgataaacgacgatgtgtttttattggcggacatcataaaagaaccggaaaggataacctataatgtctctggatag

SEQ ID NO: 52564 - protein, 335 aa, Unknown
  Obtained from environmental sample
  DOMAIN (6)...(164): EAL domain
  misc_feature (1)..(335): Xaa is any amino acid
MKKYAEEKRTEYLFINIRLAWLLPYVDNPEDMKTLQLAKEFGIPNERLVIEITEEDFNASEEYLRAIVHYKKAGCRIALDDYGKEASNIDRLAKLQPDIIKINIDYIHNCETSYHYREYLRAISTFADSVGIEVLHEGVETERQLDVCISAKGRFYQGYLLSYPQPSMIDPNVNKFVFSALIATSYSMIQTTVAAAENQKNSIDVLIERFFKENAFSYEKINNNEYLTKIFHALPEVIRVYLCNRKGMQLSNNLEKQDDKVVCRNFQNKNWAWRGYFHEIIKAFIRGRKSCLTNPYRDFTTKEKICTYCYAINDDVFLLADIIKEPERITYNVSG

SEQ ID NO: 52565 - DNA, 1095 bp, Unknown
  Obtained from environmental sample
  misc_feature (1)..(1095): n is a, c, g, or t
ttgccccattcgcatatcgttggcggaatttcaaatttgagttttgcattcaaaggcaacaatgcaatccgcgaaagtatgcactcctgttttctatatcatgcgacaaaagctggaatggattttggaattgtaaacgccggttcgcttcccatttacgatgatatcttggctgaggagaggaatttaatagaagatttgattttcaaccgcagccccgatgcaaccgaccgcttgctgcaatatgctgaaagcgtaaaggagagaaaaagcgagatggcgagccacacagatgctttggcgtggcggcagttgcctttggaagagagaatatcttatgctttggttaagggcatagatacctttatagaaagcgatgcggacgaggcgcgagtggcttatggcagtccgctgaaagttattgaagagcctttgatgaacggtatgaacaaggttggcgaactttttggtgcgggaaaaatgtttttgccgcaagtggtgaaaagcgcgagagtgatgaaaaaagcggtggcggttttgcagccatatatagacagttctgcgacccaaactgcaaaagccggcaaaattttgatggcaaccgtgaaaggcgatgtgcacgatattgggaaaaacatagtgtcccttgttcttgcctgcaacaactacgaaattatagaccttggagttatgtgtccggcagagaaaattttggaagcggtaaaggaacacctgccgaatttggttggtctttcggggcttataacgccaagccttgcagagatgagttttgttgtggaaactctttcaaaagaaaatctaggaattccagtgatgataggcggagccacaacttctgctttgcacaccgctgcaaaaatcgccacagtaggaaagcagcctgttgtttacgtgccagatgctggcaaagcggtttttgtggcggaatccattttgaataagtccaagcagaatgtgtttttccaagagaattttgagaagcagcaaaagctgagggaggctttgagccgcaaagaggagaaggtgctaacgccgattgaggaagcgaggggcaaggggttggagttgttttga

SEQ ID NO: 52566 - protein, 364 aa, Unknown
  Obtained from environmental sample
  DOMAIN (195)...(315): B12 binding domain
  misc_feature (1)..(364): Xaa is any amino acid
MPHSHIVGGISNLSFAFKGNNAIRESMHSCFLYHATKAGMDFGIVNAGSLPIYDDILAEERNLIEDLIFNRSPDATDRLLQYAESVKERKSEMASHTDALAWRQLPLEERISYALVKGIDTFIESDADEARVAYGSPLKVIEEPLMNGMNKVGELFGAGKMFLPQVVKSARVMKKAVAVLQPYIDSSATQTAKAGKILMATVKGDVHDIGKNIVSLVLACNNYEIIDLGVMCPAEKILEAVKEHLPNLVGLSGLITPSLAEMSFVVETLSKENLGIPVMIGGATTSALHTAAKIATVGKQPVVYVPDAGKAVFVAESILNKSKQNVFFQENFEKQQKLREALSRKEEKVLTPIEEARGKGLELF

SEQ ID NO: 52567 - DNA, 696 bp, Unknown
  Obtained from environmental sample
  misc_feature (1)..(696): n is a, c, g, or t
atgctagatattttgccaaaaaatctaaaccttttccaagcccagcaagcattaagcgaacatttcaaagactgcattttaataggcgttgatgaggcaggtcgcggtccattggcaggtccggtggtggcggcagcagccgtcgtcggggcagccgttgtgggggcagacntatgtgtntgccccaaccaaccaaccgctatatcaattttaaacgattccaaaaaattaaccgaaaaacaacgcgaacaaattttcgcggaattgccgggttattgcaaataccattccatcggcgaagcctcagcaggggaaatagacgatattggaattttaaatgcaaccttcctagccatgaggcgtgcacttgcccctataatttcacagctcaacgaaaaaaaattgccatataaaattttggtggatggaaatttgcatataagggaaatagacaaagatttgcaaatgcccatagtgaaaggagatggcagggtggcttgcatcgctgctgcctctatttttgcaaaagtgcatagagacaggctaatggtgaaatttgccgagcaattcccaaattatagctttgaaaagcacaaaggctatggcacaaaagcacacttaaccgccatacaaaaatttgggcaatgcgaaattcataggaagagttttagggttgcgttgccattgcattcatag

SEQ ID NO: 52568 - protein, 231 aa, Unknown
  Obtained from environmental sample
  DOMAIN (28)...(226): Ribonuclease HII
  misc_feature (1)..(231): Xaa is any amino acid
MLDILPKNLNLFQAQQALSEHFKDCILIGVDEAGRGPLAGPVVAAAAVVGAAVVGADXCVCPNQPTAISILNDSKKLTEKQREQIFAELPGYCKYHSIGEASAGEIDDIGILNATFLAMRRALAPIISQLNEKKLPYKILVDGNLHIREIDKDLQMPIVKGDGRVACIAAASIFAKVHRDRLMVKFAEQFPNYSFEKHKGYGTKAHLTAIQKFGQCEIHRKSFRVALPLHS

SEQ ID NO: 52569 - DNA, 984 bp, Unknown
  Obtained from environmental sample
  misc_feature (1)..(984): n is a, c, g, or t
atgttttctaccttgcacacttttcatattcctgtgatgggcacgtcttatacggcagatacgcctgctagggtggctccgtttggaatatcttccgttgtatctttggtggacgatttcctattggagaggtttcgtaaaatttatgcggaagaatataagctaaaatatgagcccattcctccaaaagagccagatggcagagcaaaaagaataaccgcataccttaatacgctggcagaggttgtgaagattcgttttgaatccataaaaaaacaacctttttttatgaaaaatgaaaaagccaagtattttgaaatgctacccacagggcaccatttgaggggtctttacctaaagctgatgggtatgaaagatgctccgtcaaaagaaagagaggaaatagagaccactttgaaccatagcatggaagaaggttccatagatgtgaacataatggttaagctagaccgcttgcctccaaacccaaacggcaaagaacctttgagcgatgaattcacagatgcaaaaaccgcattgaaaggctatgctaaatcttctctaaaaaattccgccattgtttttagcgcgggcataaaccaaagcctttacaactatatggcgcagttcaaagaattttacagaaatgccacaggtgaaataggaaaaagaatcatcatcaaggcttcggattttcgctctgctcttattcaaggaaaatttttggcgcgtaaaggtttagaagtgagcgaatacagaattgagtcggggcttaactgcggcggtcatgcttttccaagtcagggaatgctcctccctacaatattaaaagaaattcgctcgcaacgcagccttttgcaccaattcagggaaaccgttgtgaatttttacaaatccaaaggctggaacaccgaggtagcaaaagaagcccctccgccaaaaatcactgttcaaggcggcattggaaattacgccgaagattga

SEQ ID NO: 52570 - protein, 327 aa, Unknown
  Obtained from environmental sample
  misc_feature (1)..(327): Xaa is any amino acid
MFSTLHTFHIPVMGTSYTADTPARVAPFGISSVVSLVDDFLLERFRKIYAEEYKLKYEPIPPKEPDGRAKRITAYLNTLAEVVKIRFESIKKQPFFMKNEKAKYFEMLPTGHHLRGLYLKLMGMKDAPSKEREEIETTLNHSMEEGSIDVNIMVKLDRLPPNPNGKEPLSDEFTDAKTALKGYAKSSLKNSAIVFSAGINQSLYNYMAQFKEFYRNATGEIGKRIIIKASDFRSALIQGKFLARKGLEVSEYRIESGLNCGGHAFPSQGMLLPTILKEIRSQRSLLHQFRETVVNFYKSKGWNTEVAKEAPPPKITVQGGIGNYAED

SEQ ID NO: 52571 - DNA, 645 bp, Unknown
  Obtained from environmental sample
  misc_feature (1)..(645): n is a, c, g, or t
atggaaaacggcgcttttcttgacgaggactattttgaacacctccttgcggaaattcgggaaattcgccttagcgagcgccgcttttaccaaaagataaccgacatctattccaccgcgatggattacaacaagaacgcccccataacaaaagagttttttgccaaggttcaaaacaagctgcactttgccatacacggacataccgccgccgaggtaatttatgaacgggccgatgccgctaaagagcacatgggattgaccacatgggagaacagccctcaaggaaaaattgtcaagacggatgtggccgttgcgaagaattatctgactgaaacagaactggaatctttggggcgcatagttaacgcctatcttgatttggctgaagatcgggcaaaaaaacatatccccatgactatggaagattgggctaaacgccttgaccgttttcttgaggccgatgaccggtcaattcttcaagattcgggaaagataagcgccaagatcgctaaagaattcgcggaaagcgaatttgagaaataccgcatcattcaagaccacttgtttgaatccgattttgacagggaaatcaaaaaaatcgaaggtaatgcccatgataataagcgtaagcagaagaactga

SEQ ID NO: 52572 - protein, 214 aa, Unknown
  Obtained from environmental sample
  misc_feature (1)..(214): Xaa is any amino acid
MENGAFLDEDYFEHLLAEIREIRLSERRFYQKITDIYSTAMDYNKNAPITKEFFAKVQNKLHFAIHGHTAAEVIYERADAAKEHMGLTTWENSPQGKIVKTDVAVAKNYLTETELESLGRIVNAYLDLAEDRAKKHIPMTMEDWAKRLDRFLEADDRSILQDSGKISAKIAKEFAESEFEKYRIIQDHLFESDFDREIKKIEGNAHDNKRKQKN

SEQ ID NO: 52573 - DNA, 765 bp, Unknown
  Obtained from environmental sample
  misc_feature (1)..(765): n is a, c, g, or t
atggtttttcaccggctaaaggaaaaaattgtttatgtaagaaatcctatgaatatacgtcaagtcagtgaaattaatcttagccccgaacttgttgattgtattgttttctggactaaaaatccaaagccaatgattgataagcttcaattacttaatgatcacaaatactattttcaattcacccttaatccctatgagccggatgttgaggcaagattgccgcccaaaacagaaataatcgacacttttaaaagattatccggtatgattggcccgcagaaagttatttggcgttatgatccaattttgctcaatagcaaatatagtacggcatatcatattgataagtttgaagagttagccggctgtcttaaaggctatacagaaaaagtggtattcagttttattgatttttataagaagatagcggaaaacctcaaattattaggcgttattgaaataacaacagaggaaaagaacatcattgcccaaaaattttcagaaatcgcaagaaacaataatctctcgattgatacctgtgccgaagatatcgatctttcaggatatggcattgcgcatgcccgctgtatagacgacaggttaatctcaaaaataaccggatatgatttaactgttcaaaaagacaaaaaccagcggttggaatgcggctgtgcaaaaagcattgatataggcgaatacaattcctgctctaatggctgcgtttattgttacgcgaattacagcggcaaaaagcggtcataa

SEQ ID NO: 52574 - protein, 254 aa, Unknown
  Obtained from environmental sample
  misc_feature (1)..(254): Xaa is any amino acid
MVFHRLKEKIVYVRNPMNIRQVSEINLSPELVDCIVFWTKNPKPMIDKLQLLNDHKYYFQFTLNPYEPDVEARLPPKTEIIDTFKRLSGMIGPQKVIWRYDPILLNSKYSTAYHIDKFEELAGCLKGYTEKVVFSFIDFYKKIAENLKLLGVIEITTEEKNIIAQKFSEIARNNNLSIDTCAEDIDLSGYGIAHARCIDDRLISKITGYDLTVQKDKNQRLECGCAKSIDIGEYNSCSNGCVYCYANYSGKKRS

SEQ ID NO: 52575 - DNA, 438 bp, Unknown
  Obtained from environmental sample
  misc_feature (1)..(438): n is a, c, g, or t
atggctgcgtttattgttacgcgaattacagcggcaaaaagcggtcataatatactattgacaaacacgcatcgctctcggattaataatctgagggcttttttatcctcaaatggagtatttctaatgataattaaggtagttctgttgcttttgttttttgcggtaacaatttcggtgggtttctatttccggagaaaagtcgcaaatgtcaatgatttcgtgctgggtggcagggcggtcggcccgtggcttaccgctttcgcctatgggacatcttatttttcagcggttatttttgtcggctacgcggggcagttcggctggaggttcggcacagcggccacatgggtcggcctgggttacgctttcatcgggtcgctgatgccgtgggtgatactcggaccgcgcacgcccggttatgacgaatccatttga

SEQ ID NO: 52576 - protein, 145 aa, Unknown
  Obtained from environmental sample
  misc_feature (1)..(145): Xaa is any amino acid
MAAFIVTRITAAKSGHNILLTNTHRSRINNLRAFLSSNGVFLMIIKVVLLLLFFAVTISVGFYFRRKVANVNDFVLGGRAVGPWLTAFAYGTSYFSAVIFVGYAGQFGWRFGTAATWVGLGYAFIGSLMPWVILGPRTPGYDESI

SEQ ID NO: 52577 - DNA, 1239 bp, Unknown
  Obtained from environmental sample
  misc_feature (1)..(1239): n is a, c, g, or t
ttggggggtactcagtttggaaaactaatcgttatgtacttgcgggaaaatttaccaacagatgagcaaacgctttccggcttaaccgttaaggaactgaataaactttacgcacaattttcaaaagtgagcaaagaagagccagagctagaagacaaagctagagaggcatttgcgaaactggaaaaaggcgatgaattttatcgcaaattatggacagcattcagagaagcaacattaaaagaactaaagcgcatttacaaaataatgggcgttgattttgatcactacaccggagaatctttttttgaaactcatattccttctgttgtgaaagagcttcaagccaagggtttgttggtgaatagccaagagagagatgttgtgcttttagacgaattatctttgcctccttgcctcataagaaaaagcgatggcagcactctttatgcaacaagagatttggcggcggcaatttacagaaaaaaagaattcaattttgacaaatgcctttacattgtggacaacgggcaggctttgcatttcaggcaggtgttcgcagtgcttggcaaaatgggctttaagtggaacaacgattgcgagcatattccctttggtttgattctccataaaaacgaagagggaaaatgggaaaaaggcaaaaccagagctggcaccgcaagccttttgagagatgttatagaagcggctaccgaaaaaatattagcagttataaatgaaaaaaatcccactcttgaaaataaagaggatatagcgacaaaaattggagttggggcaatagtctttaacgatttgaaaaacaggcgactgatggatgtgaaatttgactgggacggagctttaagttttgacggagccacaggtccttatgttcaaaacgcgcacgtgaggctttgcagcattttgagaaaaagcaataaaaatgctttggaattagaattcaaaagcgaagaacttttagaccaaaattcttacgatttaataaaagcactttcatgcaaagaagaaaaaataaccatagcctgcgaaagcagggagccttgcactctggctcaatactcactagagcttgcagaagccgctcatagatttattcacaataatagagttatagggagcagcgaggaaaattccaggctgtttttagtttactgcacccagcaagttctggaaagcctccttgaactgctgggtatagctcccatagaagaaatgtaa

SEQ ID NO: 52578 - protein, 412 aa, Unknown
  Obtained from environmental sample
  DOMAIN (1)...(284): tRNA synthetases class I (R)
  misc_feature (1)..(412): Xaa is any amino acid
MGGTQFGKLIVMYLRENLPTDEQTLSGLTVKELNKLYAQFSKVSKEEPELEDKAREAFAKLEKGDEFYRKLWTAFREATLKELKRIYKIMGVDFDHYTGESFFETHIPSVVKELQAKGLLVNSQERDVVLLDELSLPPCLIRKSDGSTLYATRDLAAAIYRKKEFNFDKCLYIVDNGQALHFRQVFAVLGKMGFKWNNDCEHIPFGLILHKNEEGKWEKGKTRAGTASLLRDVIEAATEKILAVINEKNPTLENKEDIATKIGVGAIVFNDLKNRRLMDVKFDWDGALSFDGATGPYVQNAHVRLCSILRKSNKNALELEFKSEELLDQNSYDLIKALSCKEEKITIACESREPCTLAQYSLELAEAAHRFIHNNRVIGSSEENSRLFLVYCTQQVLESLLELLGIAPIEEM

SEQ ID NO: 52579 - DNA, 1815 bp, Unknown
  Obtained from environmental sample
  misc_feature (1)..(1815): n is a, c, g, or t
ttggcatcacccgcaaatactacgcaattttatatggctcctaatgattctcgtggaagcgtgccgcaggtttatcaaccaaccgatgcgcaagtgccaaaagccacggtaattcgcgcaatagaggttagttcaagcggcgtaaaaagcgatgttgcgacaaaaacatattttatcggcgataatttgtctaattacgggaatattcgcgttgtttctttagtttccgacccttataaccttgtagacaccaattacggcatcatggtaaggggaaaatcaagttatagatgggatactaatccttcttataattttagaatgaaaggaatcgactgggaacgtcctgcgtatttagagatttttgaagggaataacagaactaaatcggcgctttctaccggagtaggtatccgcgtccggggcggatggtcaagaggtattgggcaaaaaagttttagtgtgtactttaaagagcaatacggcataaaaaaccttaaaaattataatctgatacctaaagacacaacgcttggcactaccggcgcggttaaagctgacggtaaaacgcctgtaacgcaatataaaggctttatgttaagaaacggcgcgaatgattgtgattatacaaaattttacgatgtatttttacaggatctgctgagcgatcgcagtttttccacgcaagcctctgttccctgcgtcgtgtatcttaatggtgaatactggggaccatataactttcaggagaggtacagcgacaaccataccgaatataaatatggtgttgataaagataatgttatctctttcgataacggggaattagacgacggcgatcccgctaccgatgccaatttatatccaaatatggtggtgggatttgcaaacaaagatatgtcaaattcgacaaactatgctgatttttgcaagctcgttgatattgacaattatattgattactgtgcggcggaaatttacatatacaatgaagattggcctcataataattaccgggcatggagaacgcgtaacgtggaacccggtaacccatacggcgacacaaaatggcgctggcagatgtttgatacggaatttgcgttaggaatctataacgacggcaaccttacaggtcaaggtggcgtagacgccttcgctaaaatctttaataatgttggtaaacctaatacctctgaagttattacccctgatgtcattaaagataattatgacaacaacaaactttttaaagctttgttgaaaaatcccgatttttgcagaaaatttgtcaacacaatgctggatctttacaatgtaaacttccattccgacaattatttacccaaaatcaacagttatgagactgtatacaggccgttaatgaatggttattttgacaggtggggcaaaccctgggggtcagtttttgatgataaagtaagaaacgccaaaaaatacctgaatgacatacgacccgcgatggtaaatacttatttaccaaaatattttggcggcagcagcggctattcggacattgccaatatcaacgtgggcactttgcgcgatgttacagtttccacatcaggcgcatccgacgcaaccataaaagttaatacggttaccccgaaacttgcgtcgggaagctggacaggcaagtattactccggcgttcccattaccgtaacggcaagtcccaatgcgagcggcaaaacatttaaaggctggacggtaacgggcggtaccgccgcgactccttcagcgacgacaaccactgttacccttaccggtaacgcaacaattacggccacgtattaa

SEQ ID NO: 52580 - protein, 604 aa, Unknown
  Obtained from environmental sample
  misc_feature (1)..(604): Xaa is any amino acid
MASPANTTQFYMAPNDSRGSVPQVYQPTDAQVPKATVIRAIEVSSSGVKSDVATKTYFIGDNLSNYGNIRVVSLVSDPYNLVDTNYGIMVRGKSSYRWDTNPSYNFRMKGIDWERPAYLEIFEGNNRTKSALSTGVGIRVRGGWSRGIGQKSFSVYFKEQYGIKNLKNYNLIPKDTTLGTTGAVKADGKTPVTQYKGFMLRNGANDCDYTKFYDVFLQDLLSDRSFSTQASVPCVVYLNGEYWGPYNFQERYSDNHTEYKYGVDKDNVISFDNGELDDGDPATDANLYPNMVVGFANKDMSNSTNYADFCKLVDIDNYIDYCAAEIYIYNEDWPHNNYRAWRTRNVEPGNPYGDTKWRWQMFDTEFALGIYNDGNLTGQGGVDAFAKIFNNVGKPNTSEVITPDVIKDNYDNNKLFKALLKNPDFCRKFVNTMLDLYNVNFHSDNYLPKINSYETVYRPLMNGYFDRWGKPWGSVFDDKVRNAKKYLNDIRPAMVNTYLPKYFGGSSGYSDIANINVGTLRDVTVSTSGASDATIKVNTVTPKLASGSWTGKYYSGVPITVTASPNASGKTFKGWTVTGGTAATPSATTTTVTLTGNATITATY

SEQ ID NO: 52581 - DNA, 696 bp, Unknown
  Obtained from environmental sample
  misc_feature (1)..(696): n is a, c, g, or t
atgcgatacggtttttttgacaatatacaatgcgaatatgtgatcgagaaagtcgatacccccatgagctggaccaattacattggcaccgagaacatggtgggggtttttaaccagacctgcgggggctacctgttttacaagagcgcggagcatcatcgtataacccgtttcagggggaacgcggtgccggctgaccgccccggtcattatgtgtaccttcgtgatgacgaaacaggcgattactggacgataagctggcagccgacggcaaagcctgttagctgttacaaggccaggcacggcctttcctattcggtgtattcatgcgagtattcggggatttacgcggagcaaaccctgtttatcccaagaggcgcggatgtggagctatgggatgtcagaatcgaaaaccgttccggcaagccgcggaagataagcgtgttttcctacgccgaactgagctggcatcagattgacggcgacaataaaaattttcagagcaccctgtactgcgccggagcctcgtacaaggacggcgttattgagcaggaactccattacgagcaaaactcttaccagttctttaccgccgattttgaccctgacggttttgagattgagcgcgagcgctttaccggcgtctggcaaagtgagagcaatccggaagcggtggaaaaagcgcatatcctatga

SEQ ID NO: 52582 - protein, 231 aa, Unknown
  Obtained from environmental sample
  DOMAIN (1)...(63): Putative carbohydrate binding domain
  misc_feature (1)..(231): Xaa is any amino acid
MRYGFFDNIQCEYVIEKVDTPMSWTNYIGTENMVGVFNQTCGGYLFYKSAEHHRITRFRGNAVPADRPGHYVYLRDDETGDYWTISWQPTAKPVSCYKARHGLSYSVYSCEYSGIYAEQTLFIPRGADVELWDVRIENRSGKPRKISVFSYAELSWHQIDGDNKNFQSTLYCAGASYKDGVIEQELHYEQNSYQFFTADFDPDGFEIERERFTGVWQSESNPEAVEKAHIL

SEQ ID NO: 52583 - DNA, 885 bp, Unknown
  Obtained from environmental sample
  misc_feature (1)..(885): n is a, c, g, or t
ttgcaaaacgcgagcgaaccgccaaaggcagaaactccaactgttaccgagagcgatagcgagggaagcagagaagaaacatgtcccaacagaaaaggccctcccataacaagagaagtggtatatttggaaagcccagaagaccacgaagggcgtgatatggctatctttcgtttaactaacggcgaaaatatatggataaacggaaccccagacagtgtgaaaaaaggtgatagagggtctataacgtattatgaagagcagcttccatttgacacggattgttgggagcttaataggttgaaatcttggaaaaagacaggtgagtctgctaatacattaatcgatgcaagggacaagcaaacctattggactactaagataggcaagcaggtttggatggcggagaatttaaattatgaggcagcaggctcaaagtgctatagctacgaccctgacaactgccaaaaatatggacggctttatcactgggaaacggctatgaaagcctgtccaaaaggctggcatttgccgagtgatgctgaatggaaaacgctcacaaattttgttggcggctcgtcaaccgctggaaaaaaattgaagtctaagagcggctgggaagacaacggcaatggcacagacgaatacggcttttccgctctgcccagcggctactgctattttggtttcgagtgccccgatgtctgtgaagacggctatccgagtgataatgttgacaatttccacgatgtaggctacggcggcaactggtggagtgctaccgagaacacactccgtggcataaactacaacagcgagagtatcagcattagtagctacgataaggacaacaacctgtatagtgttcgttgcgtgcaggactaa

SEQ ID NO: 52584 - protein, 294 aa, Unknown
  Obtained from environmental sample
  misc_feature (1)..(294): Xaa is any amino acid
MQNASEPPKAETPTVTESDSEGSREETCPNRKGPPITREVVYLESPEDHEGRDMAIFRLTNGENIWINGTPDSVKKGDRGSITYYEEQLPFDTDCWELNRLKSWKKTGESANTLIDARDKQTYWTTKIGKQVWMAENLNYEAAGSKCYSYDPDNCQKYGRLYHWETAMKACPKGWHLPSDAEWKTLTNFVGGSSTAGKKLKSKSGWEDNGNGTDEYGFSALPSGYCYFGFECPDVCEDGYPSDNVDNFHDVGYGGNWWSATENTLRGINYNSESISISSYDKDNNLYSVRCVQD

SEQ ID NO: 52585 - DNA, 810 bp, Unknown
  Obtained from environmental sample
  misc_feature (1)..(810): n is a, c, g, or t
gtgccagcgatagatttttaccatatatggtgcgtgacgagtttggaaaattggaaagagcgtaaaaatcagggtataataaaaactttccaaaaattgaaagaagaaaaattgataaaccatatatgcgtttccacccatttgattcagaacaatatagccgagctattcacggagtccgtatttgaaggcgtgttgttcggttattccgcatataattttaaaacccgcgaaaaggcttttgatgttgtgcagcaaaagaatttgggtgcagtggtgatgaaccctctcggcggcggtttaattccgggcaatccagagctttgcaggtttttgctgaaaagcggtgaggagtgcaataaagaaaacgcggttaaagcggctttgcaatttctgtgggatcacaaacctctatccgttgccttggtaggctttgcaaataaaggggaaatagatttagcactgaacgtagcggaaacgcacacgcctagaaccgaggcggaattagccgcggcaaaagcgaatgcctctaaatgttttgaagggatttgcacgggctgttcctattgcgatgattgccctcaggaaatacccattccaaaatttatggatgcctataacagaaaaattttggaagaagatgaacagaatatttacaaccagctcaaatggcattggaatttatcgccggaagttgctggcacttgctcgcagtgcgggagctgcgagagcgtatgcacacagcatttgaatatcatcgagcggttggagtatattgcaaaaaaatgctccgaagtaattatggattaa

SEQ ID NO: 52586 - protein, 269 aa, Unknown
  Obtained from environmental sample
  misc_feature (1)..(269): Xaa is any amino acid
MPAIDFYHIWCVTSLENWKERKNQGIIKTFQKLKEEKLINHICVSTHLIQNNIAELFTESVFEGVLFGYSAYNFKTREKAFDVVQQKNLGAVVMNPLGGGLIPGNPELCRFLLKSGEECNKENAVKAALQFLWDHKPLSVALVGFANKGEIDLALNVAETHTPRTEAELAAAKANASKCFEGICTGCSYCDDCPQEIPIPKFMDAYNRKILEEDEQNIYNQLKWHWNLSPEVAGTCSQCGSCESVCTQHLNIIERLEYIAKKCSEVIMD

SEQ ID NO: 52587 - DNA, 453 bp, Unknown
  Obtained from environmental sample
  misc_feature (1)..(453): n is a, c, g, or t
atggagggatatcgcataatgctgcggctttcttccgatttggaaaagaatatcagaacggacggcgaaaccgcctaccccaatgaatgctgcggcgttttaatcggcgaaattgacaacactggggtcaaaacagccaggcgcacgctgaccattgataacgccagggaagacggcgagcaataccaccgctttctcataacgccggaagatatgatgaaagcggagcaaaccgcaagatcgatgaaacttgacgttatcggtttttaccactcccaccccgaccatccctccgcgccttcaggctatgacaaagatcacgccctgcccttttattcgtatgtaatcgtatcggtagacaagggaaaggcgcaaattcttacaagctgggagcttaaagacgacagaactgattttgtacaggaaaatataattatggaggaaacaaattga

SEQ ID NO: 52588 - protein, 150 aa, Unknown
  Obtained from environmental sample
  misc_feature (1)..(150): Xaa is any amino acid
MEGYRIMLRLSSDLEKNIRTDGETAYPNECCGVLIGEIDNTGVKTARRTLTIDNAREDGEQYHRFLITPEDMMKAEQTARSMKLDVIGFYHSHPDHPSAPSGYDKDHALPFYSYVIVSVDKGKAQILTSWELKDDRTDFVQENIIMEETN

SEQ ID NO: 52589 - DNA, 897 bp, Unknown
  Obtained from environmental sample
  misc_feature (1)..(897): n is a, c, g, or t
atgggtatcttagatcttgttggcaacactccggtaattgaattaaaaaaaacattcaatgcggcaaacggggtttccatattcgccaaggcggaatattttaacccaagcggctctgttaaagaccgcgcagcaaaggccatgatactgcacggcattaatacagggaagctcaccaaagataagattatattggactccacaagcggcaataccggcatcgcgtacgccatgtttggcgcggcgcttggttaccgggtgctactctatatgccgtcaaatgccagcgaggaaagaaaaaagcttatacgcgcttatggcgcgaagattacagaaacagacccgcttgaaggctccgacggggcgtaccgtattgtaatggagttagcccaaaaagagccggacttgtattttttcccaaatcagtacgataattttgaaaacccgcgcacgcattatgaaacaactggccttgaactgtatgagcagtgcagaccaacgctttttgtttccggaaccggcacttcgggaacttttatgggcgtttccaggcggcttaaagagcttgatccgtccatacaagtcacgctcatgcagccggattcgcctttccacgggcttgagggaatgaagtacatggaaacaaccataacaccgaaaatatttgacaaaaacattgccgatttacacataacggttaaaacggaagacgcttacaaaacggcgcggcggcttgcctcggaagaaggggtgtttgtcgggataagctccggggcaaatgtgtacgccgcgatggaagtcgcgaaaacactgcctgagggttcgcgagtagcgacaatattgtgcgataacggcagccgttatctgtcacaacccttatggagggatatcgcataa

SEQ ID NO: 52590 - protein, 298 aa, Unknown
  Obtained from environmental sample
  DOMAIN (3)...(284): Pyridoxal-phosphate dependent enzyme
  misc_feature (1)..(298): Xaa is any amino acid
MGILDLVGNTPVIELKKTFNAANGVSIFAKAEYFNPSGSVKDRAAKAMILHGINTGKLTKDKIILDSTSGNTGIAYAMFGAALGYRVLLYMPSNASEERKKLIRAYGAKITETDPLEGSDGAYRIVMELAQKEPDLYFFPNQYDNFENPRTHYETTGLELYEQCRPTLFVSGTGTSGTFMGVSRRLKELDPSIQVTLMQPDSPFHGLEGMKYMETTITPKIFDKNIADLHITVKTEDAYKTARRLASEEGVFVGISSGANVYAAMEVAKTLPEGSRVATILCDNGSRYLSQPLWRDIA

SEQ ID NO: 52591 - DNA, 1167 bp, Unknown
  Obtained from environmental sample
  misc_feature (1)..(1167): n is a, c, g, or t
atgcaaaagctatccgacaggacagccggatttaccgattctgtcattcgccgaatgacacgcatatcgctcaggcacggggcggtaaacctttctcagggctttccggattttgacccgccaaaggaaatcctgaacaggctttctgaaatagcgcatacggggccgcaccagtattcaatcacctggggtgcacagaattttcgcgaggccctttccgaaaaacagtcgaaatggatgggcaggaaaatagatccggagcgcgaaatagtggtcacttgcggcagtaccgaggcgatgatggccgccatgatgacggtggcgaataccggcgacaaggtgatcgtattctcgccgttttatgaaaactacggcgcggacacgattctgtccggagccgaaccggtttatgtgccattgcgtccgccgcttttcaacttcgacacgaatgaactggaagccgcctttaaacagcgtcccaaggcgctgattctgtgcaacccctcaaaccccagcggaaaggcttttacccgcgatgaattaacaataatcgcggatcttgctaaaaagtatgacgcgtatgtcattacagacgaagtgtatgagcatattgtttacgcgccccttacccatacctacatagcgtccctgcccggaatgttcgagcggacaatttcatgcagttccctttccaaaacttattcgataacgggctggcggcttggatacatcatcgcgcctgaagaagtcatcgaaacggcgaaaaaagtgcacgactttttaacggtgggcgcggcggcccccttgcaggaagcggctgtcgcggcgttgaagtttccttcttcctattacgacaagctgttacgcgaatataccgaaagacggcagttgtttctgaaaggactggacgatctcggcatacagcacacaaatcccgagggcgcgtactatgtaatgcttgacatatccgaatacggctatgagagcgaccttgatttttgcgaaaagnctggccgaaagggtaggcgtgggcgcggttcccggttccagttttttcagggaagacgtgaacagttttatacgttttcatttgccaagaagaacgatacccttaacgatgcgctgaaccggctggaaaaaatgaaagaacggatgcgaaaggcttga

SEQ ID NO: 52592 - protein, 388 aa, Unknown
  Obtained from environmental sample
  DOMAIN (26)...(378): Aminotransferase class I and II
  misc_feature (1)..(388): Xaa is any amino acid
MQKLSDRTAGFTDSVIRRMTRISLRHGAVNLSQGFPDFDPPKEILNRLSEIAHTGPHQYSITWGAQNFREALSEKQSKWMGRKIDPEREIVVTCGSTEAMMAAMMTVANTGDKVIVFSPFYENYGADTILSGAEPVYVPLRPPLFNFDTNELEAAFKQRPKALILCNPSNPSGKAFTRDELTIIADLAKKYDAYVITDEVYEHIVYAPLTHTYIASLPGMFERTISCSSLSKTYSITGWRLGYIIAPEEVIETAKKVHDFLTVGAAAPLQEAAVAALKFPSSYYDKLLREYTERRQLFLKGLDDLGIQHTNPEGAYYVMLDISEYGYESDLDFCEKXGRKGRRGRGSRFQFFQGRREQFYTFSFAKKNDTLNDALNRLEKMKERMRKA

SEQ ID NO: 52593 - DNA, 930 bp, Unknown
  Obtained from environmental sample
  misc_feature (1)..(930): n is a, c, g, or t
atgatgttgattttgactttgcggcgcgaagcgacgcatgtttttaaacggggcgttgcggggcggagccccgcagggtgggtagcggaaaacaaaaatgggcgaagcccatttttggttggagcgagggagggcgtagccctccccttatatgattttgattttaattatttgactttaactttttttaaccggagagtctgcagtaatggaaaagcaatacaacccggcaaccgtcgaagagcgcctctacgccgactggctgaaaaaaggctgcttccgcgccgacccgtcgtcgcccaaaccaaagtacagcatagtgatcccgccgcccaacgtgaccggcgtactgcacatcgggcacgccctaaacaacaccattcaggacatcctcatacgccacaagcgtatgaagggcttcgaggcgatgtggatgcccggcaccgaccacgcgggaatcgccacgcagaacgttgtggagcggcggttggccaaggagaagcgcgacaggcactccttgggacgggaggctttcgtacaggaggtctggaaatggaaagaggagtaccacgccacaatcacgaaccagctcaaaaagctcggctcctcctgcgactgggagcgcgagcgcttcacgatggacgaggggctgtccgcgtccgtcagaaaggtgttcgtccgactgtacaacgaggggctgatctacaaggggaagtacatcatcaactggtgcccgcggtgccagaccgccctatcagacgaggaggcggagcacaaggagatcggcgggaagctctaccacctgcggtatccctacgaagacgggagcggctacgtgactgtcgccaccacccgccccgagacgatgctcggcgacgtggcggtcgcaataaatcctgcggacgggcgttacaaggatatcaagcataa

SEQ ID NO: 52594 - protein, 309 aa, Unknown
  Obtained from environmental sample
  misc_feature (1)..(309): Xaa is any amino acid
MMLILTLRREATHVFKRGVAGRSPAGWVAENKNGRSPFLVGAREGVALPLYDFDFNYLTLTFFNRRVCSNGKAIQPGNRRRAPLRRLAEKRLLPRRPVVAQTKVQHSDPAAQRDRRTAHRARPKQHHSGHPHTPQAYEGLRGDVDARHRPRGNRHAERCGAAVGQGEARQALLGTGGFRTGGLEMERGVPRHNHEPAQKARLLLRLGARALHDGRGAVRVRQKGVRPTVQRGADLQGEVHHQLVPAVPDRPIRRGGGAQGDRREALPPAVSLRRRERLRDCRHHPPRDDARRRGGRNKSCGRALQGYQA

SEQ ID NO: 52595 - DNA, 1626 bp, Unknown
  Obtained from environmental sample
  misc_feature (1)..(1626): n is a, c, g, or t
atggaaaagcaatacaacccggcaaccgtcgaagagcgcctctacgccgactggctgaaaaaaggctgcttccgcgccgacccgtcgtcgcccaaaccaaagtacagcatagtgatcccgccgcccaacgtgaccggcgtactgcacatcgggcacgccctaaacaacaccattcaggacatcctcatacgccacaagcgtatgaagggcttcgaggcgatgtggatgcccggcaccgaccacgcgggaatcgccacgcagaacgttgtggagcggcggttggccaaggagaagcgcgacaggcactccttgggacgggaggctttcgtacaggaggtctggaaatggaaagaggagtaccacgccacaatcacgaaccagctcaaaaagctcggctcctcctgcgactgggagcgcgagcgcttcacgatggacgaggggctgtccgcgtccgtcagaaaggtgttcgtccgactgtacaacgaggggctgatctacaaggggaagtacatcatcaactggtgcccgcggtgccagaccgccctatcagacgaggaggcggagcacaaggagatcggcgggaagctctaccacctgcggtatccctacgaagacgggagcggctacgtgactgtcgccaccacccgccccgagacgatgctcggcgacgtggcggtcgcaataaatcctgcggacgggcgttacaaggatatcaagcataaaaaaataaaactgccgcttaccgaccgtgttatccccttcatagaagacggcttcgtcgatagggagttcggcaccggcgccgtcaaggtgacgcccgcccacgacccgaacgacttcggaatgggtcagcgccatcaactggaaccgcttcaggtaatggacgagagcggtaaaatggccggcggcataccggaaaaatataaggggatggaccgattcgactgccgcaaagccgtcatagaagacctgaccgccgcaggccttgttgagaaaatagacgaccacacccacgccgtagggcactgctaccgctgccacaccatcgtggaaccgtactactccgaccaatggtttgtgaagatgaagcctttggccgaacccgcgcttgcggcggcggtcgaagacaaagttaccttctatcccgcccgatggaggaaaacgtatatcgattggatggagaacatccgcgattggtgcatatcccgccaaatctggtgggggcaccgcatacccgtctggtactgcgggtgcggtgaggtaatcgtaagcgaggagaccccgaaccgctgccccaaatgcggatcaacaacgctgcgtcaggacgaggacgtcctagacacttggttctcctcgtggctttggccgttctccacgatgggctggccggaagagaatgactttatgaaaaaattctatcctacggatgccttagtcacagcgccggagatactcttcttctgggtcgctagaatgataatggccggctgccacttcaccggaaaactgccgtttaccgacgttatcctccacggaacggtgcgcgacaagaccggtcgcaagatgagcaagtcgctcggcaactccatagacccgctgaaatcattcccgtctcggccgatctga

SEQ ID NO: 52596 - protein, 541 aa, Unknown
  Obtained from environmental sample
  DOMAIN (13)...(538): tRNA synthetases class I (I, L, M and V)
  misc_feature (1)..(541): Xaa is any amino acid
MEKQYNPATVEERLYADWLKKGCFRADPSSPKPKYSIVIPPPNVTGVLHIGHALNNTIQDILIRHKRMKGFEAMWMPGTDHAGIATQNVVERRLAKEKRDRHSLGREAFVQEVWKWKEEYHATITNQLKKLGSSCDWERERFTMDEGLSASVRKVFVRLYNEGLIYKGKYIINWCPRCQTALSDEEAEHKEIGGKLYHLRYPYEDGSGYVTVATTRPETMLGDVAVAINPADGRYKDIKHKKIKLPLTDRVIPFIEDGFVDREFGTGAVKVTPAHDPNDFGMGQRHQLEPLQVMDESGKMAGGIPEKYKGMDRFDCRKAVIEDLTAAGLVEKIDDHTHAVGHCYRCHTIVEPYYSDQWFVKMKPLAEPALAAAVEDKVTFYPARWRKTYIDWMENIRDWCISRQIWWGHRIPVWYCGCGEVIVSEETPNRCPKCGSTTLRQDEDVLDTWFSSWLWPFSTMGWPEENDFMKKFYPTDALVTAPEILFFWVARMIMAGCHFTGKLPFTDVILHGTVRDKTGRKMSKSLGNSIDPLKSFPSRPI

SEQ ID NO: 52597 - DNA, 1242 bp, Unknown
  Obtained from environmental sample
  misc_feature (1)..(1242): n is a, c, g, or t
ttgttcatcgcttacggaaccgcgctctccatagatgaaatgtttgcggagcaatgtaaaaacataagtccgcaggcggttcttacttcactttcaatgtaccgtgaaattgttacggaaaatacatcaatgaataatattaacttttttaatacagaggcggagcgtaacgcgtttattgacagacataaaattctttctattgataaagacaagattaacaagaaaagcggagaaacccttagagtttatatcggcattgacgcgggttctaccacgaccaaatttgttttgatagacgaagatgaaaatgtagtggattgttcttacagccccaacaaaggcgagccgcttaaagttattaaacaagccatgctggaaatgtacgaaaaataccgtaaagcgggagtcaatcttgaagttatcgcgcttggaactacaggttacggggaattgctttttgacaaagcccttggagccgatttccacacggttgaaaccgtagcccacgcggcggcggcgcaaaaatatataccgggcgtaagtttcattttggatatcggcggacaggacatgaaagccattaatatttcaaacgacattgttacaaatattactgttaacgaggcttgttcgtcggggtgcggttctttcttggaaacttttgccacaaatctgaatatccccgtcgataaaatagcagagacagcgtttaattcaaaaaatcccgcgcgtttgggcagccgctgtactgtttttatgaacagcacgattattaccgaacaaaaaaacggcaaacaagccgacgacattatggcgggtctttgccgctcaatcgttgaaaatgtttttacaaaagttgtgcgcatttccagccccgcgcagcttggagataaaatcgtagtacaaggcggcactctgaagaatgacgcggtattgcgggcattggaacagtacctcggcaaatccgttgtacgcgctccgtatccgggagaaatgggcgctatcggcgtcgctcttttgacaaaaagggaaatcgcggaacacggatacacatcgcctcacggcacgagcgatcgcacgcgctttatcggttttgaggagctaaaaaaattcgattacactcaggaagccaatttaatttgtcctttctgcacaaataactgcaaccgtacgttagtgcgtttttacatggtcttacatggggtacaggcaaccgctgtgaacgcgnagagcttgtag

SEQ ID NO: 52598 - protein, 413 aa, Unknown
  Obtained from environmental sample
  DOMAIN (85)...(342): BadF/BadG/BcrA/BcrD ATPase family
  misc_feature (1)..(413): Xaa is any amino acid
MFIAYGTALSIDEMFAEQCKNISPQAVLTSLSMYREIVTENTSMNNINFFNTEAERNAFIDRHKILSIDKDKINKKSGETLRVYIGIDAGSTTTKFVLIDEDENVVDCSYSPNKGEPLKVIKQAMLEMYEKYRKAGVNLEVIALGTTGYGELLFDKALGADFHTVETVAHAAAAQKYIPGVSFILDIGGQDMKAINISNDIVTNITVNEACSSGCGSFLETFATNLNIPVDKIAETAFNSKNPARLGSRCTVFMNSTIITEQKNGKQADDIMAGLCRSIVENVFTKVVRISSPAQLGDKIVVQGGTLKNDAVLRALEQYLGKSVVRAPYPGEMGAIGVALLTKREIAEHGYTSPHGTSDRTRFIGFEELKKFDYTQEANLICPFCTNNCNRTLVRFYMVLHGVQATAVNAXSL

SEQ ID NO: 52599 - DNA, 780 bp, Unknown
  Obtained from environmental sample
  misc_feature (1)..(780): n is a, c, g, or t
ttgaataaaattattctttcgccgaaaccatcgtacggctttaaattgctggatgcttcgggtctgttggaagtggttttgcccgaaatcacaaacctgaaaggcgttgagaaaataggagagtgcggacataaggataattttttgcatacgttggaggtgttggataatattgccaaagttagcgacaacctttggttgcgttgggcggcgttgttgcacgacattgccaaaccccaaaccaaaaagtatgatccgaaaatcggctggacgttccattcccacgaatttatcggtgcaaaaatggtgccgaaaatctttgctcgactgcatttgccgatgaatgagaagatgcgttatgttcagaaattggtggaattgcacttgcgccccattgcgctggtggaggacatggtgacggattcggcggttcggcgattattgtttgaagccggcgatgatattgatgatttgatgcagctttgcaaggccgacatcacatcgaaaaatcgcgaaaaagtgatgcgctataaaaataattttacattagttgagaaaaaactcgtggaattggaagaaaaagaccgcattcgtaattttaaacttccgattacgggcgaagaaatcatggaactgttcaaccttcaaccgtccaaaccggtcggaataattaaggatgctgtgaaagaagccatattggagggcatcattcctaatgagcatgaggctgcggtgcaattagcgagggaaatttttagcactaaagtaagtgcttcgtag

SEQ ID NO: 52600 - protein, 259 aa, Unknown
  Obtained from environmental sample
  DOMAIN (47)...(170): HD domain
  misc_feature (1)..(259): Xaa is any amino acid
MNKIILSPKPSYGFKLLDASGLLEVVLPEITNLKGVEKIGECGHKDNFLHTLEVLDNIAKVSDNLWLRWAALLHDIAKPQTKKYDPKIGWTFHSHEFIGAKMVPKIFARLHLPMNEKMRYVQKLVELHLRPIALVEDMVTDSAVRRLLFEAGDDIDDLMQLCKADITSKNREKVMRYKNNFTLVEKKLVELEEKDRIRNFKLPITGEEIMELFNLQPSKPVGIIKDAVKEAILEGIIPNEHEAAVQLAREIFSTKVSAS

SEQ ID NO: 52601 - DNA, 549 bp, Unknown
  Obtained from environmental sample
  misc_feature (1)..(549): n is a, c, g, or t
gtggacgatgaagatatgcaaattttagcggattacgatgtcaaagtggtgcacaatccacagtcgaatttgaaaatgctttcggggtatcaattcaaatatgagnagatgaacnagaaaggcatcacgatttgtttggggatggacggttgtgcctcgtcgaacaatctggatatgaccgaagccatgaaattggcggcactcatgcaaaaagcctggcggttcgacgccaccaaactacccgaaaacgaagtgttggacatggctaccgtgaatggcgcaaaaacattaggcctcaacgcaggcctcgtgaaagaaggttgtttggcggatttgatattggtggatttgaatcaaaccgcgtttgtcccaaaccacaatacgttggcgaatttgatttacgcggccaacggttcggcagtggataccctcatttgcaatggtcaggtattgatgaaaaaccgcgttgttaaaggcagagagactattataaataatgctgttgaagcagcaaagattattacgtccgtcatgtcgagcggagcgtag

SEQ ID NO: 52602 - protein, 182 aa, Unknown
  Obtained from environmental sample
  misc_feature (1)..(182): Xaa is any amino acid
MDDEDMQILADYDVKVVHNPQSNLKMLSGYQFKYEXMNXKGITICLGMDGCASSNNLDMTEAMKLAALMQKAWRFDATKLPENEVLDMATVNGAKTLGLNAGLVKEGCLADLILVDLNQTAFVPNHNTLANLIYAANGSAVDTLICNGQVLMKNRVVKGRETIINNAVEAAKIITSVMSSGA

SEQ ID NO: 52603 - DNA, 2505 bp, Unknown
  Obtained from environmental sample
  misc_feature (1)..(2505): n is a, c, g, or t
atgatacagatgccgcggatattccggacgcttcgtttcccgcgattgcgtccggtttttttaataccctgcggaatctgtcttgcccttattctcttttttgttatcaacgccgtttttgtgaacatattaaacggcgtatcattttcccgcgcctactttgacagaaacggtaaacttctcaacattttccttacagatgatgacaagtacagactaagggcgaatctcgctgattttccgcccgtgcttattgaagcgattcttcttcaggaagaccggtatttttacggtcacatcggtcttaacccaatggcgatgtttaaggcgggctgggaaacttatgtgaaaaaaagcagaagaatgggcgcatcgactatcaccatgcagcttgcccgccttcgccataacctgtacactcgtaacctgccgggaaaaattgcgcagatctttacagcgattttttttgagatatgttattcaaaacaggaaattcttgaagcctatctaaacatggttccctgcggcggcaacattgagggatttccggcggcggcctggtattatttcggcaaggacgtaaaagagctttcgttatctgaaatcctaagccttgtagtaattccccaaaaccccgtaaaacgcgctccgttaaacggacgcgcccaggctgaattactggattcccgcaaagtattgtatgaagcatggattgagaaccaccccgaagatactctggtggagacggaaatggatttgcagccatttcttgtaaacagttttccccgccgtcttcttcacctaacggaataccttaacaagcagcctttacaaaaagcgaatctgtccccgttaaaccgttaccgcactacgattgatctaactctgcaaaacatatgcgaaagggagctggaattttacctcgtacgcaatcgcggatggggaataaacaacggcagtatacttcttgtcgattatacaaacatggaaacgcttgcggcgataggttccgcgaattattttgacgataaaatccgggggcaggtaaacggctttgcctccaagcgctcgcccggttcaaccttaaaaccgtttatctacgcattggcgctggagcagggattgattcatcccgagaaaatgcttaaggatacgcccgtaggtttcagcgagtacacgcctgataattttcgcggcgatttcaaaggcccggtgagcgcgtggtacgctcttgtagacagccggaacattcccgccgtacaacttgcgagggacattcacaaaccagacctttacgattttctgaaaatgtccggtatttccggcttgaaagaaaaaggccattacggcctttcgatagtattaggcagcgcggatttgacaatgctggaacttgcctccctctacgccgcccttgtcaacggcggagtaaaaaaagaactccgctttttatcggcaagagacaatttttacaccggcggcgcttctcaatacgatgtttctggcaacgatgttactcgaaacgatgcttctcaaagcgatgtttctaaaaacgacgtttctcgaagcgaagcctcgaaaactcccgcgcaaggtgaaaaaattttaacccccgccgccgcggcgattacattgagaatgcttgaaagaaatcccgcccctgatgattttcgtgtaatgaaaagccgttcagttcccatagctacaaaanccggcacttcatnaggttttaaggacgcgtgggctatcgccgtatttgaccgttatgtgctatgcgtatggcttggaaacttttccggagagggaaacagcgcgttcataggcaggctaagcgccgcccccttgggtttcagcataatagacgcgatacttgcggaaatccccgatgataaacttttagcgcgccgtcctcttccgccggaagtaaaagcggttcaaatatgcgccgtctccggcgacattccctccgacgactgcccccgattaatagatactctttttatccccggcgtctccccgattaaccgctgccgcattcaccgaaagatctacatcgacacccgcaccggctaccgtacaaacgaaaccgaaggtaaatttatcagaagcgaagtccgcgaattctggccctcggacataatggaaatttttgaagccgcaggccttccgcgtttttcaccgccgccttatccgcccgattccactagcggcgctccgtcaagcggttttccgccttcgattatttcgcctcttgcgaacaccgactacattatccgcccgggacttcaggcggacaaccgcaataatcaattggtgcttctcgcttccgcggatcaggacgcgagcgaattgttttggtttgctaacgcgagtttcttggggagagcgaaaccgagagagcggtttgtttggtcgccggaggcgggggtttgggatgtttcggtggtggacaatttgggacgctcttcgggggttcgtgtgcgggtggaagcttcgggggagtga

SEQ ID NO: 52604 - protein, 834 aa, Unknown
  Obtained from environmental sample
  DOMAIN (319)...(621): Penicillin binding protein transpeptidase domain
  misc_feature (1)..(834): Xaa is any amino acid
MIQMPRIFRTLRFPRLRPVFLIPCGICLALILFFVINAVFVNILNGVSFSRAYFDRNGKLLNIFLTDDDKYRLRANLADFPPVLIEAILLQEDRYFYGHIGLNPMAMFKAGWETYVKKSRRMGASTITMQLARLRHNLYTRNLPGKIAQIFTAIFFEICYSKQEILEAYLNMVPCGGNIEGFPAAAWYYFGKDVKELSLSEILSLVVIPQNPVKRAPLNGRAQAELLDSRKVLYEAWIENHPEDTLVETEMDLQPFLVNSFPRRLLHLTEYLNKQPLQKANLSPLNRYRTTIDLTLQNICERELEFYLVRNRGWGINNGSILLVDYTNMETLAAIGSANYFDDKIRGQVNGFASKRSPGSTLKPFIYALALEQGLIHPEKMLKDTPVGFSEYTPDNFRGDFKGPVSAWYALVDSRNIPAVQLARDIHKPDLYDFLKMSGISGLKEKGHYGLSIVLGSADLTMLELASLYAALVNGGVKKELRFLSARDNFYTGGASQYDVSGNDVTRNDASQSDVSKNDVSRSEASKTPAQGEKILTPAAAAITLRMLERNPAPDDFRVMKSRSVPIATKXGTSXGFKDAWAIAVFDRYVLCVWLGNFSGEGNSAFIGRLSAAPLGFSIIDAILAEIPDDKLLARRPLPPEVKAVQICAVSGDIPSDDCPRLIDTLFIPGVSPINRCRIHRKIYIDTRTGYRTNETEGKFIRSEVREFWPSDIMEIFEAAGLPRFSPPPYPPDSTSGAPSSGFPPSIISPLANTDYIIRPGLQADNRNNQLVLLASADQDASELFWFANASFLGRAKPRERFVWSPEAGVWDVSVVDNLGRSSGVRVRVEASGE

SEQ ID NO: 52605 - DNA, 1188 bp, Unknown
  Obtained from environmental sample
  misc_feature (1)..(1188): n is a, c, g, or t
atgaaaactctgtattttgaatgtaacatgggcgctgcaggcgatatgctgacagcggctttactagaattacatgacaatcctgaaagttttttgaaaaaattaaacaacatcggtatccccaatgtattggtaaaaacccaaccgtccgtaaaatgcggcataaccggaacacacatcaccgtaacagttaatggagaggaagaagtacatcacgatcatactcacgtcgaacatgaacatcatcacagtaaaaacagctatcacgatattgaacatctaatcagtcatttgaatatatccgataccgtaaaaaagaacatccttgcggtttataaactgatagccgaagctgaaagccacgcgcacggcgttcctgtagacaaaatacattttcacgaagtaggagaaatggacgcgcttaccgacattaccggcgtttgtatgctgatagaagaacttgcaccagatgtaatttttgcttctcctgttaataccggaagcggacacgtccgttgcgctcacggcgttttgccagtacctgctcccgcaaccgcctatattttacagaatatccccatttatagcgaccaaatgaaaggagagctttgtacacccacaggtgcggcgttactcaaacattttgtaaaggaatttcgcgcaatgccagtgataagcgttaataaaataggatatggcatgggcaaaaaagattttgaaaaagtaaattgcgtaagggcatatatcggcagtacaacgaataatgctgaagaagttacggagcttgtttgcaatttagacgacatgacaccggaagcggtagcttttgcgcaacagcttttgtttgatgaaggggcgctcgacgtatacaccactcccgtttgcatgaaaaagggacgcatgggattaacttttacctgtatgtgcagaagtgaattaaaagataagatggtttcacttattttcaaacacacaaccacacttggaatgagagaaaacacaaaccgccgttatacgttgcaaaggtatcaaagcgaagttcaaacaaaatacggtactgttagagtaaaaaccgcttgcggttacggagtgcaaaaatcaaaacctgaatatgaggatatagccaaaatagcgcgggaaaaaggattgtcaatacaggatgtgttaaaagagacaggcagcaactga

SEQ ID NO: 52606 - protein, 395 aa, Unknown
  Obtained from environmental sample
  DOMAIN (4)...(395): Protein of unknown function DUF111
  misc_feature (1)..(395): Xaa is any amino acid
MKTLYFECNMGAAGDMLTAALLELHDNPESFLKKLNNIGIPNVLVKTQPSVKCGITGTHITVTVNGEEEVHHDHTHVEHEHHHSKNSYHDIEHLISHLNISDTVKKNILAVYKLIAEAESHAHGVPVDKIHFHEVGEMDALTDITGVCMLIEELAPDVIFASPVNTGSGHVRCAHGVLPVPAPATAYILQNIPIYSDQMKGELCTPTGAALLKHFVKEFRAMPVISVNKIGYGMGKKDFEKVNCVRAYIGSTTNNAEEVTELVCNLDDMTPEAVAFAQQLLFDEGALDVYTTPVCMKKGRMGLTFTCMCRSELKDKMVSLIFKHTTTLGMRENTNRRYTLQRYQSEVQTKYGTVRVKTACGYGVQKSKPEYEDIAKIAREKGLSIQDVLKETGSN

SEQ ID NO: 52607 - DNA, 759 bp, Unknown
  Obtained from environmental sample
  misc_feature (1)..(759): n is a, c, g, or t
atgaataaaaaggaaactttaattttattaaaaaaaattcaggagggcgcggttacccccgaagaagcgttatcaagattttgtaccgagccttttgaagacttgggttacgcgaaactagaccaccatcgtgaattgaggaagggcgtttgtgaagtaatatacggcgaaagtaaaacgccggaacagataacaggcattattaccgcaatgcagaataaaggacagcgtttaataatgataaccaggttatcggcagaagccgccgaaactgtcaataaaaaaattccattgcgatactttcagacagcgcggattgggataatcggcgaaacacccaaacctgacggcattggaaaaattgtagtcgctacaggaggcacaagcgatattcctattgcggaagaagcggcaataaccgccgaagctcttggcaatgaagttatccgcctgtacgatgtcggcgtcgccggactccatcgtttactttcacggcttgaagcgattatggacgcacaagtaataatctccatagccgggatggaaggagcattaaccagcgtcataggcggtcttgttgactgtccggttatcggcgttcccaccagcataggctacggcgcttcattcaacggattatccgcacttctttcaatgctgaattcatgcgcttcgggcgtaagcgtagtaaatattgacaacggttttggcgcaggctatctggctagtatgataaatcataagagaggtaataaatga

SEQ ID NO: 52608 - protein, 252 aa, Unknown
  Obtained from environmental sample
  DOMAIN (119)...(249): AIR carboxylase
  misc_feature (1)..(252): Xaa is any amino acid
MNKKETLILLKKIQEGAVTPEEALSRFCTEPFEDLGYAKLDHHRELRKGVCEVIYGESKTPEQITGIITAMQNKGQRLIMITRLSAEAAETVNKKIPLRYFQTARIGIIGETPKPDGIGKIVVATGGTSDIPIAEEAAITAEALGNEVIRLYDVGVAGLHRLLSRLEAIMDAQVIISIAGMEGALTSVIGGLVDCPVIGVPTSIGYGASFNGLSALLSMLNSCASGVSVVNIDNGFGAGYLASMINHKRGNK

SEQ ID NO: 52609 - DNA, 1752 bp, Unknown
  Obtained from environmental sample
  misc_feature (1)..(1752): n is a, c, g, or t
atgatctacagggatcagatatttaatatcagcgaaaatgacctgcgctttaccgagagcgaactcgcccaatatttccacagccggaatatttccatccaacctgaagacctccgtgaaatcatgcaggacacaggcggctgggcattcgcgatcaacctaatcgcgcggtcgtatcaaaaagcaccgggttacacaggctatttacaagatgccatgaagacaaacatcttcaagcttatcgaaattgaaatctgggacgagatctccgaacgcttgcagacctttttggtacgcctttccctgataagtcatctttcctttgatttgatcggcttattggccgggggagatgaaaatctaattgccgagtttgaaaagcagaacgcgtatatacgccgcgatagctacgtcaatgcgtaccttattcaccccttgtttttggaattcctgtgtaaaaagcaggaactcctttcggaaaatcaaaaacaggaaacttacgcgattgccgcggactggtgcaacaaaaactcttttagaatagacgcgctgtcgtattatgaaaagacagggaactaccaatcaattgtaaaccttctttttgaattaccagcgcagataccggatgcagtcgcgcgctacgcggcgtcgatatttgaccgggcgcctccggacaattttgacaaggttgaattccttgccgaaaagcacctgcgtacctacatgagccggggtctatggcagaaatcacttgagctggtgaaaaaatacgaggcaaaatttctggcacggccggaaaatgatatcgacgggaaacgtactctggcaaggctgtatgtttgctgggcctatatacgcgtctttgccggcttaacggatgacatctacgattttgatacttacatggaaaaagcctgcaaattaatttccacgtcaatcgatccaggtaatttaggccccctttgccctggcgcatggatcagctatgttggcacctcaaggaaaggcgcactggaagaatacattgccactctggagcgcagccgggtttatatatcgtccagctttatcagaggttttatggcaggggatgcggaattggcccggggagagcttgagttctaccggggcgaaacaaccgccgcggcttcttatgtcgttcttgcgctaaaaaaggcgcgggataacaaacagtatgtccttattcacagggcgctgtactacgcaatgcgaattgcagcttcacagggaaatttcgcgcttacggaacaaatgataaaagaaacgaaaggccaattgaatgaaactgaatactttaatcgttttctggattacgatatttccctttcatggtattactgtttcctggggctgccggaaaaggcggttgactgggtaaaagaggatttttcgcccttcagctatcctggctttattgaaaattttggaaatcaaataaaagcaaggtattgttttattacaaaaaaattttctccgcttctggagtacattgatgaaatgaaaacacgtgaatcctttctgttcgaacggattgaacttttggcgatggaagcctgcgttcattataaaatgaacaacaaanaagaagcttgttccgccttttttgaagcttatcaaaacgcgttacccaatgatattttgatgcnctttatcgagctgggcaaggatatgcgtactctgacagcttccgtcctaaaggaatcaaactgcaaataccggaaacatggctga

SEQ ID NO: 52610 - protein, 583 aa, Unknown
  Obtained from environmental sample
  misc_feature (1)..(583): Xaa is any amino acid
MIYRDQIFNISENDLRFTESELAQYFHSRNISIQPEDLREIMQDTGGWAFAINLIARSYQKAPGYTGYLQDAMKTNIFKLIEIEIWDEISERLQTFLVRLSLISHLSFDLIGLLAGGDENLIAEFEKQNAYIRRDSYVNAYLIHPLFLEFLCKKQELLSENQKQETYAIAADWCNKNSFRIDALSYYEKTGNYQSIVNLLFELPAQIPDAVARYAASIFDRAPPDNFDKVEFLAEKHLRTYMSRGLWQKSLELVKKYEAKFLARPENDIDGKRTLARLYVCWAYIRVFAGLTDDIYDFDTYMEKACKLISTSIDPGNLGPLCPGAWISYVGTSRKGALEEYIATLERSRVYISSSFIRGFMAGDAELARGELEFYRGETTAAASYVVLALKKARDNKQYVLIHRALYYAMRIAASQGNFALTEQMIKETKGQLNETEYFNRFLDYDISLSWYYCFLGLPEKAVDWVKEDFSPFSYPGFIENFGNQIKARYCFITKKFSPLLEYIDEMKTRESFLFERIELLAMEACVHYKMNNKXEACSAFFEAYQNALPNDILMXFIELGKDMRTLTASVLKESNCKYRKHG

SEQ ID NO: 52611 - DNA, 2205 bp, Unknown
  Obtained from environmental sample
  misc_feature (1)..(2205): n is a, c, g, or t
atgaatacatccggccgggcatttgaagggaagaaagtctttacatccacggtacaacgtaccactctttctttcgacgatggggtggtaatttatctggcggttcctatccctgaattccagggacatattctggttgtcaccattccgggcatgtatttcagcgaacgggtttccgattttgttatttggaaaacggggcatatttttattgatgattctgagggaacggtaattgccaatatccgcagtgaatgggtacaacagcgcgttaattttatccgtatgggcgaagccgacagccattacgcggaaatgggaaaggttataaaaaagggagtggaaggcggtacgggcattggccgtttttccgttgccggtattccccggatctgcgcgtacaggcccatcagcggatcggaagaaggctggcttctgggggtaatagcgccgcttccggaaagcccggtaagcggccttgacagggggcttcttttcgtcgggtttatcggttttctcctgagtgttttagcggcaattatcgcctcgtattttatcaaaaaaccttttgaaaaagtcgccgcgttaaaagaagaagcggaggcccatttaagatccaagtccgattttcttgccaacatgagccatgaaatcagaacaccgcttaacgtggtcatcagccttacggatttaatgctggaagacgatcatctggacaaacacactgcggaaaacctgacaaaggtaagcaacgcgggcagcacgcttttaagcattgtcaacgacattttggatttttccaaaattgaatcgggcaaactcactttatcgccggttgagtattatacatccagcctgctgaacgatattaatacccttgttatcacgcgcctcggggaaaagcccgtaacgttcggcctgaatatcaaggacgatgtgccgaacaaactccttggcgaagatctgcgggttaaacagatatttaccagcctgtggaccaacgcggtcaaatacacccacgaaggaaacattaatctcagcgtaagctgctcgcgcgagggcgactcggtgtggatgaatgtcgcgatcagtgacacgggcatgggcatacctaaagatgatattaaaaacctgttccttgattattaccaggtcgccgccaatgccaaccgcaacattgagggcaccgggttgggcctgtccattaccaaaagactggtagaaatgatggacgggcaaatcagcgtggaaagcgagcaaggcaggggatctacgttcagcttccgcataaagcagggctttgtcagagatatgacgctggggtctgacgtcttggaaaaaatccgtaccttctgttactcggacgacaaacgcattgtcggcagaaaactcgtaaggatgaatttaagatactccagggtgcttgtggtagacgatatgcagaccaatctggacgtagcgtcgggcatcctgcgcaaataccagatgcaggtcgattgcgtaacaagcggacaggaagcaatgaaaaagataagcaacggagacagggtttacaacgccgtattcatggatcacatgatgccgggaatggacggcatagaagcaacggaagcgatacgggctctggacacggaatatgccagggaaataccgattatcgcacttacggcaaacgctgtccagggaacgcgtgatatgtttcttgaccacggttttcaggcctttatatcaaaaccaatagatataatcgagtttgattcaattatcagaaaatgggtgcgaaacaaatcacatgaggctttggcccctcaaaatgaattatcctccaatgaaccgccgcctgatgccaaaggcaaaataatcattccgggagtagatacggaaaaggggctttccatttatgacggcgaccaggatgtttatacggagctcctgcgttcctatgttgccaatacccccgttgcccttgaaagaattagaactgtaacgggagaaaccctgcaggagtatacaatcaatgtacacgggatcaaaggcgcaagcgcaagcataggagctgaaacgataagagaggaagcctataatatggaaatgaaagccaaggccggcaatttgcaggaagtcctggccaataacgaaagatttataaagaatacagaaagtattatgaccaaaataagaacatggctggaaaagcaaaaatga

SEQ ID NO: 52612 - protein, 734 aa, Unknown
  Obtained from environmental sample
  DOMAIN (643)...(729): Hpt domain
  misc_feature (1)..(734): Xaa is any amino acid
MNTSGRAFEGKKVFTSTVQRTTLSFDDGVVIYLAVPIPEFQGHILVVTIPGMYFSERVSDFVIWKTGHIFIDDSEGTVIANIRSEWVQQRVNFIRMGEADSHYAEMGKVIKKGVEGGTGIGRFSVAGIPRICAYRPISGSEEGWLLGVIAPLPESPVSGLDRGLLFVGFIGFLLSVLAAIIASYFIKKPFEKVAALKEEAEAHLRSKSDFLANMSHEIRTPLNVVISLTDLMLEDDHLDKHTAENLTKVSNAGSTLLSIVNDILDFSKIESGKLTLSPVEYYTSSLLNDINTLVITRLGEKPVTFGLNIKDDVPNKLLGEDLRVKQIFTSLWTNAVKYTHEGNINLSVSCSREGDSVWMNVAISDTGMGIPKDDIKNLFLDYYQVAANANRNIEGTGLGLSITKRLVEMMDGQISVESEQGRGSTFSFRIKQGFVRDMTLGSDVLEKIRTFCYSDDKRIVGRKLVRMNLRYSRVLVVDDMQTNLDVASGILRKYQMQVDCVTSGQEAMKKISNGDRVYNAVFMDHMMPGMDGIEATEAIRALDTEYAREIPIIALTANAVQGTRDMFLDHGFQAFISKPIDIIEFDSIIRKWVRNKSHEALAPQNELSSNEPPPDAKGKIIIPGVDTEKGLSIYDGDQDVYTELLRSYVANTPVALERIRTVTGETLQEYTINVHGIKGASASIGAETIREEAYNMEMKAKAGNLQEVLANNERFIKNTESIMTKIRTWLEKQK

SEQ ID NO: 52613 - DNA, 327 bp, Unknown
  Obtained from environmental sample
  misc_feature (1)..(327): n is a, c, g, or t
atgggttccttccctcagtatgatcatcccaaaacattatcccgttacgcgcaaatcgcggacgcgctcaatctcggcggctcaagtgatgaggaaaaacttgaaaaactgatcgccgccgttgaaaaactgaaagaacagataggaatcaagaagactatcaaggattacggcattgatgaaaaagattttcttgcccgccttgacgacatgagcgaacaggcatttgacgatcaatgcaccggcgcgaatccccggtatcctttaatcgaggaaatcaaaaagatgtaccttaatgtttactatggaaagaaggagaaggtttaa

SEQ ID NO: 52614 - protein, 108 aa, Unknown
  Obtained from environmental sample
  misc_feature (1)..(108): Xaa is any amino acid
MGSFPQYDHPKTLSRYAQIADALNLGGSSDEEKLEKLIAAVEKLKEQIGIKKTIKDYGIDEKDFLARLDDMSEQAFDDQCTGANPRYPLIEEIKKMYLNVYYGKKEKV

SEQ ID NO: 52615 - DNA, 963 bp, Unknown
  Obtained from environmental sample
  misc_feature (1)..(963): n is a, c, g, or t
ttggggcggcaattcagtttcggagaacgtcggcgtcaacatctgttaaatatcaaaacactggcggcaaggagggaaaatatgctgtggttccgcgctcccgaaaaggtatatatcaaacggggctgcctccccgtggctctggatgagcttaaaaacgttatgggaaaaaagcgggcgttcatcgttaccgataccttcctctaccaaaacggctacaccaagtgcatcaccgacaaactggacagcatgggcattgtccatgaaaccttctttgatgtcgctcccgacccgaccctgggctgcgccaaaagaggcgcggctctggttaccgctttcaagcccgatgttatcatcgcgattggcggcggttcggctatggacgcgggaaaaatcatgtgggtgctctacgaacacccggaggcggattttgaggatatggccatgcgctttgccgacatccgcaagcgggtctacaccttccccaaaatgggagagaaggcctactttatcgcgataccgacctccgccggaacaggcagcgaggtaacgccgtttgccgtgattaccgacgaaaccaagggcatgaagtacccgctggcggattaccaactgatgcccaatatggcgattgttgacgcggacgtgcagatgaacgcgcccaagggacttacaagcgcctcaggcattgacgcgctgacccatgcccttgaagcctacgcttcgatcatggccaccgacttcaccgacggccttgcgatacaggccatcaagatggtttttgaatggctgcccaaagcttacaacgaangcgcggcgaatcctgttgcgcgggaaaagatggccaacgccgccaccattgcgggcatggctttcgcccacgcctttctgggcgtctgccactcaatggcgcacaaactcggcggttccaccacctgccccacggtgtcgccaacgcgctga

SEQ ID NO: 52616 - protein, 320 aa, Unknown
  Obtained from environmental sample
  DOMAIN (34)...(319): Iron-containing alcohol dehydrogenase
  misc_feature (1)..(320): Xaa is any amino acid
MGRQFSFGERRRQHLLNIKTLAARRENMLWFRAPEKVYIKRGCLPVALDELKNVMGKKRAFIVTDTFLYQNGYTKCITDKLDSMGIVHETFFDVAPDPTLGCAKRGAALVTAFKPDVIIAIGGGSAMDAGKIMWVLYEHPEADFEDMAMRFADIRKRVYTFPKMGEKAYFIAIPTSAGTGSEVTPFAVITDETKGMKYPLADYQLMPNMAIVDADVQMNAPKGLTSASGIDALTHALEAYASIMATDFTDGLAIQAIKMVFEWLPKAYNEXAANPVAREKMANAATIAGMAFAHAFLGVCHSMAHKLGGSTTCPTVSPTR

SEQ ID NO: 52617 - DNA, 855 bp, Unknown
  Obtained from environmental sample
  misc_feature (1)..(855): n is a, c, g, or t
gtgctggacgcggcggttgccgccggtgcgcctgaagggatcatcggctggatagacgaaccgagccttgaaatgaccaacacggtaatgaaagaagcggacaccatccttgccacaggcgggccggccatggtcaagtcggcctattcctccggcaagcctgccctcggcgttggatccggcaatacgcctgccatcatcgacgacagcgcggacatactcctcgccgtcaactcaataattcactcaaaaacgtttgacaacggcatgatttgcgcctcggagcagtcggtaatcgccctgcaaggcgtctacaaacaggtaaaagccgaatttatcagccgtggctgttacttccttaaccccgaagaaaccgaaaaggtacgcaaaacgatcatcgtccgaggggcgctgaacgcgaaaatcgtcgggcaaaaggccgcgacaatcgcggagcttgctggcgttaaggttcccgcagaaacaaagatcctcatcggcgaggttgagagcgttgagctttcggaagaattcgcccacgaaaaactttccccggtgcttggcatgtacaaggctaaggatttcgacgatgcaatggacaaggccgaccatttggtaaaagacggcggctacggccacacagccagcgtataccttgaccctcaaaagtgcgcggacaaactggcagcctttagcgcccgtatgaagacctgccgtattgtgctgaacacgccatcggcacacggaggcatcggcgacctgtacaatttccgcctgaagccctcgctcaccctgggctgcggcagttggggcggcaattcagtttcggagaacgtcggcgtcaacatctgttaa

SEQ ID NO: 52618 - protein, 284 aa, Unknown
  Obtained from environmental sample
  misc_feature (1)..(284): Xaa is any amino acid
MLDAAVAAGAPEGIIGWIDEPSLEMTNTVMKEADTILATGGPAMVKSAYSSGKPALGVGSGNTPAIIDDSADILLAVNSIIHSKTFDNGMICASEQSVIALQGVYKQVKAEFISRGCYFLNPEETEKVRKTIIVRGALNAKIVGQKAATIAELAGVKVPAETKILIGEVESVELSEEFAHEKLSPVLGMYKAKDFDDAMDKADHLVKDGGYGHTASVYLDPQKCADKLAAFSARMKTCRIVLNTPSAHGGIGDLYNFRLKPSLTLGCGSWGGNSVSENVGVNIC

SEQ ID NO: 52619 - DNA, 711 bp, Unknown
  Obtained from environmental sample
  misc_feature (1)..(711): n is a, c, g, or t
atgattggcgttatcgcggcgatggaaaaagaattaagcattttatgcgacgcaatgggaaaattcgaaactacaaaaataggggtctttgaattttttacgggaaaaatcgaaaataaagatgttacgcttttatgctgcgggatcggcaaggtaaacgccgccgttggctgcgccatgcttattcagcggtttaagccctcctgcgttataaatacaggttccgccggcggcatagatccgtctctgaaagtgggagacgcggttatttccaccggccttatctatcacgatgttgatgttacggcgtttaactatctccccggccagcttccccgccagccgcaaatttttcctgtggacgaaaaattaataaaactagcggaaaaatccgtagatgaattaaagaaagaaaaagcgcttcccgaaacttttaattattgcggaggcataataggatcgggtgacgcttttatgcacaagcctgaacacatagcggaagtacgccgtgtttttccgaatatcgccgcggttgaaatggaaggcgccgctatcgctcacagctgccatttgttttccgttcccgttcttgttatccgcgcgctttcagatgtcgcgggtacggaatcgcccgtaactcatgacgaattcctgcctatagcgtccaaacattccgccgatatagttataaggatagtccgcgggctgtaa

SEQ ID NO: 52620 - protein, 236 aa, Unknown
  Obtained from environmental sample
  DOMAIN (1)...(233): Phosphorylase family
  misc_feature (1)..(236): Xaa is any amino acid
MIGVIAAMEKELSILCDAMGKFETTKIGVFEFFTGKIENKDVTLLCCGIGKVNAAVGCAMLIQRFKPSCVINTGSAGGIDPSLKVGDAVISTGLIYHDVDVTAFNYLPGQLPRQPQIFPVDEKLIKLAEKSVDELKKEKALPETFNYCGGIIGSGDAFMHKPEHIAEVRRVFPNIAAVEMEGAAIAHSCHLFSVPVLVIRALSDVAGTESPVTHDEFLPIASKHSADIVIRIVRGL

SEQ ID NO: 52621 - DNA, 882 bp, Unknown
  Obtained from environmental sample
  misc_feature (1)..(882): n is a, c, g, or t
atgtacgatattgaagatattttagaagctgaaagtccctctcacgcggttgagttgctgcaacaacatcctgacgcgaaaattatcgcggggggtagcgatgtgttaattgaaatccgcgaaggtcggcttgcggggcgtaccttgatgagtattcagaaacttgactgtttacggggagtaaagattgatccggacggcgctatccgtgttggcgcgctgacgagtttttcccatgtcgcgcaagacccggtcatacagaaaaacatccccgtgcttgcggaagcggtgctgagcatcggcgggccgcagttgcgcaacatcggcactataggcggtaatgtctgtaacggggttacgtccgcggacagcgcctcgaccctactggcctatgacgtggtgatggaatacctcggccccaacggcctgcggctggttcccatttccgaacattataagggcgccggcaaaaccgcccttgcccatgaagagattttgcaggcaattcttgttccaaaggaaagttatgaaaattgttttggcaattatataaaatacgccatgagggaagctctggatatcgcgaccctgggatgttcggcaaatgttcggctttcaaaagatcgcanaaatattgacaggcttcgtttggcttatggcgtcgccgggcccgtccccatgcgcgttcccacagcggaacagaccgcagccggaagaccggcaaacgcggaaactgccgccgcaatcgccaagctggtattaaacgacattaacccccgctcaagctggcgggccagcaaggaattcagattgcatttggcggaagagcttgcgaaacgggcgattgccgaatcgcttaaacgcgcgggggtatcgttatga

SEQ ID NO: 52622 - protein, 293 aa, Unknown
  Obtained from environmental sample
  DOMAIN (182)...(290): CO dehydrogenase flavoprotein C-terminal domain
  misc_feature (1)..(293): Xaa is any amino acid
MYDIEDILEAESPSHAVELLQQHPDAKIIAGGSDVLIEIREGRLAGRTLMSIQKLDCLRGVKIDPDGAIRVGALTSFSHVAQDPVIQKNIPVLAEAVLSIGGPQLRNIGTIGGNVCNGVTSADSASTLLAYDVVMEYLGPNGLRLVPISEHYKGAGKTALAHEEILQAILVPKESYENCFGNYIKYAMREALDIATLGCSANVRLSKDRXNIDRLRLAYGVAGPVPMRVPTAEQTAAGRPANAETAAAIAKLVLNDINPRSSWRASKEFRLHLAEELAKRAIAESLKRAGVSL

SEQ ID NO: 52623 - DNA, 483 bp, Unknown
  Obtained from environmental sample
  misc_feature (1)..(483): n is a, c, g, or t
atgagaaaacagcttgtgcgttgtaccattaacggcaaggccgtggaaaccgtagtcgacatacgcgcgtcgctgactgacatgctgcgcaatgaatatcgcctgaccagcgtaaaaaaaggctgcgaggtgggcgaatgcggggcatgcaatgtgatcatcaacggggaatgttttaattcctgcatttacctgtctatttgggcggacggcaaggagattaccaccaccgaagggcttttaagcgcggacggggaactctccgcagtacaacaggcgttcattgacgaaggcgcggtgcagtgcggtttttgcacgccgggctttctgatgagcgccacggaaatcatacgctcggggaaaacctacagcgacgcggaactgaggaagctgctgtccgggcatctttgtcgctgtactggctatgagaatatattccgcgcagttagaaaacttgccgcgctgtcgctcctagaggggtaa

SEQ ID NO: 52624 - protein, 160 aa, Unknown
  Obtained from environmental sample
  DOMAIN (76)...(151): [2Fe-2S] binding domain
  misc_feature (1)..(160): Xaa is any amino acid
MRKQLVRCTINGKAVETVVDIRASLTDMLRNEYRLTSVKKGCEVGECGACNVIINGECFNSCIYLSIWADGKEITTTEGLLSADGELSAVQQAFIDEGAVQCGFCTPGFLMSATEIIRSGKTYSDAELRKLLSGHLCRCTGYENIFRAVRKLAALSLLEG

SEQ ID NO: 52625 - DNA, 903 bp, Unknown
  Obtained from environmental sample
  misc_feature (1)..(903): n is a, c, g, or t
gtgacagtcaccatgttttcatcacttcatacacataccattttttgcgatggcaaagccgacgtagaaacaatgtgccgcgcggcttatgaaaaaggactcgagtccatcgggttcagctctcatgcccctgtcgggaaaacgcggttaaaaacacactggcacatgaaagacgagaagctgggggaatatattaacgaggttaaagccgcacggcttcgctgggaaggaaagctctctgtctatctggggcttgaagtagattacatcaaagggctgcgctcccctattgacggggacattaaggaattaaatcttgattacactataggcgctgtacattacctgacgccgccccatggagagccgttcacaattgacggtcatcttgaggaattggagaatggcatattgaacggcttcggcggcgacggtgaatctatgttaagtgcctacttaaacaatgttatggaaatggtcactctgggcggatttgacattgtagctcatcttgatctggtaagaaaaaaccaccaatttgaaagaagtcccgcttttcaggaaaagcagggccgctggtttgaagtggagaacgcggattatttgcagaaggttgaagaaattgcccgcgccatttcttctgcggatcttgtgattgaagcaaataccggcgggattaatagaggctacataaaagacacctacccctcgcttgcggttttacgcctgatgcacagatacaagattccgattatgatcagcgccgatgcccacaatgccaatgacatcgacggtcattaccgggaagcccggcaaattttactcgatgcgggctataccagccatgtcctttttgaaggcaggaaaaacgggaagccaatctggaccgaatggccgctttaa

SEQ ID NO: 52626 - protein, 300 aa, Unknown
  Obtained from environmental sample
  DOMAIN (7)...(261): PHP domain
  misc_feature (1)..(300): Xaa is any amino acid
MTVTMFSSLHTHTIFCDGKADVETMCRAAYEKGLESIGFSSHAPVGKTRLKTHWHMKDEKLGEYINEVKAARLRWEGKLSVYLGLEVDYIKGLRSPIDGDIKELNLDYTIGAVHYLTPPHGEPFTIDGHLEELENGILNGFGGDGESMLSAYLNNVMEMVTLGGFDIVAHLDLVRKNHQFERSPAFQEKQGRWFEVENADYLQKVEEIARAISSADLVIEANTGGINRGYIKDTYPSLAVLRLMHRYKIPIMISADAHNANDIDGHYREARQILLDAGYTSHVLFEGRKNGKPIWTEWPL

SEQ ID NO: 52627 - DNA, 735 bp, Unknown
  Obtained from environmental sample
  misc_feature (1)..(735): n is a, c, g, or t
atgagccaccgcgacgtcgcggcgcgcctgcccggcggcttccgcaaaacggcctcgacggcggcctgcgtcgcggcctgcgaaaacgccgagaagaaactttacgccgtgcagttccaccccgagacaaaacataccgacggcgggcgcgagatttttcagcgcttcctattcgacgtctgcggcgccgccggcgattacaagttagacgattatatcgatacgcaggtacgcctaatccgccaaaaggtcggcgacaacaacgtgctgctggcgttgtccggcggcgtcgactcctccgtgtgcgccagcctgctgagccgcgccgtgccgaaccgactcgtctgcctattcgtcgaccacggctttatgcggcttaacgagggcgacgaaatcgagcgtgtcttctcaaagcgcaaactgcgcttcatccgcgtcaacgcgcaagggcgctttctcaacaagctgcgcggcgtggccgaccccgagacgaagcggaagcttatcggcgaggaattcgtccgcgtcttcgaggaggaatccgccaaaatcggcgacatcccgttcttggcgcaggggacaatctacccggacatcgtagagtccggcggaagttacggggcgacgataaaaagccaccacaacgtaggcggcctccccaaaaacctgaaatttaccggcgtggtggaaccgctcagcgggctatcaaagacgaagtccgctcggccgatctga

SEQ ID NO: 52628 - protein, 244 aa, Unknown
  Obtained from environmental sample
  misc_feature (1)..(244): Xaa is any amino acid
MSHRDVAARLPGGFRKTASTAACVAACENAEKKLYAVQFHPETKHTDGGREIFQRFLFDVCGAAGDYKLDDYIDTQVRLIRQKVGDNNVLLALSGGVDSSVCASLLSRAVPNRLVCLFVDHGFMRLNEGDEIERVFSKRKLRFIRVNAQGRFLNKLRGVADPETKRKLIGEEFVRVFEEESAKIGDIPFLAQGTIYPDIVESGGSYGATIKSHHNVGGLPKNLKFTGVVEPLSGLSKTKSARPI

SEQ ID NO: 52629 - DNA, 804 bp, Unknown
  Obtained from environmental sample
  misc_feature (1)..(804): n is a, c, g, or t
atgttttggcgaggcttcaaaatgtccgatagccgcaaacccgaattggcgctggtgcttgatttcggcggacagtacaaggagcttatagctcgggcggtgaggagcctctccgtgtactcggagatccgccccggcaacatgccggtcgacgagatcaagcggctctcgcccatcggcataatcctgaccggcggaccgagcagcgtgtaccagcccggctcgccgatgtgcgaccccgcgatcttcggcttgggcatcccgatcctaggcatctgctacggtatgcacctcatgtgccatacgctaggcggcgaggtcacggcgggcggcgcaggcgagtacgggcgcgtcacggtaacgccggaaagcccggccctcaacgctatttcacgaaacgcaaggcaaacctttcgccgcgctgatgagccaccgcgacgtcgcggcgcgcctgcccggcggcttccgcaaaacggcctcgacggcggcctgcgtcgcggcctgcgaaaacgccgagaagaaactttacgccgtgcagttccaccccgagacaaaacataccgacggcgggcgcgagatttttcagcgcttcctattcgacgtctgcggcgccgccggcgattacaagttagacgattatatcgatacgcaggtacgcctaatccgccaaaaggtcggcgacaacaacgtgctgctggcgttgtccggcggcgtcgactcctccgtgtgcgccagcctgctgagccgcgccgtgccgaaccgactcgtctgcctattcgtcgaccacggctttatgcggcttaa

SEQ ID NO: 52630 - protein, 267 aa, Unknown
  Obtained from environmental sample
  DOMAIN (18)...(189): Glutamine amidotransferase class-I
  misc_feature (1)..(267): Xaa is any amino acid
MFWRGFKMSDSRKPELALVLDFGGQYKELIARAVRSLSVYSEIRPGNMPVDEIKRLSPIGIILTGGPSSVYQPGSPMCDPAIFGLGIPILGICYGMHLMCHTLGGEVTAGGAGEYGRVTVTPESPALNAISRNARQTFRRADEPPRRRGAPARRLPQNGLDGGLRRGLRKRREETLRRAVPPRDKTYRRRARDFSALPIRRLRRRRRLQVRRLYRYAGTPNPPKGRRQQRAAGVVRRRRLLRVRQPAEPRRAEPTRLPIRRPRLYAA

SEQ ID NO: 52631 - DNA, 714 bp, Unknown
  Obtained from environmental sample
  misc_feature (1)..(714): n is a, c, g, or t
atgggcgacgcaacagacgtactctatgaaggaaaatcgaaactcgtatgcaaaggccgcgacgagtccaccctcctcatcaagtacaaagataccgccacggcgttcaacggcgagaagaaagcagagctttcgggcaaaggcatgctaaacgcggcgatttctaacctaatctacgggtaccttgaaaaaaacggcgtgaaaacgcacctggtcgaggtcgtcgacgacacctccgccatagtcagaaaagccgaaatcatcatggtcgaggtcatagtaagaaacgtcgccgccggcggtttttctaaaaaatacggcgtccccgaaggcgcggaattgaaaaatatcgtgctggagttttgcctgaagagcgacgatctcggcgaccctatgataaacgagtgccagatcaccgccatagggctcgccacaaacgaagaacttggctgcatggccaaacaggcccttaagatcaacgagctgctgcgcgccctctttgaaaaggccggcatcaggcttatagacttcaagctggaattcggcagaagcggcggcgagatcatcctctgcgacgaaatctcgccggactcctgccggctgtgggacgcggagacgaacaaaaaattggacaaagaccgattccgccgcgacttgggcgacgtgctaggcggctacagggatgttttggcgaggcttcaaaatgtccgatag

SEQ ID NO: 52632 - protein, 237 aa, Unknown
  Obtained from environmental sample
  DOMAIN (4)...(237): SAICAR synthetase
  misc_feature (1)..(237): Xaa is any amino acid
MGDATDVLYEGKSKLVCKGRDESTLLIKYKDTATAFNGEKKAELSGKGMLNAAISNLIYGYLEKNGVKTHLVEVVDDTSAIVRKAEIIMVEVIVRNVAAGGFSKKYGVPEGAELKNIVLEFCLKSDDLGDPMINECQITAIGLATNEELGCMAKQALKINELLRALFEKAGIRLIDFKLEFGRSGGEIILCDEISPDSCRLWDAETNKKLDKDRFRRDLGDVLGGYRDVLARLQNVR

SEQ ID NO: 52633 - DNA, 312 bp, Unknown
  Obtained from environmental sample
  misc_feature (1)..(312): n is a, c, g, or t
gtggcagaagaaggatcatattttgacggcggcgtgctggggttccttgggtggagcatgttatgcgggctcattacggtttgcactttggggataggattgccgtgggcggtgtgtttgttcaacacgtgggaggccagccataccgtgatcggcggccggcgtctgagattcagcggttcgggcgccagtctgttcgggcattggatattgtggtggttcttgtcactgataactttcggaatctactctttttgggtatatgtaaacatgaagaagtggaaggtgaaacacatgtcgttcgccaattaa

SEQ ID NO: 52634 - protein, 103 aa, Unknown
  Obtained from environmental sample
  misc_feature (1)..(103): Xaa is any amino acid
MAEEGSYFDGGVLGFLGWSMLCGLITVCTLGIGLPWAVCLFNTWEASHTVIGGRRLRFSGSGASLFGHWILWWFLSLITFGIYSFWVYVNMKKWKVKHMSFAN

SEQ ID NO: 52635 - DNA, 363 bp, Unknown
  Obtained from environmental sample
  misc_feature (1)..(363): n is a, c, g, or t
ttgtgggtatgggagtactctccatacctcgcgtacatcattacagagaccatcgcggcccctgccctcgccaagttagggattcagcaggcggcggcgcacatgttctggttttatttcgccatgttcgcgaactttacgccccctgtaggtattgcagctttcgccgcagccggcttatcaggcggtgatccgatgaagacaggcttccagtcggtcaaactgtcaatagcagggctttatcgttccatatatgtttgtgtacgctcccgcgttaatgcttatcaacactactttctggggcggcctgcaggtaaccgcgaccgcttgcgtaggcgttgccctgattggcgtggccgttga

SEQ ID NO: 52636 - protein, 120 aa, Unknown
  Obtained from environmental sample
  misc_feature (1)..(120): Xaa is any amino acid
MWVWEYSPYLAYIITETIAAPALAKLGIQQAAAHMFWFYFAMFANFTPPVGIAAFAAAGLSGGDPMKTGFQSVKLSIAGLYRSIYVCVRSRVNAYQHYFLGRPAGNRDRLRRRCPDWRGR

SEQ ID NO: 52637 - DNA, 423 bp, Unknown
  Obtained from environmental sample
  misc_feature (1)..(423): n is a, c, g, or t
ttgtatcatgactgcggcggtgttaaaagcatgggtcccacagatattcttgacgcgtgggctgacggcgtcaagcagacagtagcggttgcagtggcttgtgcctgtgtcggcattattgtaggtgtgttcgcaaagaccgagttcggccttaacatgagcaacgtcatcattacactcggcaacaggagccttatattaacgatgatgtttgccatgataacctgcatgattgtgggtatgggagtactctccatacctcgcgtacatcattacagagaccatcgcggcccctgccctcgccaagttagggattcagcaggcggcggcgcacatgttctggttttatttcgccatgttcgcgaactttacgccccctgtaggtattgcagctttcgccgcagccggcttatcaggcggtga

SEQ ID NO: 52638 - protein, 140 aa, Unknown
  Obtained from environmental sample
  misc_feature (1)..(140): Xaa is any amino acid
MYHDCGGVKSMGPTDILDAWADGVKQTVAVAVACACVGIIVGVFAKTEFGLNMSNVIITLGNRSLILTMMFAMITCMIVGMGVLSIPRVHHYRDHRGPCPRQVRDSAGGGAHVLVLFRHVRELYAPCRYCSFRRSRLIRR

SEQ ID NO: 52639 - DNA, 420 bp, Unknown
  Obtained from environmental sample
  misc_feature (1)..(420): n is a, c, g, or t
atgaacgaacgaatccatcccctgacgccgcctgtcagccgaggcgcggaattatgcaaatttttggcgatattgacgctgccgtttatcgccgcgctgtttttaaggctggcccccgattgggcggcgcgcttttaccctaggtgctttttcaacgcggcgacaggcctatattgccccggctgcggaacgcttcgggcgcttacggcgctgggggagctggattttcgggcggcctttacgtacaacccgttcctattcctgatggcggccccgctggccgtttacttatgcgtaatctttttattgagggcggcgacaggcaggcggatcccgtcgatcctgtcgtccaaagccgccctgccgacggcggcggtcgttatcgccgtttttgcggtaaggaacatttttggtatataa

SEQ ID NO: 52640 - protein, 139 aa, Unknown
  Obtained from environmental sample
  misc_feature (1)..(139): Xaa is any amino acid
MNERIHPLTPPVSRGAELCKFLAILTLPFIAALFLRLAPDWAARFYPRCFFNAATGLYCPGCGTLRALTALGELDFRAAFTYNPFLFLMAAPLAVYLCVIFLLRAATGRRIPSILSSKAALPTAAVVIAVFAVRNIFGI

SEQ ID NO: 52641 - DNA, 648 bp, Unknown
  Obtained from environmental sample
  misc_feature (1)..(648): n is a, c, g, or t
ttggtaatcctgaacatcttgaaaaaatcttggttcaaacattttttaaggatcaacataatggcattcgtaaacacactgtacaacacaaattttttagaatacgcctcctacgtcataaaagaccgcgcgatcccgcacgtcaacgacggtctcaagcccgtgcagcgccgtatcctgcacacgctctacgaggtggacgacggcaagttccacaaggtggccaatatcgtaggtcagtgcatgaagtaccatccgcacggcgacgcctccatcggcgacgctcttgtcgctatagccaacaagaatttgttcattgacaaacagggaaatttcggcaacatctttaccggcgacccggcctccgccgtccgctacatagagtgccgcctatcgccgcttgccgtcgagtcgctcttcaatccggagatcaccgaatacgtggactcctacgacgggcgcaaccgcgaaccggtcacgctgcccgctaagctgcccgtcctcctggcgctcggcgcggaggggatagccgtggggatgtccaccaaaattctcccgcacaaccttatagagcttctcgaagcgcaaatcgcctaccttgcggcgaccagcagttggtcttcccggatttccctaccggcggattag

SEQ ID NO: 52642 - protein, 215 aa, Unknown
  Obtained from environmental sample
  DOMAIN (43)...(215): DNA gyrase/topoisomerase IV, subunit A
  misc_feature (1)..(215): Xaa is any amino acid
MVILNILKKSWFKHFLRINIMAFVNTLYNTNFLEYASYVIKDRAIPHVNDGLKPVQRRILHTLYEVDDGKFHKVANIVGQCMKYHPHGDASIGDALVAIANKNLFIDKQGNFGNIFTGDPASAVRYIECRLSPLAVESLFNPEITEYVDSYDGRNREPVTLPAKLPVLLALGAEGIAVGMSTKILPHNLIELLEAQIAYLAATSSWSSRISLPAD

SEQ ID NO: 52643 - DNA, 963 bp, Unknown
  Obtained from environmental sample
  misc_feature (1)..(963): n is a, c, g, or t
atggcgcatcctgacgcgccggtgggcaaggaagacaaggataacctggaagtgaagagggtaggggagcccgccgagttcaattttgaagctgccgaccacgtaaagctggggcaggaactggatattatcgactttgattcaggcaccaaggtgtcaggcaccaaattttactacctgaaaaacgaaggggtatttctggaactcggccttgtgcgttatgcgctggatattcttcaaagaaaaggttttgccccctttattacgccggatgtggcacgtacggaaatcctggagggcataggttttaacccccggggcgaagaatccaacgtatatgcgctggaaggcgaggacgcctgcctggtggggactgccgaaatcacccttgggggctattattcaaacacgattatcgcgaaagacaaactgccaatccgcatggcgggcctttcccactgtttccgccgcgaggcgggagcggccgggcaattctcaaagggtctgtaccgtgtgcaccagtttaccaagctggaaatgtttgtgtactgcctgcccgaagaatccgaaaaattccatgccgaattacgcgccatagaagaggagatctttgcgggtcttaatataccgttccgggtagtggacacctgcaccggcgacctcggcgcgccggcctaccgcaaatgggaccttgaggcgtggatgccgggccgcaacaacggcgaatggggcgaagtaccctctacctcaaactgcactgattatcaggcgcgccgtcttaacattcgttttaaagacgacgacggtaagaataaatatgtccatatgttaaacggaaccgcaatcgctatttcccgcgcaattatcgctgtcttggaaaatttccagcaggcggacggtactgtgcgtattccgaaggcgttggttccttattgcgggtttgatgttataaagaagaaataa

SEQ ID NO: 52644 - protein, 320 aa, Unknown
  Obtained from environmental sample
  DOMAIN (67)...(238): tRNA synthetase class II core domain (G, H, P, S and T)
  misc_feature (1)..(320): Xaa is any amino acid
MAHPDAPVGKEDKDNLEVKRVGEPAEFNFEAADHVKLGQELDIIDFDSGTKVSGTKFYYLKNEGVFLELGLVRYALDILQRKGFAPFITPDVARTEILEGIGFNPRGEESNVYALEGEDACLVGTAEITLGGYYSNTIIAKDKLPIRMAGLSHCFRREAGAAGQFSKGLYRVHQFTKLEMFVYCLPEESEKFHAELRAIEEEIFAGLNIPFRVVDTCTGDLGAPAYRKWDLEAWMPGRNNGEWGEVPSTSNCTDYQARRLNIRFKDDDGKNKYVHMLNGTAIAISRAIIAVLENFQQADGTVRIPKALVPYCGFDVIKKK

SEQ ID NO: 52645 - DNA, 507 bp, Unknown
  Obtained from environmental sample
  misc_feature (1)..(507): n is a, c, g, or t
atgacagaaaaactgacattaggcggcggcgatatttacgaaggcgaggtaaaagacggcaagccgcacggcaaagggaaaataataaagaatcccggcaagacaaacgaaacaacttatgaaggcgattttgttgacggacatttccacggaaagggaaaattgaaattttcgaatggagagatatacgaaggcgattttgtcaacggcagcgctcacggaaaagggaaactgacaagcagttacggctccgtctacgaaggcgattttgttgacggcaaacaaaccggcaaaggcacatacacaagcgatgaccttacctttgaaggcgagtttgtcaacggaatgcaatctaaagggaaatgcacctacaaggacggcactgtaaaagaaggtaactggaaaggctttactttttacgggaaaaagaaaccgcctaaagacaaaccgtacaaactcacgcccgaagaagaagagatgagattacgctacgaaatttgcccgtaa

SEQ ID NO: 52646 - protein, 168 aa, Unknown
  Obtained from environmental sample
  DOMAIN (86)...(107): MORN repeat
  misc_feature (1)..(168): Xaa is any amino acid
MTEKLTLGGGDIYEGEVKDGKPHGKGKIIKNPGKTNETTYEGDFVDGHFHGKGKLKFSNGEIYEGDFVNGSAHGKGKLTSSYGSVYEGDFVDGKQTGKGTYTSDDLTFEGEFVNGMQSKGKCTYKDGTVKEGNWKGFTFYGKKKPPKDKPYKLTPEEEEMRLRYEICP

SEQ ID NO: 52647 - DNA, 1035 bp, Unknown
  Obtained from environmental sample
  misc_feature (1)..(1035): n is a, c, g, or t
gtgctgggaagcgcggacttgacaatgctggaattggcttccctctactgcgcccttgccaacggcggggtaaaaaaagacatccgtttcttttcaaacggcgcagacgggaattcggcggacgggaaaaaaattttaagccccaccgcggcggcaattaccgttagaatgctggaaagaaatccagcccccgacgatttcagcgcgaaagccggacgttcggcgccaatagcttacaagacgggcacttcaatcggttttaaggacgcgtggtctgtcgcgatctttgaccgttatgtgctatgcgtatggcttgggaatttctccggcgagggaaacagcgcgttcatcggcaggcttagcgccgctcctttgtgtttcagcataatagacgcgatactcgcggagattcctcatgaaaatctttacgcgcgccgccccctgccgcctgaagttaaaacggtgcaagtgtgcgccatatccggcgacattccctgtgacgactgcccccggcttattgaaacgctttttatccccggcgtttccccgattaaccgctgcaagattcaccgcaaagtctatattgacacgcgcaccggataccggacaaacgaaaccgaaggcccctatatccgcggcgaagtccgcgagttctggccctcggatatactggaaatttttgaggccgcgggccttccgcgtttttcgccgccgccctacccgcctgatgatcccgcaaacggcgctctctcaagaggctttccgccttcgataatttcgccccttgccaacaccgattacattatccgccctcatcaggcggacagtcatcataaccagatggtgcttctcgcaagcgcggatcaggacgcgggcgaacttttttggtttgccgatgccagtttcctgggaagagcaaaacccagagagcgctttgtctggtctcccgagccgggcatatgggatatttcagtggtagacaatcttggccgctcttccgggatccgcgtacgcgtggaggcttcgggggagtga

SEQ ID NO: 52648 - protein, 344 aa, Unknown
  Obtained from environmental sample
  DOMAIN (245)...(337): Penicillin-Binding Protein C-terminus Family
  misc_feature (1)..(344): Xaa is any amino acid
MLGSADLTMLELASLYCALANGGVKKDIRFFSNGADGNSADGKKILSPTAAAITVRMLERNPAPDDFSAKAGRSAPIAYKTGTSIGFKDAWSVAIFDRYVLCVWLGNFSGEGNSAFIGRLSAAPLCFSIIDAILAEIPHENLYARRPLPPEVKTVQVCAISGDIPCDDCPRLIETLFIPGVSPINRCKIHRKVYIDTRTGYRTNETEGPYIRGEVREFWPSDILEIFEAAGLPRFSPPPYPPDDPANGALSRGFPPSIISPLANTDYIIRPHQADSHHNQMVLLASADQDAGELFWFADASFLGRAKPRERFVWSPEPGIWDISVVDNLGRSSGIRVRVEASGE

SEQ ID NO: 52649 - DNA, 525 bp, Unknown
  Obtained from environmental sample
  misc_feature (1)..(525): n is a, c, g, or t
ttgtttccacatttcatcagaccaaagggcagggaatttgacaatgtctttctagcgcttagccgttattttgaattggatgacgcaagaaaaagagagatttatgtcgctataacgagggcgaaacagaatttgcacattttatataatggaagttattttgataaaattaatattgaaaatattgaaagaacatcagataacaacagttaccctgtacctgaggaaataactttacaactttcacataaagatgttgcattaggttattttgcttcgagaaaaagagaaatagattctcttgtgagtggaagagaaatgtcaatttgtgaaacgggttgttctgtaggaaatacacaagtattgaaattctcatccaaattttgtgaccagttaaatgatttaaaagaaaaaggtttttctccggtaaaagcaatcgtcaggcacattgttttttggcagaacaaagacaaggaagaagaaataaaaattattttgcctgatgtggagttttcaagaaaataa

SEQ ID NO: 52650 - protein, 174 aa, Unknown
  Obtained from environmental sample
  misc_feature (1)..(174): Xaa is any amino acid
MFPHFIRPKGREFDNVFLALSRYFELDDARKREIYVAITRAKQNLHILYNGSYFDKINIENIERTSDNNSYPVPEEITLQLSHKDVALGYFASRKREIDSLVSGREMSICETGCSVGNTQVLKFSSKFCDQLNDLKEKGFSPVKAIVRHIVFWQNKDKEEEIKIILPDVEFSRK

SEQ ID NO: 52651 - DNA, 642 bp, Unknown
  Obtained from environmental sample
  misc_feature (1)..(642): n is a, c, g, or t
atgataaaacttgccgcctttctgggtaatcccggaaaggaacacgcgcttaacagacacaacgcggggtggatgcttgcggagtctctgcccttctacccttctctctcttggcaaaaaaaatttaaggggctttactcatcgcgggaaaattttcattatttaatgcctgaaacatacatgaacctgtcgggcgaatcggtttttgccgccgcctcattttataaaataaagatagaagaaattatcgtagtccacgatgaattggaacttccccttgggacaatatcgttaaaattttcaggcggtctcggagggcacaacgggcttcgctccatgaaaaaagttttcgggagcgcggatttttggcggcttcgtatcggcatcggccgccccgactcgcgcttgcccggagagggcgggcatgcgggtagcggcgagggggtatatgactgggttctgtccgatttttccggcgcggaacgggaaacgcttaaccccgcgcttgacgccggagcggggcttttacagcagttgagcgcaaacgagcctgaacctttattgaatgaatggaagaaaaaaaacatatcgggggcttcgccgaaacgaaaaagcgaagagccttcggcggaggcggtatga

SEQ ID NO: 52652 - protein, 213 aa, Unknown
  Obtained from environmental sample
  DOMAIN (4)...(192): Peptidyl-tRNA hydrolase
  misc_feature (1)..(213): Xaa is any amino acid
MIKLAAFLGNPGKEHALNRHNAGWMLAESLPFYPSLSWQKKFKGLYSSRENFHYLMPETYMNLSGESVFAAASFYKIKIEEIIVVHDELELPLGTISLKFSGGLGGHNGLRSMKKVFGSADFWRLRIGIGRPDSRLPGEGGHAGSGEGVYDWVLSDFSGAERETLNPALDAGAGLLQQLSANEPEPLLNEWKKKNISGASPKRKSEEPSAEAV

SEQ ID NO: 52653 - DNA, 879 bp, Unknown
  Obtained from environmental sample
  misc_feature (1)..(879): n is a, c, g, or t
atggaagaaaaaaaacatatcgggggcttcgccgaaacgaaaaagcgaagagccttcggcggaggcggtatgaacgtaagcgaagcattcaaggcgttatacgacactgtcgtaaaattgcgcggtcccggcggctgtccgtgggatcaggaacaaactccgtccaccctgcggggagcgttagttgaagaaacttacgagtgtcttgaagccatcaatgaaaatgatcccgatcatgtcgccgaagaattgggggatttgttcttgctggcaactatgatcagctatatgcacgaacaggaaggcaagtttacggttgcggacacgcttaaaaaaataaacgacaaattaatacgccgccatccccatgtgttcgccgatgtaaaagtcagagacagcgctcatgtgcttgaaaactgggcggcgataaaagtgaatcaagaggggcgcaagccaaaagattctattcttgatgaagtaagcggcgggcttcctcccttggatcgggcatggaaactccaaaagaaagcggctaaagtcggttttgactgnccgaacgtggaaggcgttgttgaaaaaatcaacgaggaactgggagaagttatggaagccgtcggcggtaatacaaattgtaatacagttgaggaagagcttggcgatctccttttttccgttgttaacctctgccgttatctgaaagtcgagccgtccgtggccctgcgccggaccaacagcaagtttatagaaaggtttaagcatatggaaaaaaagatgaaggaaacagggcaggaaatgaaacaggaaaatttagccctcatggatcgatattggaatgaggcaaaaaacggagagagagggatttggggttccggtcgctga

SEQ ID NO: 52654 - protein, 292 aa, Unknown
  Obtained from environmental sample
  DOMAIN (185)...(251): MazG nucleotide pyrophosphohydrolase domain
  misc_feature (1)..(292): Xaa is any amino acid
MEEKKHIGGFAETKKRRAFGGGGMNVSEAFKALYDTVVKLRGPGGCPWDQEQTPSTLRGALVEETYECLEAINENDPDHVAEELGDLFLLATMISYMHEQEGKFTVADTLKKINDKLIRRHPHVFADVKVRDSAHVLENWAAIKVNQEGRKPKDSILDEVSGGLPPLDRAWKLQKKAAKVGFDXPNVEGVVEKINEELGEVMEAVGGNTNCNTVEEELGDLLFSVVNLCRYLKVEPSVALRRTNSKFIERFKHMEKKMKETGQEMKQENLALMDRYWNEAKNGERGIWGSGR

SEQ ID NO: 52655 - DNA, 471 bp, Unknown
  Obtained from environmental sample
  misc_feature (1)..(471): n is a, c, g, or t
atgtttgatttattgaaaataggaaaagggattggtcttgccagcccgcaggtaggactgatgcaccggatatttgtggatcatgacgaangagacgaaccccgtgcttttattaatccctctattattgacacgtctcatgagacagccaactacgatgaaggctgtctttttatgcctggaatttgggtcgatgtgattcgaccaaaacaaataaaagtgcacgtctggaatgaacaaggcctagccttcgcaatggatactgaagggcttctggcgcgggctatccttcatgactatgaccatcttgaaagcgttttattgattgatcgtcttcccaaagctaacaagcacatcgtgcttgataaaatcgccttattgtctgacaagacaccacaattaaaacaggctgaggcctacttgcgatattctgttcctcggaaggcccggaaatgccgttcctgtatttga

SEQ ID NO: 52656 - protein, 156 aa, Unknown
  Obtained from environmental sample
  DOMAIN (1)...(118): Polypeptide deformylase
  misc_feature (1)..(156): Xaa is any amino acid
MFDLLKIGKGIGLASPQVGLMHRIFVDHDEXDEPRAFINPSIIDTSHETANYDEGCLFMPGIWVDVIRPKQIKVHVWNEQGLAFAMDTEGLLARAILHDYDHLESVLLIDRLPKANKHIVLDKIALLSDKTPQLKQAEAYLRYSVPRKARKCRSCI

SEQ ID NO: 52657 - DNA, 972 bp, Unknown
  Obtained from environmental sample
  misc_feature (1)..(972): n is a, c, g, or t
atgagacctgaaaatgcggttgcggccttattggaaggcgcgcagcggatcatcaagggcaaacgggaattccttgaattgcttgtcacggcggcattggccggaggccatgtccttattgaggacaatcccgggctgggaaaaaccaccgttgcgaagacgcttgcaaaattaatcgaggggaagaaagggcttgtttttaagcgcatacagtttacccccgacctcctgccctacgatattaccggcgttgatgtctttgatcccaaaacgttgaaattccgttttgtgccgggtcccgtgcttgccaatatcgtgcttgccgatgaaataaaccgggcgacgcccaaggtgcagtccgccctgcttgaggtgatggccgagaggcaggtgacaatcgggcagaccagccaccgtccgcctgagccttttctggttcttgccacgcaaaacccaatcgaaagcgaagggacttttcccttgcctgcggcccagcttgaccgcttcatgatgaaactttcaatgggatatccggacaaggacgcggaacttgccatactcaatgaaaacccggccgaaaaagggcttgtgaatctcaagccggttattaagctgtcggattttctgtcagcgaaaaaagcagccgctgaggttctctgccataaggcgctgaaagaagccgtcgccgacattatccgcgacacccggattcaccgggcctttaccctgggggcaagcccccgcgccggccttcattttctggacgcggcaagggcgctggctttggtgcgcgggcggaattatattattgatgaggatctgacgatactcgcttccccggtgcttgcccacagggtgaggcttcgcgaccccagggcccagggggataaatttatccgtgagatctgccttgccaggatcagcggcataaagactgatggaacaaaggcagacggaacaaaggccgaataa

SEQ ID NO: 52658 - protein, 323 aa, Unknown
  Obtained from environmental sample
  DOMAIN (37)...(229): ATPase family associated with various cellular activities (AAA)
  misc_feature (1)..(323): Xaa is any amino acid
MRPENAVAALLEGAQRIIKGKREFLELLVTAALAGGHVLIEDNPGLGKTTVAKTLAKLIEGKKGLVFKRIQFTPDLLPYDITGVDVFDPKTLKFRFVPGPVLANIVLADEINRATPKVQSALLEVMAERQVTIGQTSHRPPEPFLVLATQNPIESEGTFPLPAAQLDRFMMKLSMGYPDKDAELAILNENPAEKGLVNLKPVIKLSDFLSAKKAAAEVLCHKALKEAVADIIRDTRIHRAFTLGASPRAGLHFLDAARALALVRGRNYIIDEDLTILASPVLAHRVRLRDPRAQGDKFIREICLARISGIKTDGTKADGTKAE

SEQ ID NO: 52659 - DNA, 858 bp, Unknown
  Obtained from environmental sample
  misc_feature (1)..(858): n is a, c, g, or t
ttgctaccaaagacgggcggcgcatacggtatgattttaaccccgcggttcctgcgccgcattttttttacggcggaaaagcgcggcgcgtatttttccgcttatgacgaatttgcgctttttgacgtttttggtttttttcgctttgctttcctgttgtcagccggcgcaaacgcgcggctgctggcaagccccggcgcagcccaggaaccggtcagcgttcacgcgagggcgggggagtccaaccagcagccggaattttcttttcagcggacggacaaccttattgaccaccggccttatataccgggcgatgatccgcggaggatcaactggaaactctacggccacggcggagggctttttgtgcgcgagggggagcgcgagcctccgccccactcaaacatagttattatggtagactgtgaatatgaccaatcgctgtataagcttgcggaagccgcccggggaatcgatgtgttatgcgaaaacgccatggccgccgcgcaggcctgcatggagtcgggaatggacgtgcttataggctatacaggtgtcgtcgtcaaagcggtcaaagatcgatccgatatcccgcagctgctgccggcaaaacaagcctcctctcttgcctggcccgcggcgctgcccatatcggcttttcctgaaattccgccggcatttatgccgccggcgcccgacgactacagcatactaattctggcccttccgcgctcagcctcagatacggctttggatcgttttttaaaaaataccgccgcccgccgcgccggaaaaaacaacacggttgatttaattttcttttgtgataacggcgttatccaaagacagcggcaatga

SEQ ID NO: 52660 - protein, 285 aa, Unknown
  Obtained from environmental sample
  DOMAIN (26)...(129): Protein of unknown function DUF58
  misc_feature (1)..(285): Xaa is any amino acid
MLPKTGGAYGMILTPRFLRRIFFTAEKRGAYFSAYDEFALFDVFGFFRFAFLLSAGANARLLASPGAAQEPVSVHARAGESNQQPEFSFQRTDNLIDHRPYIPGDDPRRINWKLYGHGGGLFVREGEREPPPHSNIVIMVDCEYDQSLYKLAEAARGIDVLCENAMAAAQACMESGMDVLIGYTGVVVKAVKDRSDIPQLLPAKQASSLAWPAALPISAFPEIPPAFMPPAPDDYSILILALPRSASDTALDRFLKNTAARRAGKNNTVDLIFFCDNGVIQRQRQ

SEQ ID NO: 52661 - DNA, 393 bp, Unknown
  Obtained from environmental sample
  misc_feature (1)..(393): n is a, c, g, or t
atgaaatcccgccgaggagggcttaccaaactgaagccggtaatcacgctgactgattttatggcggcaaaaaaagcgtcggcggcggtgttctgtcatcaggcgcttaaagaggcgattgccgacattatccgggatacccgcattcaccggggttttgtgctgggggcaagcccccgcgctggactgcattttctggaagcggcgaaagcgctggctttagtgcggggacgtaattatgttattgatgaagatttggtcatgattaccgttccggtgcttgcccaccgcgtaaaactgcgcgatcccagaactcaggcggaaaaattgattcgggagatatgccttgcccgaatcggcggtataaaaaccgacggaatcaaaaccgaatga

SEQ ID NO: 52662 - protein, 130 aa, Unknown
  Obtained from environmental sample
  misc_feature (1)..(130): Xaa is any amino acid
MKSRRGGLTKLKPVITLTDFMAAKKASAAVFCHQALKEAIADIIRDTRIHRGFVLGASPRAGLHFLEAAKALALVRGRNYVIDEDLVMITVPVLAHRVKLRDPRTQAEKLIREICLARIGGIKTDGIKTE

SEQ ID NO: 52663 - DNA, 399 bp, Unknown
  Obtained from environmental sample
  misc_feature (1)..(399): n is a, c, g, or t
ttgctctgcgatattatccatcccgaaaatgcccaaacaatcgcacgttacgctgatgacttttacgccggaacacccgccgtttgccgcaacagttacggcgaaggttatgtctggtatttcggcgcgcgtcccgaagcggctctggtagaccgatttaccgaaacaatttgcggcgaatgtgggataaagccggtatttccgcgccaggaaggaatcgaagccgcacgccgaataaagggagcgatggaatttgtctttgtattgaaccacaataagtccgaggctgatattgtgattccgtttgcgtgccgcgatttactgacagacaagaacttttccgcagacagccactacacgcttcaggcagctggggtactaatactctgtaaaagctaa

SEQ ID NO: 52664 - protein, 132 aa, Unknown
  Obtained from environmental sample
  DOMAIN (72)...(131): Beta-galactosidase C-terminal domain
  misc_feature (1)..(132): Xaa is any amino acid
MLCDIIHPENAQTIARYADDFYAGTPAVCRNSYGEGYVWYFGARPEAALVDRFTETICGECGIKPVFPRQEGIEAARRIKGAMEFVFVLNHNKSEADIVIPFACRDLLTDKNFSADSHYTLQAAGVLILCKS

SEQ ID NO: 52665 - DNA, 1908 bp, Unknown
  Obtained from environmental sample
  misc_feature (1)..(1908): n is a, c, g, or t
atgccgcttcttacggtgcggtattccagccccatgcgtaatgttatcaaggtgcgtatttcccattttgaggggggagttggcagagggccgcgatttctgttggaaaacaattccgcagattcggcgtttaagcccgacattcgcataacggagaaagaagccattctgaaaagcggggagctttcggtaagtgttgaacaggatcagaattggaacaatgtttttcgcggtagcggcaaagttttgaccagaaactccagtaagtctacagggtacatgattgatgtggaacagggacattttataaaagaagaactttctctttctgttggggaattggtgtacggacttggcgaacattttggaccgcttgtaaaaaacggacaaactattgacatttggaatgccgacagcggcacagccagtgaacaggcgtataaaaatattcctttttatatgaccaaccgtggatacggcgtatttatcaatgatacgggaaaagtttctcttgagattggcagtgaaaaaacttcgagagtgcaattttgtgttagtggggaagtgttggaatactttatcatttacggaccgcaaccaaaaactattctggaactttacactgcccttaccggaagacctgtaatgccgcccgaatggagttttggcctgtggctctccacttctttcaccacttcctacgatgaaaaaacagtgatgagttttatcaacggcatggaagaacggaagatacccctgtcagtttttcactttgactgtttctggatgaaagggtttaactggtgcgactttacatgggactcgtcaacctttcccgatcctaaaggaatgttgtcgcgaattaaagcaaaaggaattaaaatctgcgtgtggattaatccctacatcgcgcaacgctcggcgcttttcgcggaggggaaagaaggcggctattttctaaaacgcgctgatggtgcggtttaccagaccgatcaatggcaggccggaatggctattgttgattttacaaatcccgctgcggtgaaatggtatactaaccatttgggtaaaatgcttgatatgggagttgactgtttcaaaaccgactttggcgagcgtatctccgaagacgcggtgtattttgacgggggcgatccccatcggtatcataatttttattcattcctctataataaggctgtttttgaactactggaacaaaaaagtggaaagggcgaagcctgcctctttgcccgctccgccacggcaggcgggcaacgcttccctctgcattggggcggagactgcgaatccacgtttgaggcaatggcggaaactttacgcggcggtctttctctgggcctttcaggatttggtttttggagccacgacatcggcggttttgaaggaacccccaacgccgccctgttcaaacgctggcttgcctttggactgctttcctcccattcgcggcttcacggcagtacctcttaccgcgttccttggagcgtggacgaagaatccgccgaagtctgccgcttctttactgaattgaagcttcgccttaaaccgtatcttctgcgctccgcccgcgaggcttgcgatcgggggattcccgtgttacgcgcaatgtttcttgagttcccgaatgatcccgcctgcgcgtatctggatcgccagtatatgcttgggtcggatctgctggtcgctcctgtcttcagtgaagacggaaaagtttcgtattacctgccagaaggcgagtggacaaaactcctgaccggagagaaagtaaaaggcggttgttggatgacagagcagcacggctttttaagcctgccgcttttgacacgcggtgatagcgggctaagggaattgatccctaaaccgggagaaacaaaattttattaa

SEQ ID NO: 52666 - protein, 635 aa, Unknown
  Obtained from environmental sample
  DOMAIN (193)...(622): Glycosyl hydrolases family 31
  misc_feature (1)..(635): Xaa is any amino acid
MPLLTVRYSSPMRNVIKVRISHFEGGVGRGPRFLLENNSADSAFKPDIRITEKEAILKSGELSVSVEQDQNWNNVFRGSGKVLTRNSSKSTGYMIDVEQGHFIKEELSLSVGELVYGLGEHFGPLVKNGQTIDIWNADSGTASEQAYKNIPFYMTNRGYGVFINDTGKVSLEIGSEKTSRVQFCVSGEVLEYFIIYGPQPKTILELYTALTGRPVMPPEWSFGLWLSTSFTTSYDEKTVMSFINGMEERKIPLSVFHFDCFWMKGFNWCDFTWDSSTFPDPKGMLSRIKAKGIKICVWINPYIAQRSALFAEGKEGGYFLKRADGAVYQTDQWQAGMAIVDFTNPAAVKWYTNHLGKMLDMGVDCFKTDFGERISEDAVYFDGGDPHRYHNFYSFLYNKAVFELLEQKSGKGEACLFARSATAGGQRFPLHWGGDCESTFEAMAETLRGGLSLGLSGFGFWSHDIGGFEGTPNAALFKRWLAFGLLSSHSRLHGSTSYRVPWSVDEESAEVCRFFTELKLRLKPYLLRSAREACDRGIPVLRAMFLEFPNDPACAYLDRQYMLGSDLLVAPVFSEDGKVSYYLPEGEWTKLLTGEKVKGGCWMTEQHGFLSLPLLTRGDSGLRELIPKPGETKFY

SEQ ID NO: 52667 - DNA, 2130 bp, Unknown
  Obtained from environmental sample
  misc_feature (1)..(2130): n is a, c, g, or t
atggaatggtatctaaccgtgagttatccgctgccgggcttgttggcgctgaatcaggccatgaataccgtattttttggtatgttgttccttatcctgttcctgttcatcgttatcaatattttcattgcccgttctgaaaatgcaatgacggaacaaaacctgcggttgcttgaggcaaaccgaaaggcggaattcgcttcgcgggccaaaagtgattttctcgcgaagatgagccacgaaatccgcactcccatgaacgccattaccggcatggcggaactgctgatgaggggagaactctcaaacgaatcccgcggctatgcgcaggacatcaaacaggcggggaataatcttgtctcgataattaacgatattctggatttttccaagatcgaagcgggtaaactggaaataatccctatcaaatatctgctttcatccctgatcaatgatacgataaacattatccgtatgcggcttatggaaaagccggtacggttttttaccaacatcgacggaaatattcccaacagccttatcggagacgaagtgcggctgcggcagatactcattaacctcctgtccaatgcggtaaagtatacagaaaagggacatatcggtttgaccattactatggataagcgggacgataaacaagtccggctcaggatagccgtagccgataccggaaaagggataaggccggaagaacaagcgaaactctttgacgagtttgttcagatagatatgaagaagaatcagggtattgaaggaaccggactggggcttgctattaccaaacggctctgtatcgctatgggcggtgatatttgcatggaaagcgaatatggcaagggcagcgtattcacggcggttatcccccagggaattgaaacagaagtacccttcgccgcggtagaggagccggagaaaaagaaggtgcttgtctatgaaggcagaaccgtctatgccagggcattgggctggtcgcttgaaaatatgggcgtcccgtatacgatggtgacaaatcatgatgattttgtctcggcgctgtaccgcggagaatggttctatgtgttttccggttacggcctttatgaaaagatcgaaccggtgatagcgcgggatgatttccgggacgggaaaaagccgccgcttgccctcatggtagaatggggaaccgaagcatacatacccggcgtgcgttttgtgtcaataccggtgcagtcactgtccattgccaatattcttaacggcagggcggacgataaaggttatatcaaaagttcaggcgcaatccggttcagcttccccggcgcgcgaattcttgtggtggatgacatttcaactaacctcaaagtagtcgagggtcttcttgccccctacctggtaacggcggatacatgcctgaacggcctgcaggccatacaactggtaaaacacaacgagtatgacattgcattcatggatcacatgatgcccgaaatggacgggattgaagtgacgagagtcatccgtttatgggaaaaagaaaacgcacaggaaaatggtgttatgcgtaatggagttccgataatagcgttaaccgcgaatgccgttgttggaatgagggaaatgttcattgaaaatggttttaatgattttatatcaaagccgatagacgtttccaaactggatgaaattctggacagatggttaataaataacaaagaaaatgaaggacaagataaactgccggataaggatgccgattcctcattgctcattgatcattgctcattacccgctattcccaatgttgatacggcaaaaggaattgccatgctcagagggaaagtagatacttatatgaaggtattagttatgttctgcaaagatgtttctgaaagactgccgcagctgcaaaaaatgccggaggcggatacccttcaggcatttgtaatccaggttcactctctgaaaagcgtgtccgcttccattggcgctcaggaagtatcgtcttatgctgcaggacttgaggctgcgggtaaagccgcggatatgatttttatacgcgagcatttgcctgattttacgatacagctttctgaactggtaaaaaatatacacgccgccataagcatgtaa

SEQ ID NO: 52668 - protein, 709 aa, Unknown
  Obtained from environmental sample
  DOMAIN (619)...(702): Hpt domain
  misc_feature (1)..(709): Xaa is any amino acid
MEWYLTVSYPLPGLLALNQAMNTVFFGMLFLILFLFIVINIFIARSENAMTEQNLRLLEANRKAEFASRAKSDFLAKMSHEIRTPMNAITGMAELLMRGELSNESRGYAQDIKQAGNNLVSIINDILDFSKIEAGKLEIIPIKYLLSSLINDTINIIRMRLMEKPVRFFTNIDGNIPNSLIGDEVRLRQILINLLSNAVKYTEKGHIGLTITMDKRDDKQVRLRIAVADTGKGIRPEEQAKLFDEFVQIDMKKNQGIEGTGLGLAITKRLCIAMGGDICMESEYGKGSVFTAVIPQGIETEVPFAAVEEPEKKKVLVYEGRTVYARALGWSLENMGVPYTMVTNHDDFVSALYRGEWFYVFSGYGLYEKIEPVIARDDFRDGKKPPLALMVEWGTEAYIPGVRFVSIPVQSLSIANILNGRADDKGYIKSSGAIRFSFPGARILVVDDISTNLKVVEGLLAPYLVTADTCLNGLQAIQLVKHNEYDIAFMDHMMPEMDGIEVTRVIRLWEKENAQENGVMRNGVPIIALTANAVVGMREMFIENGFNDFISKPIDVSKLDEILDRWLINNKENEGQDKLPDKDADSSLLIDHCSLPAIPNVDTAKGIAMLRGKVDTYMKVLVMFCKDVSERLPQLQKMPEADTLQAFVIQVHSLKSVSASIGAQEVSSYAAGLEAAGKAADMIFIREHLPDFTIQLSELVKNIHAAISM

SEQ ID NO: 52669 - DNA, 1245 bp, Unknown
  Obtained from environmental sample
  misc_feature (1)..(1245): n is a, c, g, or t
atgaaaattcataatgattttaccctttattttagggtaactccttcgggaaaaagggtcgtgtatttctatgcttatgacgaaaaaggcgaaagaacggctggcaggtcaacggggcaactgactaaaacggcggcaagggtgcttgtaaacaggcttttgaaggaaggggctttgttgccgaaaaatgacaatgtgcctactttcggggaatacgccgtaaactggtgggattgggaaaattgcgaatacctgaaaaaaagacgaaagagggctaatataacccaaagttattccgaccacatgatgaggaatttgaataaggttatattgccgtattttaagaatatgaaaatggacgccattacaccttccgttattgaggcgtttcttgacagccttataaaacaggattataaacattccacgattaacgactattacggaactttcaaaaccatgatgattgaagccgttgaccgtgaaattatcgctaaagaccctaccgccaaagtcgagcggctgataaacgagcgcgatgaaattaagattatcaccccccttgaattcaaaaagctgtttgtcggggattggcgcaaagtctgggaagataaccgcatctgttgtactgtgaacaaactggcagcgttgtcgggcatgagggtgtccgagattttggggctgaaagggagctgcctgttcgatgatcatatttacgtctgtatgcagcatgataattacggctacaggccgacaaaaacgaaagacaaacataatataccgcttccggcttctctgattgacgatttgaaactgttgaaagaaaagaacggggacggttatctgttttcaactgacggcggtggcagccctgtttgcaggaaaactgtcttaatgtatctgcgcaaggcgttggtaaatatcggcattactgccgttgagataaaagagcgcaatttgcatatccacgcatggaggcatttcttcaatacggagatgttaaagggcgggatgaccacggaacaggcgcaggcaataaccacgcataagagcgaaaggatgacggagaggtacacgcattttgacccgcttgaatttgtaaaggcgaaagaaattcaagaagccttgttacagcctgttgatgaaaaaccgcaagcgcgggaagcggagaaaaaggaactgccgtcgaatgtgttttctttccctgtgtccggcataccgcaagaggaactgaaacaggcgtaa

SEQ ID NO: 52670 - protein, 414 aa, Unknown
  Obtained from environmental sample
  DOMAIN (195)...(368): Phage integrase family
  misc_feature (1)..(414): Xaa is any amino acid
MKIHNDFTLYFRVTPSGKRVVYFYAYDEKGERTAGRSTGQLTKTAARVLVNRLLKEGALLPKNDNVPTFGEYAVNWWDWENCEYLKKRRKRANITQSYSDHMMRNLNKVILPYFKNMKMDAITPSVIEAFLDSLIKQDYKHSTINDYYGTFKTMMIEAVDREIIAKDPTAKVERLINERDEIKIITPLEFKKLFVGDWRKVWEDNRICCTVNKLAALSGMRVSEILGLKGSCLFDDHIYVCMQHDNYGYRPTKTKDKHNIPLPASLIDDLKLLKEKNGDGYLFSTDGGGSPVCRKTVLMYLRKALVNIGITAVEIKERNLHIHAWRHFFNTEMLKGGMTTEQAQAITTHKSERMTERYTHFDPLEFVKAKEIQEALLQPVDEKPQAREAEKKELPSNVFSFPVSGIPQEELKQA

SEQ ID NO: 52671 - DNA, 840 bp, Unknown
  Obtained from environmental sample
  misc_feature (1)..(840): n is a, c, g, or t
gtgtcggttcgcggggaaaccgcggcagtttttcccatgcagcggctgggccacgaagtctgggcgattaacacggttgaattctccaaccacacgggctacggctcatggaaaggaaaagtcctgggcggagaactcgccgaagagctgatcaccggccttgaggaaaggggcgtgcttccccaatgcgaagccgtgctttctggctatatgggagacgccgcagtcgggcgcgccattaccggcgcagttaaaaaagtccgcgccgtcacgcccaaggccttgtattgctgcgatccggtaatgggcgatgttggcaggggtttttacgtcaagccggatattcctgatattttcaaaaacgagctggttcccctggctgacatcatcacacccaaccagtttgagcttgaagccctgaccggcattgaaacccaggatatcaataacgcacggcatgcaatcgacatgatccatgaaaagggaccgggtattgtgctggtgacaagctaccatgacgggaaagcgggcaacgttccgcctggcgatgataaaagaatagggatgcttgcatcggacaaaagcggggtctatgcgataagcactccggaactgcccataggagccggcatggctggatcgggcgatattaccgcttcggtattcctgtcccgttaccttgaaaccggcgatgtcaagaaaaccctggaactatgtaccgcgtctatttatggtataatcaaagcaagctggcaagtccggaacaacaaagttttctctcaacgggagataatttatctctcatttcagaaaaaacttataaacccggtccgggactga

SEQ ID NO: 52672 - protein, 279 aa, Unknown
  Obtained from environmental sample
  DOMAIN (45)...(255): Phosphomethylpyrimidine kinase
  misc_feature (1)..(279): Xaa is any amino acid
MSVRGETAAVFPMQRLGHEVWAINTVEFSNHTGYGSWKGKVLGGELAEELITGLEERGVLPQCEAVLSGYMGDAAVGRAITGAVKKVRAVTPKALYCCDPVMGDVGRGFYVKPDIPDIFKNELVPLADIITPNQFELEALTGIETQDINNARHAIDMIHEKGPGIVLVTSYHDGKAGNVPPGDDKRIGMLASDKSGVYAISTPELPIGAGMAGSGDITASVFLSRYLETGDVKKTLELCTASIYGIIKASWQVRNNKVFSQREIIYLSFQKKLINPVRD

SEQ ID NO: 52673 - DNA, 930 bp, Unknown
  Obtained from environmental sample
  misc_feature (1)..(930): n is a, c, g, or t
atgctcaaaacaaaacgaagctgggccgcgcaaagcccttatgagcgtttctttgattttatcgcgccggaggccgaccgcttcgccgtgctgctggatcatatccaaaagctggggcttaattccctggccatctccatagaggaaaaccgccatttcttcatcttccccaaggggataaatttgaagctttcccccggcgacgctttcccgtttaacggggaaagcccgaccgtgctgaccgcgcattatgaccgggtgccgggaagccctggggcaaacgacaacagcgccgctgttttccaactgctcaaaacagccctcaaacttgacgaaatggaccttggtcaatggataattatttttaccgacaaggaagagctgcaaagcggagaagggtttaaggaacagggctcctacggcctggcaaaaaaactccgccagctgggcctgttaaacgcccaaattttcaattttgacgcatgcggcaccggcgaagtttttttgttctccggcacaaccgactatcttctggacaaaaacgaaaagcccggtttccgccgtgtcagccagagggtaaaaaaattgaggaaaaaagtccttgacaccgcccgcagtctcaacctaagccatgtgctgtccgtccccatacctttttccgatgacgccggttttttgcagggggggcttcccgccncaaccatcacaatgctccccgaaaatgaagccagccatttcgcgtccctgcttcgcaatcaccctgaatttgttgaccagcttatttccggttcgattaataatcccatcgaccgcctgaatatccccgaaacatggcgcgccatcaacagcccggaagacaagcatacgcgcctgacgcccgaacactatgaccgcatagtccgctttgccgtggaactttgcaaggattag

SEQ ID NO: 52674 - protein, 309 aa, Unknown
  Obtained from environmental sample
  DOMAIN (76)...(250): Peptidase family M28
  misc_feature (1)..(309): Xaa is any amino acid
MLKTKRSWAAQSPYERFFDFIAPEADRFAVLLDHIQKLGLNSLAISIEENRHFFIFPKGINLKLSPGDAFPFNGESPTVLTAHYDRVPGSPGANDNSAAVFQLLKTALKLDEMDLGQWIIIFTDKEELQSGEGFKEQGSYGLAKKLRQLGLLNAQIFNFDACGTGEVFLFSGTTDYLLDKNEKPGFRRVSQRVKKLRKKVLDTARSLNLSHVLSVPIPFSDDAGFLQGGLPAXTITMLPENEASHFASLLRNHPEFVDQLISGSINNPIDRLNIPETWRAINSPEDKHTRLTPEHYDRIVRFAVELCKD

SEQ ID NO: 52675 - DNA, 1017 bp, Unknown
  Obtained from environmental sample
  misc_feature (1)..(1017): n is a, c, g, or t
gtgcagcggaaaggcggagttggcaaatcgctgttcgccgcgaatttgggcgtggcccttgcccaggcggggcaaagggtcgtggctgccgatctcgatctgggggcgtcaaacctgcacctcgtgctggggcatcttgcgccgcagacggggataggcacatttctcaacaatataaaacagaatctttccgacgtgattgtcgaaaccgacgtcagggggctgcgctttatcgccggtgatacggaaatccccggaaccgccaatttaaaaacccctcagcttaaggccctggtaacgcaactccttgccctggataaggatactgacgttctgatactggatctgggcgcgggctcccaccagtcaatcctggattttttcctcctgtccgggcagggcattgtcgtaacggccccgactgtcacggcggtgcttaacgcctatgtcttcctgaaaaacgccgttttccgcctgatgaccaactcgttccacagaaattcaaaaaccgggaaataccttgaaaaactccgtaccgaagggacgcataaactgcacatccccaaaatactgccggaaatagagaagatagatcccgcggcttatgaaaaatttaaagcacggctggacaacctgcacccccgcctgatcatgaacatggtaagcgaacccaaggacgccgatctcgcggcgaagatacggcattcatgcgaggagtaccttgaccttaaaatagaacacctcgggataatgtaccgcgatgcggcgcaagacgcggctcttgcctcanaaatgcctataaccatttacaaacccaaatccatactttccaggcggtttaccgcatcgccgataaaatcctggaaagcggcgaagatacctttataccggacccgaatcaaattgaagcgagtttccaggaagcgggattggaagcggaaattgattttgaaaacaagatggattacattggagaactgttacattcaggcaccctcacccagggcgacctcatag

SEQ ID NO: 52676 - protein, 338 aa, Unknown
  Obtained from environmental sample
  SIGNAL (1)...(21)
  DOMAIN (4)...(207): CobQ/CobB/MinD/ParA nucleotide binding domain
  misc_feature (1)..(338): Xaa is any amino acid
MQRKGGVGKSLFAANLGVALAQAGQRVVAADLDLGASNLHLVLGHLAPQTGIGTFLNNIKQNLSDVIVETDVRGLRFIAGDTEIPGTANLKTPQLKALVTQLLALDKDTDVLILDLGAGSHQSILDFFLLSGQGIVVTAPTVTAVLNAYVFLKNAVFRLMTNSFHRNSKTGKYLEKLRTEGTHKLHIPKILPEIEKIDPAAYEKFKARLDNLHPRLIMNMVSEPKDADLAAKIRHSCEEYLDLKIEHLGIMYRDAAQDAALASXMPITIYKPKSILSRRFTASPIKSWKAAKIPLYRTRIKLKRVSRKRDWKRKLILKTRWITLENCYIQAPSPRATS

SEQ ID NO: 52677 - DNA, 1272 bp, Unknown
  Obtained from environmental sample
  misc_feature (1)..(1272): n is a, c, g, or t
atgaaatccaagatgagcaagcaggacgagagcgccgccgccgcggacaaagcggtcaaaaccataaaagacaatatcagcaatctgggaaggctcatagaaagccagtccgaaagcatcaacacctcgtcctcagccgtagagcagatgaccgccaacattcactcggtaaccagaaccctgatagaaaacagcaagaacgtcaccgaattaacgggagcgtccgagaacggaaagatagggctgcagggagtggcggaaaagataaaggaaatagcccacgattcggaaggccttttggagataaactccgtaatgaacaagatagccagccagacaaacctcctgtccatgaacgccgctatagaggcggcccacgccggagaaataggaaagggcttcgcggtagtagccgatgaaatccgcaaacttgcggaaacatccggacagcagtcaaaaacaaccgcgactatgcttaaaaagataaaggcttcgatagacagcatcacggtctcttccgatgaagttctttcccgtttccaggttattgacaacggcgtaaagacggtctccacacatgaattaaacatccgcaacgcgatggaagagcaggaagtgggcggcaagcagatacttgaatccatagaanaacttaaagagataagcgtggcggtaaagaaaggggcggaagacatgatggcttcaggcgaccaggtgagccagcaaacaactgaatttattaccatcagcaacgaggcgatgaagggccttaacgacatagtgtacggcgccatgaaggagataaaaaccgccgtagtccttgtgaatgaaatgagtacggaaaacagcaagaacttcgaggagttaaaggcggaatcaaataaattcaaggtcgattcggacaatgaaaagaagaaaatcatcgtcattgacgatgagcaaacggttcttaccctggcaaaagccatactgagcagtgattatgacgttaccacggtcagttccggtcaggaggcattatccctgttcttccagggttatactcccaatctggtgttattggacttgaacatgccggaaatgggcggatggaccacctatctcaggatacgggacataaccaaattacacaaagttccgatagcgattcactcaagttcggaagatccgaaagacaaggaacaggcgaaggaaatgggagcggtcgcctttatccagaagcccgccaagaaagccgacatgctggataaggtggcaaggctgataaaataa

SEQ ID NO: 52678 - protein, 423 aa, Unknown
  Obtained from environmental sample
  DOMAIN (34)...(256): Methyl-accepting chemotaxis protein (MCP) signaling domain
  misc_feature (1)..(423): Xaa is any amino acid
MKSKMSKQDESAAAADKAVKTIKDNISNLGRLIESQSESINTSSSAVEQMTANIHSVTRTLIENSKNVTELTGASENGKIGLQGVAEKIKEIAHDSEGLLEINSVMNKIASQTNLLSMNAAIEAAHAGEIGKGFAVVADEIRKLAETSGQQSKTTATMLKKIKASIDSITVSSDEVLSRFQVIDNGVKTVSTHELNIRNAMEEQEVGGKQILESIEXLKEISVAVKKGAEDMMASGDQVSQQTTEFITISNEAMKGLNDIVYGAMKEIKTAVVLVNEMSTENSKNFEELKAESNKFKVDSDNEKKKIIVIDDEQTVLTLAKAILSSDYDVTTVSSGQEALSLFFQGYTPNLVLLDLNMPEMGGWTTYLRIRDITKLHKVPIAIHSSSEDPKDKEQAKEMGAVAFIQKPAKKADMLDKVARLIK

SEQ ID NO: 52679 - DNA, 807 bp, Unknown
  Obtained from environmental sample
  misc_feature (1)..(807): n is a, c, g, or t
atggcttttgccagggtaagaaccgtttgctcatcgtcaatgacgatgattttcttcttttcattgtccgaatcgaccttgaatttatttgattccgcctttaactcctcgaagttcttgctgttttccgtactcatttcattcacaaggactacggcggtttttatctccttcatggcgccgtacactatgtcgttaaggcccttcatcgcctcgttgctgatggtaataaattcagttgtttgctggctcacctggtcgcctgaagccatcatgtcttccgcccctttctttaccgccacgcttatctctttaagttnttctatggattcaagtatctgcttgccgcccacttcctgctcttccatcgcgttgcggatgtttaattcatgtgtggagaccgtctttacgccgttgtcaataacctggaaacgggaaagaacttcatcggaagagaccgtgatgctgtctatcgaagcctttatctttttaagcatagtcgcggttgtttttgactgctgtccggatgtttccgcaagtttgcggatttcatcggctactaccgcgaagccctttcctatttctccggcgtgggccgcctctatagcggcgttcatggacaggaggtttgtctggctggctatcttgttcattacggagtttatctccaaaaggccttccgaatcgtgggctatttcctttatcttttccgccactccctgcagccctatctttccgttctcggacgctcccgttaattcggtgacgttcttgctgttttctatcagggttctggttaccgagtga

SEQ ID NO: 52680 - protein, 268 aa, Unknown
  Obtained from environmental sample
  SIGNAL (1)...(23)
  misc_feature (1)..(268): Xaa is any amino acid
MAFARVRTVCSSSMTMIFFFSLSESTLNLFDSAFNSSKFLLFSVLISFTRTTAVFISFMAPYTMSLRPFIASLLMVINSVVCWLTWSPEAIMSSAPFFTATLISLSXSMDSSICLPPTSCSSIALRMFNSCVETVFTPLSITWKRERTSSEETVMLSIEAFIFLSIVAVVFDCCPDVSASLRISSATTAKPFPISPAWAASIAAFMDRRFVWLAILFITEFISKRPSESWAISFIFSATPCSPIFPFSDAPVNSVTFLLFSIRVLVTE

SEQ ID NO: 52681 - DNA, 918 bp, Unknown
  Obtained from environmental sample
  misc_feature (1)..(918): n is a, c, g, or t
atggcatctcataaaatatcgagtataagcaccattattgtaattttgaccgtcattatgctgtcaattaccagtattacaaccttgcgaagcgtcagccggcaaactgccattcaaatgggaacggaaaaactcgagggcgacatagagtcttttaaattaatgataacagacgagcacggctacatatgtctacaagacggcgatttgatagatcaaaagggtgattcgatatcatataattatgaaattgttgacaaggtatccgcaacgatgaatattttggcaaccattttaattcgtgaacaaaatgattaccgcagaataaccaccagcattaaagacgcttcggggaatcgtgtggtagataccttactgggatcgggaagcccggcgtatacgaaaattcaggagggaaataaatatatcggaagcgcttctcttctgggtaaagattacctcgccgcgtattatccgttatttcaacctgacaccaaagatgtcataggcattttatttatcggtacagaaatgtcgcatatagaagatacgattcaacataacagcattatggcgataaaaagaatccttttaatcgcggcgggacttataattatttcaattttgttatcctcattgggcagcaagtttattatagtaaaccccattgttaaaatagtccacgttgctaaaattgtcgccaaaggcgatttgacacataacgcagatgtcaatgcaaatgacgaaataggagatctcgccgaagactttaatttgatgataacagaaataaaagaacttatagggacaatgaagcataaaatcgacgcgctgaccaacaccggacatgaactgtcatcaaatatggctaaaacttccgaatcggtagaccagatttcaataattttgaaggcatga

SEQ ID NO: 52682 - protein, 305 aa, Unknown
  Obtained from environmental sample
  SIGNAL (1)...(25)
  DOMAIN (197)...(266): HAMP domain
  misc_feature (1)..(305): Xaa is any amino acid
MASHKISSISTIIVILTVIMLSITSITTLRSVSRQTAIQMGTEKLEGDIESFKLMITDEHGYICLQDGDLIDQKGDSISYNYEIVDKVSATMNILATILIREQNDYRRITTSIKDASGNRVVDTLLGSGSPAYTKIQEGNKYIGSASLLGKDYLAAYYPLFQPDTKDVIGILFIGTEMSHIEDTIQHNSIMAIKRILLIAAGLIIISILLSSLGSKFIIVNPIVKIVHVAKIVAKGDLTHNADVNANDEIGDLAEDFNLMITEIKELIGTMKHKIDALTNTGHELSSNMAKTSESVDQISIILKA

SEQ ID NO: 52683 - DNA, 375 bp, Unknown
  Obtained from environmental sample
  misc_feature (1)..(375): n is a, c, g, or t
ttgaacttgcgcgccgaactgtggcaaaatataggaaggaactggatatgggttcttcatacacacgaaaaattcaggaaaaaaaacaggagggacaaaatgaacacggaaattaaagcggtacattttacaatgcacgatgacgcgaaagagtatttgaataaaaaactggaaaggctgcacaatgccgaaaatatgattgtagacctgcttatagtcattaaaaaagaaaaagacttcgacgccgaagcgactgtaaacttcagatggggagtttcgattcatgtaaaggaagcggattttgaccttacaaaagccattgacacaatgatcgataaacttgaagcaaaaataaccaaagaaaaagaaaaatga

SEQ ID NO: 52684 - protein, 124 aa, Unknown
  Obtained from environmental sample
  misc_feature (1)..(124): Xaa is any amino acid
MNLRAELWQNIGRNWIWVLHTHEKFRKKNRRDKMNTEIKAVHFTMHDDAKEYLNKKLERLHNAENMIVDLLIVIKKEKDFDAEATVNFRWGVSIHVKEADFDLTKAIDTMIDKLEAKITKEKEK

SEQ ID NO: 52685 - DNA, 300 bp, Unknown
  Obtained from environmental sample
  misc_feature (1)..(300): n is a, c, g, or t
atgcagaccgagtggggaatttttgaaattcgctatttttttacaaattctataagcggaacaggctcaaacaggtcgaaattctcaaaaaaaagcgtaaaagagataatcagggagataattgaggccgagaaccggcttctttcggatcaggatatttccgctttattaaagcaaaaaggaattgaacttgcgcgccgaactgtggcaaaatataggaaggaactggatatgggttcttcatacacacgaaaaattcaggaaaaaaaacaggagggacaaaatgaacacggaaattaa

SEQ ID NO: 52686 - protein, 99 aa, Unknown
  Obtained from environmental sample
  DOMAIN (1)...(86): Sigma-54, DNA binding domain
  misc_feature (1)..(99): Xaa is any amino acid
MQTEWGIFEIRYFFTNSISGTGSNRSKFSKKSVKEIIREIIEAENRLLSDQDISALLKQKGIELARRTVAKYRKELDMGSSYTRKIQEKKQEGQNEHGN

SEQ ID NO: 52687 - DNA, 861 bp, Unknown
  Obtained from environmental sample
  misc_feature (1)..(861): n is a, c, g, or t
ttgcgtgaaagaatagaacaggaactggaacaaaacccggcgctggaaattatcgaggacaagagcttaatcaccctggatgaaacagacgcgaacagcaaggaagaggacgagtactttgaatcaacttccgatcccggaaggcagggttctgaacaggcgtccgatgaacacagaaaatttattgagggcgcgcttacaaggccggaaactttacaggaacacctgttatggcagttacagcttgaacctgtcgatgacgaacttcgcgttatagccgaaacgcttattcaaaatctggatgacgacggtttccacaaagaaaagccggaaactctatttaaaaccattccgccgcggcttgaagaggcgataaatcttgtaagagggtttgagcccgttggaacctgcaccgcggattaccatgaatcgctgagagtgcaagccgcccttctgcccgacgctcccgaaggaatagaaacggcgcttgataatcttgatcttctggaaaaggaaaaattttccgacattgcgaaaaaaaccggaattgacgaagaacaggcgcggcttatctgcgaatatataaaaaaactttatccctttcccggcagggcttttgctccctccaacgtgcgttatgtgatacccgacataaaggttataagagataacgacgaattgacgattaacctgaacgacgaggcgtttcccgtgcttggagttaatccgtttttcgaggaattaagcgagtcanaaactgaagaacagacagcanacaaccagaccgcgagcggtcataccgaggcaagggatttcgcgcgggataatgtcagggaggcgaagcttttatccatcaattaa

SEQ ID NO: 52688 - protein, 286 aa, Unknown
  Obtained from environmental sample
  DOMAIN (56)...(244): Sigma-54 factor, core binding domain
  misc_feature (1)..(286): Xaa is any amino acid
MRERIEQELEQNPALEIIEDKSLITLDETDANSKEEDEYFESTSDPGRQGSEQASDEHRKFIEGALTRPETLQEHLLWQLQLEPVDDELRVIAETLIQNLDDDGFHKEKPETLFKTIPPRLEEAINLVRGFEPVGTCTADYHESLRVQAALLPDAPEGIETALDNLDLLEKEKFSDIAKKTGIDEEQARLICEYIKKLYPFPGRAFAPSNVRYVIPDIKVIRDNDELTINLNDEAFPVLGVNPFFEELSESXTEEQTAXNQTASGHTEARDFARDNVREAKLLSIN

SEQ ID NO: 52689 - DNA, 693 bp, Unknown
  Obtained from environmental sample
  misc_feature (1)..(693): n is a, c, g, or t
atggcccagaacgccgaattaaaagatgggggcagggaagggctcagccttgatcttactaaagcttttatacagtcttcaaaggaggttgtccggaacgattatgactacgtttttacagattttctgcgctactgggttccacaaagcgatcttatacaggcaatatcttccatcagtccgaaccagatgagctctacggatttgcgaaaagcgattgcagttaagggcgtcgagctgggggacaggctggatgaacaatatggcaaatgcctgtcccttgcccttgatcttgaagagagcctcagagctggtcctccggaatcagtctggaaccgcagggagagaaatcttgaagcgttttcaaaagagtaccagatagccggtgtgatgagaaaagaccggagttattttgttcatagatttgaatatatgaaaaaattttcaataccgttcggtgcgcttacgtttgtttttctcgcagtttcattggggcttttcgcgagaaaaagcggccagacggtaggtttaattctcggtttgataatatcgtgtttgttctggattttaatggttggggggcaaacagtggggatacgcctggggtattcgccgttttggtcaatgtggcttcccaatattttgtcatttatcattggcatagttctttttgtcgtaaggattcaaaaatga

SEQ ID NO: 52690 - protein, 230 aa, Unknown
  Obtained from environmental sample
  misc_feature (1)..(230): Xaa is any amino acid
MAQNAELKDGGREGLSLDLTKAFIQSSKEVVRNDYDYVFTDFLRYWVPQSDLIQAISSISPNQMSSTDLRKAIAVKGVELGDRLDEQYGKCLSLALDLEESLRAGPPESVWNRRERNLEAFSKEYQIAGVMRKDRSYFVHRFEYMKKFSIPFGALTFVFLAVSLGLFARKSGQTVGLILGLIISCLFWILMVGGQTVGIRLGYSPFWSMWLPNILSFIIGIVLFVVRIQK

SEQ ID NO: 52691 - DNA, 492 bp, Unknown
  Obtained from environmental sample
  misc_feature (1)..(492): n is a, c, g, or t
atgattgcccaggcacagacggcgccggatcgaatcatctcccgcactttattcgtatacctaataagggatatgttttttgctttttttgtttcttttcttttcttcttctgtgttttttttgtaaaccagctgcttcttatggcacaggaaatactggccaaacacgttccgttttatcaggttgtgatgctggtgttttttgcccttcctcaggtaatagcaatgtcttcccctttcgcttcgcttatgggaacccttatgactataggaagaatgacttctgataatgaagttctgattattctggcttcgggcctttcgtacagaatggtgttcattcccgccctggttgtgggaatacttgtttccgtagcttctttttttatcaacgacgtattgcttccggcaggcaatattcagctgtcaaaactttaccggagaattctggtttccactccggagctggaactggaagccaattcccgttaa

SEQ ID NO: 52692 - protein, 163 aa, Unknown
  Obtained from environmental sample
  misc_feature (1)..(163): Xaa is any amino acid
MIAQAQTAPDRIISRTLFVYLIRDMFFAFFVSFLFFFCVFFVNQLLLMAQEILAKHVPFYQVVMLVFFALPQVIAMSSPFASLMGTLMTIGRMTSDNEVLIILASGLSYRMVFIPALVVGILVSVASFFINDVLLPAGNIQLSKLYRRILVSTPELELEANSR

SEQ ID NO: 52693 - DNA, 1077 bp, Unknown
  Obtained from environmental sample
  misc_feature (1)..(1077): n is a, c, g, or t
gtgaattcaatattaattgtagatgataatttggtaagcctcaaacaaatcagcgcccagcttgcaaaagattatgatatatctttggcaaaatcaggggaattggcgctgcaaatctgcgcgcgggaaaagcccgacctgatcctgctggatgtggaaatgcccggcatggacggttttgcgactatcgcccgcctgaaagatgaccctcagttaaagcagattccggttatttttttgaccggcaaccatgacaccggaacagaggttaaatgcctggaatcgggggctatggattttatcaccaaacccgccaacgttgatattctgcactaccggatagaaatgcaccttcaatttgccgcttatcaactccatctggagcgcacggtaaaggaagtggaagacaatatcggcatttcctttgcggaacttctggaatgtaaagattacaatttagccaaccatgtgttgcgtaccggtgagtatgtggaactgttgatgaaagagttgatcaaagaaggaacctttggagataaaatcaccgccgaagatattgttgtaatgaagcgggctgtcccatttcatgacatcggaaaaatcggcgtaagcgatattattctgcttaaaaaagcttctttgacagaaatagaatatcaggaaatttgcaaacataccataatcggcgcgcaggtactcaggactatttatgatcgtacgcccaatcaggattatctgaaaacagccataactattgccgaaggccaccatgaacactatgacgggacaggttatccgcatggccttaaaggagatgatatacccctgtgctgccggattatggcagtggccaatgtatatgacgcctgtgtcaccgaccgggtctaccggaaaaagctttcgcatgaacaggcatacgcggcaattattgccggacggggcacggaatttgatccgcggattgtggacgcgtttgaaaaggtacgggatgaatttgcctctctgcaggtatcagccaaatttacattaatggacaaggagtggagcttttacaatgaagcgaatattggtggttga

SEQ ID NO: 52694 - protein, 358 aa, Unknown
  Obtained from environmental sample
  DOMAIN (153)...(290): HD domain
  misc_feature (1)..(358): Xaa is any amino acid
MNSILIVDDNLVSLKQISAQLAKDYDISLAKSGELALQICAREKPDLILLDVEMPGMDGFATIARLKDDPQLKQIPVIFLTGNHDTGTEVKCLESGAMDFITKPANVDILHYRIEMHLQFAAYQLHLERTVKEVEDNIGISFAELLECKDYNLANHVLRTGEYVELLMKELIKEGTFGDKITAEDIVVMKRAVPFHDIGKIGVSDIILLKKASLTEIEYQEICKHTIIGAQVLRTIYDRTPNQDYLKTAITIAEGHHEHYDGTGYPHGLKGDDIPLCCRIMAVANVYDACVTDRVYRKKLSHEQAYAAIIAGRGTEFDPRIVDAFEKVRDEFASLQVSAKFTLMDKEWSFYNEANIGG

SEQ ID NO: 52695 - DNA, 447 bp, Unknown
  Obtained from environmental sample
  misc_feature (1)..(447): n is a, c, g, or t
atgaagcgaatattggtggttgacgacgaccttgccattcttaaacaagtctccgcttatcttgccgatgattatgaagtttcactggcaaagtccggcaatctggccctgcaagtttgtgtaagagaaaagccggaccttattctgctggatattgaaatgacggacatagacagttttgatattatgtcccagctcaaaagaaacccctatctggaccggataccgataatttttcttgccgcccatcacagcgcggaagccgagatacatgccctaaaaatcggggcaagggatcttatagtaaagcctgtagaaaaaagcattttgctccnacggatagaattacacctgcgctatatttcttatcaggcccagaccgaacaaacggtacggccctggctgacagcattgctacttcatttgcgaaatgaaagaatgtcgtga

SEQ ID NO: 52696 - protein, 148 aa, Unknown
  Obtained from environmental sample
  DOMAIN (2)...(115): Response regulator receiver domain
  misc_feature (1)..(148): Xaa is any amino acid
MKRILVVDDDLAILKQVSAYLADDYEVSLAKSGNLALQVCVREKPDLILLDIEMTDIDSFDIMSQLKRNPYLDRIPIIFLAAHHSAEAEIHALKIGARDLIVKPVEKSILLXRIELHLRYISYQAQTEQTVRPWLTALLLHLRNERMS

SEQ ID NO: 52697 - DNA, 486 bp, Unknown
  Obtained from environmental sample
  misc_feature (1)..(486): n is a, c, g, or t
atgagcttaatcnntgtggaattacagatgatggtacgggcggctccgcttcacgatataggaaaaatcgccatcagtgacagcatattgcttaaagccgggcagcttaacgatacggaatttgccgtgatgaaatgccatgcggaaagaggagcgacaattctgaaacggatgtaccagcgtatgcctacccagcattatctccgttatgccagccttattgccggttcccatcatgaacgctatgacggtaaaggctaccctcagggtcttgcgggggatttaataccgttgtgcgggcgaatcatggcggttgcggatgtttatgacgccctcatagaaaaccgcgtataccgtaacggcctggaccatattcaggcaagtaaccttatttttaataacgcgggaacacaatttgatccaagaattgtagaaacattcagaaagacacaggagcaaataactgaaattgccaatgcgcattaa

SEQ ID NO: 52698 - protein, 161 aa, Unknown
  Obtained from environmental sample
  DOMAIN (3)...(112): HD domain
  misc_feature (1)..(161): Xaa is any amino acid
MSLIXVELQMMVRAAPLHDIGKIAISDSILLKAGQLNDTEFAVMKCHAERGATILKRMYQRMPTQHYLRYASLIAGSHHERYDGKGYPQGLAGDLIPLCGRIMAVADVYDALIENRVYRNGLDHIQASNLIFNNAGTQFDPRIVETFRKTQEQITEIANAH

SEQ ID NO: 52699 - DNA, 1032 bp, Unknown
  Obtained from environmental sample
  misc_feature (1)..(1032): n is a, c, g, or t
atgctttttggccagctgaccgggcagcacgggcttcggagcatggaacagggaatgaacagccagcggaacggctggtaccatatgggcatcgcgaatgccgaacgggaagtaaagcgttcgactctgtcgtacgcaaacgcccacagaagcgcggatttattcaaggcgctgtttgcaagtctgctaatccaggcgcaaacgctaaaggcaagccatgggtttaggtttaagaacccgctttacagcatcgattcgacgactatagacctgtgcctaaaattattcccctgggccgatttccggaaaggcaaatccgggataaagctgacagtaaagctggatcaccaggggaagatcccctgttttgtagtcgagtcgaacgcgcgcgaacacgatgcaaagaaagcacgggaagtgccgtatgaaactggggacgtgctggtttttgaccggggatatgccgattatggctatttcgcttcaatttgcgagaaaaaagcgtattttgtgacccgtttaaagaaaaatgcggtatataagcgcgtcagaaagaaccccgttaaggaaagcgggaatgtcatatccgactacgaaataataatcccgtcattatcgaaagaaataacgctgcgtaaaataataatccgcgatcctgaaacgaagaagcggcttgtgtttttaacgaacaacctgaagtggtctgccgagacagtggccggagcatataangatcggtggcagatagaattatttttcaaagcgataaaacaaaacctgaagataaaacgattntacggcaactcaaggaacgcggtaatgactcaaatctggatagcgttaatagcgtatttgttattttatttattgaaagcaaagtcaaagatttcgttgatgtcatttaccaattttatttctgtaataaagacaatgctgtttcagcgagtttctctttatgattttttatgtggaacaagtcctcctccaagaaccagaaaattccttgtatttcagccggagtttgtatggtag

SEQ ID NO: 52700 - protein, 343 aa, Unknown
  Obtained from environmental sample
  DOMAIN (81)...(286): Transposase DDE domain
  misc_feature (1)..(343): Xaa is any amino acid
MLFGQLTGQHGLRSMEQGMNSQRNGWYHMGIANAEREVKRSTLSYANAHRSADLFKALFASLLIQAQTLKASHGFRFKNPLYSIDSTTIDLCLKLFPWADFRKGKSGIKLTVKLDHQGKIPCFVVESNAREHDAKKAREVPYETGDVLVFDRGYADYGYFASICEKKAYFVTRLKKNAVYKRVRKNPVKESGNVISDYEIIIPSLSKEITLRKIIIRDPETKKRLVFLTNNLKWSAETVAGAYXDRWQIELFFKAIKQNLKIKRXYGNSRNAVMTQIWIALIAYLLFYLLKAKSKISLMSFTNFISVIKTMLFQRVSLYDFLCGTSPPPRTRKFLVFQPEFVW

SEQ ID NO: 52701 - DNA, 525 bp, Unknown
  Obtained from environmental sample
  misc_feature (1)..(525): n is a, c, g, or t
atggcaaacaaggttgccaacgacgcgattcaaatccacggcggcacaggctacatgaaggagtttaacgctgaacgtcactacagagatgcgaggatcaccaacatttacgagggaaccacccagcttcaggttgttgctgccatcgggccggtaacttcaggtgtagctcaggccgtcctggacgaatacgacatggcaaattacaatcacagtcccgctttgcttgagaaagtacgtgaggcccgcaagttttttgaagaagccctggaatacgcgaagacctacgaaggccaccagcagttccttacctaccattcccgccgcctcgtggaaatggcgaccgatctcgtcatcagctaccttctgctccgcgacggcaaccacagcgaacgcaagcaaaaagcggcggcggtcttcattgccaggatgccttcgcgactcaaagcgagccgtgatttcatcatgagcgaagacggggctttgctgaagaattacgaagcggtgattgggaagactcaataa

SEQ ID NO: 52702 - protein, 174 aa, Unknown
  Obtained from environmental sample
  misc_feature (1)..(174): Xaa is any amino acid
MANKVANDAIQIHGGTGYMKEFNAERHYRDARITNIYEGTTQLQVVAAIGPVTSGVAQAVLDEYDMANYNHSPALLEKVREARKFFEEALEYAKTYEGHQQFLTYHSRRLVEMATDLVISYLLLRDGNHSERKQKAAAVFIARMPSRLKASRDFIMSEDGALLKNYEAVIGKTQ

SEQ ID NO: 52703 - DNA, 699 bp, Unknown
  Obtained from environmental sample
  misc_feature (1)..(699): n is a, c, g, or t
atgaaaatattaacaatctataagtcgatggaagaatcagcggaattatgtccggacggacaaaatgtaaaattgttaataagacactctatacgacaggaagtaaggaatgacgcaggtcttgaagcatttgaaaatgcccaattaacacgtgaagggagaaaaatggctgaacgtttgggagaatcattaggtatggatattggtactatttcttcaagctgtactcagcgttgtattgatacttgccaggaaataataaatggatacaataagagtcattcaaaatattatcacgatataattaaaactgaaatgttacaacgcccgcattgtaaaaatgttcaggaggagcatgatacatgggaaaaaataggcatgaaaggtatttttgatggtttcgccaaaaataccgatatgccgggtatttatgatatagaaacatcagtgaatcgtatggttgattatatatttgaaaccggaaacaataataattctattgatgtattttgtacccatgattttcagcttgcaatgctattacttttttccaatgggatgagtcctgaatataaacaaaaattatttgatggaagtggtaattggccttttatgctcgaaggtatgttcttgtggaagagtaaaagtgacattaatgttttatggagagatgagaaatatgccttcagacagttttag

SEQ ID NO: 52704 - protein, 232 aa, Unknown
  Obtained from environmental sample
  DOMAIN (24)...(180): Phosphoglycerate mutase family
  misc_feature (1)..(232): Xaa is any amino acid
MKILTIYKSMEESAELCPDGQNVKLLIRHSIRQEVRNDAGLEAFENAQLTREGRKMAERLGESLGMDIGTISSSCTQRCIDTCQEIINGYNKSHSKYYHDIIKTEMLQRPHCKNVQEEHDTWEKIGMKGIFDGFAKNTDMPGIYDIETSVNRMVDYIFETGNNNNSIDVFCTHDFQLAMLLLFSNGMSPEYKQKLFDGSGNWPFMLEGMFLWKSKSDINVLWRDEKYAFRQF

SEQ ID NO: 52705 - DNA, 567 bp, Unknown
  Obtained from environmental sample
  misc_feature (1)..(567): n is a, c, g, or t
atgaaagtcaagctcaacccgcctgaagattttatcgggcgttacccgcacatgctttcaggcgggcagaggcagcgggtcgccacggcgcgtacccttatcctcaatcccatgatgctggtggctgacgagcccgtgtcgatgatcgatctttcgacccgcgccgaaattctccacatgatgaaagatgtgcagcgggatttgggcgtgagttacctgtacatcactcacgatctttccacggcgcgttatttcacggacaggatcgccgtcatgtacctgggccgcatcatggagctgggaaacgccgacgatcttatcgataggcctatgcacccttatacccgtgcgcttattgaggctgttcccgaaccggaatcgggcaaggtcggcgtcataaagaatctgcccatacacggcgagataccgtcgcctgctaacattccgcccggctgccgtttccacacgcgctgccctctagctaaacctgagtgttccagcggagaggaaccggagttgcacgatcttggcaacgggcatttccacgcgtgcagattgacagattag

SEQ ID NO: 52706 - protein, 188 aa, Unknown
  Obtained from environmental sample
  DOMAIN (2)...(95): ABC transporter
  misc_feature (1)..(188): Xaa is any amino acid
MKVKLNPPEDFIGRYPHMLSGGQRQRVATARTLILNPMMLVADEPVSMIDLSTRAEILHMMKDVQRDLGVSYLYITHDLSTARYFTDRIAVMYLGRIMELGNADDLIDRPMHPYTRALIEAVPEPESGKVGVIKNLPIHGEIPSPANIPPGCRFHTRCPLAKPECSSGEEPELHDLGNGHFHACRLTD

SEQ ID NO: 52707 - DNA, 408 bp, Unknown
  Obtained from environmental sample
  misc_feature (1)..(408): n is a, c, g, or t
gtggaaacggcagccgggcggaatgttagcaggcgacggtatctcgccgtgtatgggcagattctttatgacgccgaccttgcccgattccggttcgggaacagcctcaataagcgcacgggtataagggtgcataggcctatcgataagatcgtcggcgtttcccagctccatgatgcggcccaggtacatgacggcgatcctgtccgtgaaataacgcgccgtggaaagatcgtgagtgatgtacaggtaactcacgcccaaatcccgctgcacatctttcatcatgtggagaatttcggcgcgggtcgaaagatcgatcatcgacacgggctcgtcagccaccagcatcatgggattgaggataagggtacgcgccgtggcgacccgctgcctctgcccgcctga

SEQ ID NO: 52708 - protein, 135 aa, Unknown
  Obtained from environmental sample
  misc_feature (1)..(135): Xaa is any amino acid
METAAGRNVSRRRYLAVYGQILYDADLARFRFGNSLNKRTGIRVHRPIDKIVGVSQLHDAAQVHDGDPVREITRRGKIVSDVQVTHAQIPLHIFHHVENFGAGRKIDHRHGLVSHQHHGIEDKGTRRGDPLPLPA

SEQ ID NO: 52709 - DNA, 582 bp, Unknown
  Obtained from environmental sample
  misc_feature (1)..(582): n is a, c, g, or t
gtgcaaacaggaagagccgccgcttgtcgagacggaagacgggcactggatttcatgctggaggtgcggaaaatgagtgatgccagtgttagtgttaccagtgttagtgttaatagaagcgaaaacaaagatgtaattctaaaactctctgacttgaggaagcatttctcaccgcacacaaatctgctggagatgttcggcggcaaagtgaagaatcccattaaagccgttgacggcgtaagttttgaaatcaggcgcggcgagatattcggcctgataggtgaatccggctcgggaaaaaccacgataggcaagcttgtgatgaagctgcttgatcccacaggcggggcaatttattttaacggcgaggatgttacaaaaaccagctcggagcggacgcaaagctaccgccgccaggttcagatgatctttcaggatccctacgcttccatgaacccgcgctttaaggtgcgcgatgtgcttgaggaaccgcttatcatccataaaatccacggctcaatagctgagtatgagaagatgatcatcaaggcgcttcatgaaagtcaagctcaacccgcctga

SEQ ID NO: 52710 - protein, 193 aa, Unknown
  Obtained from environmental sample
  DOMAIN (87)...(191): ABC transporter
  misc_feature (1)..(193): Xaa is any amino acid
MQTGRAAACRDGRRALDFMLEVRKMSDASVSVTSVSVNRSENKDVILKLSDLRKHFSPHTNLLEMFGGKVKNPIKAVDGVSFEIRRGEIFGLIGESGSGKTTIGKLVMKLLDPTGGAIYFNGEDVTKTSSERTQSYRRQVQMIFQDPYASMNPRFKVRDVLEEPLIIHKIHGSIAEYEKMIIKALHESQAQPA

SEQ ID NO: 52711 - DNA, 561 bp, Unknown
  Obtained from environmental sample
  misc_feature (1)..(561): n is a, c, g, or t
ttgggcgcccggaattactactatttcgtttctacgctgccttttatcagttacggcgataaacctccagtaggctccgaagaattccgggaacagtgccatggcttattgcatccggacgatgctgctctcactcgttattgttattatgatgccccattggccgtagaaacggttcagcctacaggttcagacttcatcgaccttcttatggcaagggaacgcaccctgatgttgaatctggcttacctgcgggcagcaaaattaaaacgcccctctcctggggatccgccgcacgatgtgccgcgcgctgaggcggttgcaaaggccgcctttgagatgactgacccgcttgaggccgctattttcattgacaagtcccgctggggggcgttggatgacatggtggggattgatctcttcggggtgaataatgttttcgcttatttgatgaagcttcagctacttgaacgacggcagtttttcgatgccgaaatcggggctgtcaagtataaagatctttacgattcaatactgaatgcatacaattccagggtttaa

SEQ ID NO: 52712 - protein, 186 aa, Unknown
  Obtained from environmental sample
  misc_feature (1)..(186): Xaa is any amino acid
MGARNYYYFVSTLPFISYGDKPPVGSEEFREQCHGLLHPDDAALTRYCYYDAPLAVETVQPTGSDFIDLLMARERTLMLNLAYLRAAKLKRPSPGDPPHDVPRAEAVAKAAFEMTDPLEAAIFIDKSRWGALDDMVGIDLFGVNNVFAYLMKLQLLERRQFFDAEIGAVKYKDLYDSILNAYNSRV

SEQ ID NO: 52713 - DNA, 678 bp, Unknown
  Obtained from environmental sample
  misc_feature (1)..(678): n is a, c, g, or t
ttgatcgcccgtttgaccggccagcggaaagaaagacacacattgctttcctctcccttttcgtcggccaatacagccaccgtgtcgtgcaacttatattttccggcgggctttacggacttaacggtgtattccttgtacatattgaatggcaccatgatcctgtgcgtaaaaaccccttcgggaacggtgcctatagtatccgccctgacaactttatcgcccggtttcgccaccggggtaaagtcccattcctttacaagcgaaagaggctcaaggtattctccccgttcaaggaagaaaccgcacttttccgccaactgcggaaggggattctggagaccgtcgtatatttgcgtgaggaggccgggccccagctctaccgcaagcatatccccggaaaactcaacggtgtcgttgacaactataccccgggtcatttcaaaaacctggaggctgcaggtattccccttgatgcggattacctcgcccttgagttttttgccttcggtttcaataaacgccacttcgttcatcattacagtaccgtcaaaattgacggctaccatgttaccgtttaccgcggcgacctttcccttggttcctttcattataatcctctttaaaccctggaattgtatgcattcagtattgaatcgtaaagatctttatacttga

SEQ ID NO: 52714 - protein, 225 aa, Unknown
  Obtained from environmental sample
  misc_feature (1)..(225): Xaa is any amino acid
MIARLTGQRKERHTLLSSPFSSANTATVSCNLYFPAGFTDLTVYSLYILNGTMILCVKTPSGTVPIVSALTTLSPGFATGVKSHSFTSERGSRYSPRSRKKPHFSANCGRGFWRPSYICVRRPGPSSTASISPENSTVSLTTIPRVISKTWRLQVFPLMRITSPLSFLPSVSINATSFIITVPSKLTATMLPFTAATFPLVPFIIILFKPWNCMHSVLNRKDLYT

SEQ ID NO: 52715 - DNA, 1041 bp, Unknown
  Obtained from environmental sample
  misc_feature (1)..(1041): n is a, c, g, or t
atgaaaggaaccaagggaaaggtcgccgcggtaaacggtaacatggtagccgtcaattttgacggtactgtaatgatgaacgaagtggcgtttattgaaaccgaaggcaaaaaactcaagggcgaggtaatccgcatcaaggggaatacctgcagcctccaggtttttgaaatgacccggggtatagttgtcaacgacaccgttgagttttccggggatatgcttgcggtagagctggggcccggcctcctcacgcaaatatacgacggtctccagaatccccttccgcagttggcggaaaagtgcggtttcttccttgaacggggagaataccttgagcctctttcgcttgtaaaggaatgggactttaccccggtggcgaaaccgggcgataaagttgtcagggcggatactataggcaccgttcccgaaggggtttttacgcacaggatcatggtgccattcaatatgtacaaggaatacaccgttaagtccgtaaagcccgccggaaaatataagttgcacgacacggtggctgtattggccgacgaaaagggagaggaaagcaatgtgtgtctttctttccgctggccggtcaaacgggcgatcaactgctacgaagaacggttcaggcccgacgagccgatggtaacccagattcggcttatagatacgttcttcccggtagcacggggaggaaccttctgcgtgcctggcccctttggtgcggggaagacggtacttcagcatcaaatgagccagcatgcggatgtggacgtagttattgttgcagcctgcggcgagcgagccggcgaagttgtggaagtcctgaaagaattcccggagcttatcgatccncaaaccggcaaatccctcatggaacgtacaataatcatctgcaacactttcgtcatgcccgtggcggctcgcgaggcgtcgctctatacagcggtaaccatggtcggaatactaccgccagatggggctccacgtcctcctccttgcggactctaccagccgctgggcgcaggctctccgtga

SEQ ID NO: 52716 - protein, 346 aa, Unknown
  Obtained from environmental sample
  DOMAIN (218)...(345): ATP synthase alpha/beta family, nucleotide-binding domain
  misc_feature (1)..(346): Xaa is any amino acid
MKGTKGKVAAVNGNMVAVNFDGTVMMNEVAFIETEGKKLKGEVIRIKGNTCSLQVFEMTRGIVVNDTVEFSGDMLAVELGPGLLTQIYDGLQNPLPQLAEKCGFFLERGEYLEPLSLVKEWDFTPVAKPGDKVVRADTIGTVPEGVFTHRIMVPFNMYKEYTVKSVKPAGKYKLHDTVAVLADEKGEESNVCLSFRWPVKRAINCYEERFRPDEPMVTQIRLIDTFFPVARGGTFCVPGPFGAGKTVLQHQMSQHADVDVVIVAACGERAGEVVEVLKEFPELIDPQTGKSLMERTIIICNTFVMPVAAREASLYTAVTMVGILPPDGAPRPPPCGLYQPLGAGSP

SEQ ID NO: 52717 - DNA, 786 bp, Unknown
  Obtained from environmental sample
  misc_feature (1)..(786): n is a, c, g, or t
atggggctccacgtcctcctccttgcggactctaccagccgctgggcgcaggctctccgtgaaatgtccggacgcctggaagaaatccccggcgaagaagcgttccccgcttatttggaatctaccattgccaccttctacgaaagggctggcttggtaaggcttaaggacggttccctgggatcggtaacaataggcggtacggtaagcccggcgggcggtaactttgaagagccggtaacgcaggcgaccctcaaagtagtaggcgcgttccacgggctttcccgcgagcgttccgacgcccgcaagttccccgccattcatccccttgattcctggtccaagtacaatggaatcatttccaacgaaaaggtcggctatgcgcgcaagctcctcatgcgtggtaccgaagtggaacagatgatgaaggttgtcggcgaagaaggaaccagcctggaagactttatcgtttaccttaaaggcgacttccttgactctgtgtatttccagcagaactcttttgacgctgttgatcaggccgcaaacccggaaaggcagaaatacgtctttgcccaaatactcaggattttgggaagccaccttaacttcagagacaaggatgaggcccgtacctggtttaacggcctgcgccagaagttcattgactataacttctcgccatggcagggcgacgggttcaagaaaattgaggcggaacttctggctttaatcaaggataaggccggcaaaatggatccagtagcagaaaaactaataaccggctag

SEQ ID NO: 52718 - protein, 261 aa, Unknown
  Obtained from environmental sample
  DOMAIN (1)...(114): ATP synthase alpha/beta family, nucleotide-binding domain
  misc_feature (1)..(261): Xaa is any amino acid
MGLHVLLLADSTSRWAQALREMSGRLEEIPGEEAFPAYLESTIATFYERAGLVRLKDGSLGSVTIGGTVSPAGGNFEEPVTQATLKVVGAFHGLSRERSDARKFPAIHPLDSWSKYNGIISNEKVGYARKLLMRGTEVEQMMKVVGEEGTSLEDFIVYLKGDFLDSVYFQQNSFDAVDQAANPERQKYVFAQILRILGSHLNFRDKDEARTWFNGLRQKFIDYNFSPWQGDGFKKIEAELLALIKDKAGKMDPVAEKLITG

SEQ ID NO: 52719 - DNA, 555 bp, Unknown
  Obtained from environmental sample
  misc_feature (1)..(555): n is a, c, g, or t
atgcgccacttcttcatggaaatgctctaccagttggcagacggcttctccgtcaacaccggctacttcaccgtacaccccaacatcggcggcactttcaaaaacgagaacgaagcccacaaccacaaagaccatccgattagcttccgctttcaggccctcaaacctatgcgcgacatccgcgacgacatagacgtaataatcgacggcatagccgacaccaagggctacatcatggactttaccgacgttaacacaggcgcggtcaacgaactctttgcccaattgggaatgtttatcataacaggctacaaaatcaagatagaaggcgaccaccccgacgtaggcctgtattttcaacaagtaacaggcggcaataccctaataaaagcgggcaaactggcggaaaacaccgcgtccaagctggtcggaataggccccggcagccccagcgggaccttcaaagtcatcataaagacccagtataccggctccgccaacaagttctcgaaggagcttcgtatcatagaaagcccttttaccctgaaaaagtga

SEQ ID NO: 52720 - protein, 184 aa, Unknown
  Obtained from environmental sample
  misc_feature (1)..(184): Xaa is any amino acid
MRHFFMEMLYQLADGFSVNTGYFTVHPNIGGTFKNENEAHNHKDHPISFRFQALKPMRDIRDDIDVIIDGIADTKGYIMDFTDVNTGAVNELFAQLGMFIITGYKIKIEGDHPDVGLYFQQVTGGNTLIKAGKLAENTASKLVGIGPGSPSGTFKVIIKTQYTGSANKFSKELRIIESPFTLKK

SEQ ID NO: 52721 - DNA, 390 bp, Unknown
  Obtained from environmental sample
  misc_feature (1)..(390): n is a, c, g, or t
atgcgcgacatccgcgacgatatagacgtaataatcgacggcatagccgacaccaagggctacatcatggactttaccgacgttaacacgggcgcggtcaacgaactctttgcccagttgggaatgttcatcataacaggctacaaaatcaagatagaaggcgaccatcccgacgtaggcctgtattttcaacaggtaacaggcggcaacatcctaataaaagcgggcaaactggcggaaaacacctcatccaagctggtcggaataggccccggcagccccggcggaaccttcaaagtcatcataaagacccagtttagcggttccggcagcaccttccttaaagccccgcgcaccatagaaagcgggtttaccctcaccaggccatag

SEQ ID NO: 52722 - protein, 129 aa, Unknown
  Obtained from environmental sample
  misc_feature (1)..(129): Xaa is any amino acid
MRDIRDDIDVIIDGIADTKGYIMDFTDVNTGAVNELFAQLGMFIITGYKIKIEGDHPDVGLYFQQVTGGNILIKAGKLAENTSSKLVGIGPGSPGGTFKVIIKTQFSGSGSTFLKAPRTIESGFTLTRP

SEQ ID NO: 52723 - DNA, 1914 bp, Unknown
  Obtained from environmental sample
  misc_feature (1)..(1914): n is a, c, g, or t
ttggggcggtgcangcacgcttacccaggctattttgcgcctgctttttaccgaatttttggcgaatttgagcctgagcataaagtaacttggaatgctcttattgatggttcttacgaagtgattgcaaaatctcccggatacagtaaagggcttgtcccagactggagtacatcttctggcgggagtacaggtggcgcaggatacaatgcctactttaacggggatgctctatatagagatgctattcgcgtatattggcgtttagctaccgattatctttggtatggggaatcaaaagccaaaacttttctagacaaagccattaattttttagaaagcaaaggcggcccgagcaatgcaaacttctttgatatgagcggaaacctgctcccagcatcagataccgaaactctgggacttggcaagcaaaatatagttcgcacacgccgtgagcatagccacttgactatgggaatgtgggcggcggcagctatgggttctggtggtcaggcacttgccgaaagctatagcgatgaattgctcaaattctataaatctggaacagattattggggatatgcaactgaccccgcaggcggaacagaagacactttgcacaacgagatgtactttgaccaattcttggcttggttcggtgcttctgtgcttggcggagcttttacaaatgtgtgggaagatttaaaagacggcattccgcaaggccctcccgaatggaaaaaatggcctgttttaagtactcaagatattgatgcgagcaaagaacctttgaaagtaaccgcatcattcaccaacagcacccgttggactgccacattcacgagtgacgcaaatggaagctcagtatcgtttagcgcaaaatccgatacaataaattttctttggtatgggttatctaaagatgaggcttcttatatgccgcagggtttttatacccttacaataaatgctcctggtttggatattccatattctgccaaagtatggctgggcaaaccttatgcgagcagtttaatggaaaanaatagattactcgttgacgattttgccgatggcgaccttattccgtatataggaaaagaatggagaaactacttggattcccaagacggagctggttcttcaactgggcagctttctgtgggaagtgataaatggctaagctggaaatacactttaaaaggcagcgacaactcttatgccgcacttgaatggaactgctccactctcaatgtgaaaggcatagattccataatagtcatcgccaaaagcggaggcacaaatataggagtttccgttcaattgatttcttctgatnttagctttccaaacgaataccaatactttgaagactcgctccaactaacttcttcaccacaagaatttaaactacccatttcaaaattcaaacaacgcatggatggaagcggcaaggaactgaacaaaacactggaaaaacttacaggcattcgctttcacatgcaaaacggcaacaacagcacgggcacaataatggtggacaaaatgtacttcaccggaaatgtctcaaatttttacaaattcaatgagccgccccaatacaaagcacccaacgtgcaaatcccagaacctccaacggaaaaaccacaaccccccacaccaattcgccttacgcagcaagtcaaggcatattcaataagaaaaagctcaggcatggtgcatataaatttgcaaccgaacatggcaggagcaagcgttacccttattgatgcaaaaggaaaggtggctaaaaaaatgaacgtaccacaaaacgccgagctgcatatttcaacaaaagatttggcaactggaatttattttgtggaagtcaagaaaggatctcaacggctgatactgaccattccgcccatgtaa

SEQ ID NO: 52724 - protein, 637 aa, Unknown
  Obtained from environmental sample
  misc_feature (1)..(637): Xaa is any amino acid
MGRCXHAYPGYFAPAFYRIFGEFEPEHKVTWNALIDGSYEVIAKSPGYSKGLVPDWSTSSGGSTGGAGYNAYFNGDALYRDAIRVYWRLATDYLWYGESKAKTFLDKAINFLESKGGPSNANFFDMSGNLLPASDTETLGLGKQNIVRTRREHSHLTMGMWAAAAMGSGGQALAESYSDELLKFYKSGTDYWGYATDPAGGTEDTLHNEMYFDQFLAWFGASVLGGAFTNVWEDLKDGIPQGPPEWKKWPVLSTQDIDASKEPLKVTASFTNSTRWTATFTSDANGSSVSFSAKSDTINFLWYGLSKDEASYMPQGFYTLTINAPGLDIPYSAKVWLGKPYASSLMEXNRLLVDDFADGDLIPYIGKEWRNYLDSQDGAGSSTGQLSVGSDKWLSWKYTLKGSDNSYAALEWNCSTLNVKGIDSIIVIAKSGGTNIGVSVQLISSDXSFPNEYQYFEDSLQLTSSPQEFKLPISKFKQRMDGSGKELNKTLEKLTGIRFHMQNGNNSTGTIMVDKMYFTGNVSNFYKFNEPPQYKAPNVQIPEPPTEKPQPPTPIRLTQQVKAYSIRKSSGMVHINLQPNMAGASVTLIDAKGKVAKKMNVPQNAELHISTKDLATGIYFVEVKKGSQRLILTIPPM

SEQ ID NO: 52725 - DNA, 648 bp, Unknown
  Obtained from environmental sample
  misc_feature (1)..(648): n is a, c, g, or t
atggtattcaaatatcttgtattagcaacgctagcacttgcaatttctgcatactctagccttttgccctatccaaacccaatgcccaaagtgaacacgccgtacgacgatattttgctcaaaacttgggatggaataaaaaagcgcaacgttaatgcctatagcacaggcttggtgcacagacccaaatcaaattcgccagacgatgccgttagcgaaggcattagctatggaatgttcctcgctttgtacgcaaacgaccaagcctcctttaacagtatatggaatgccggtgaaaagttcatgtggaatgatggcggcggctactacgactggcgcagaaattcccaaggcggtgatatgggtacgggcgggccagcttctgatgcggaacaagatattgccctgcttctaatttttgcagaccaactggtgaaaaacggaatatggaagtcttataccagcaccaaaggagcctcttacaccgaccgcgctaaacgtattttgcaaacaataagaggctctatgattgaccaaggcaaatatctaatgcccggtcattggggcggtgcangcacgcttacccaggctattttgcgcctgctttttaccgaatttttggcgaatttgagcctgagcataaagtaa

SEQ ID NO: 52726 - protein, 215 aa, Unknown
  Obtained from environmental sample
  SIGNAL (1)...(19)
  misc_feature (1)..(215): Xaa is any amino acid
MVFKYLVLATLALAISAYSSLLPYPNPMPKVNTPYDDILLKTWDGIKKRNVNAYSTGLVHRPKSNSPDDAVSEGISYGMFLALYANDQASFNSIWNAGEKFMWNDGGGYYDWRRNSQGGDMGTGGPASDAEQDIALLLIFADQLVKNGIWKSYTSTKGASYTDRAKRILQTIRGSMIDQGKYLMPGHWGGAXTLTQAILRLLFTEFLANLSLSIK

SEQ ID NO: 52727 - DNA, 669 bp, Unknown
  Obtained from environmental sample
  misc_feature (1)..(669): n is a, c, g, or t
atggtggaaccggaaatcgcttttgctgaacttgatgacaatatggctattgcggaagattttttaaagtatatttttaatgccgctattacggaatgtgccggtgaactggaattttttgacgctcatattgagaaaggaattatcgaaagccttaaaaatacagctaacgcaaaattttcgcatatcacttatacggaagctgttaaggaacttgaaaaagccgccgcctcaaaaaaggtttcttttgaatttgatccgcgttggggaagcgatttgcaaagcgaacatgaaaagttccttacagagaaaattgcgggcggccctgtaattgttacagattaccccaaagatataaaagctttttatatgaaacaaaatgacgatgataaaactgtacgcgctatggatgtgcttgtcccgcgtcttggtgaaataatcggcggctcacagagggaagatgatctggaaaaacttatccggcgtatgaaggaaatgaatttgaaaacagaagattattactggtatcttgatctccgccgttacggttctgttccgcattcgggatttggtcttggttttgagcggcttatacagtacatttccggtatggcaaatattcgcgatgtaattccgtatccgcgcgcggtagggcaggctgaattttga

SEQ ID NO: 52728 - protein, 222 aa, Unknown
  Obtained from environmental sample
  DOMAIN (1)...(218): tRNA synthetases class II (D, K and N)
  misc_feature (1)..(222): Xaa is any amino acid
MVEPEIAFAELDDNMAIAEDFLKYIFNAAITECAGELEFFDAHIEKGIIESLKNTANAKFSHITYTEAVKELEKAAASKKVSFEFDPRWGSDLQSEHEKFLTEKIAGGPVIVTDYPKDIKAFYMKQNDDDKTVRAMDVLVPRLGEIIGGSQREDDLEKLIRRMKEMNLKTEDYYWYLDLRRYGSVPHSGFGLGFERLIQYISGMANIRDVIPYPRAVGQAEF

SEQ ID NO: 52729 - DNA, 324 bp, Unknown
  Obtained from environmental sample
  misc_feature (1)..(324): n is a, c, g, or t
atgacgaaaacagctgaaaagaaatacgtccgcagtgtgccgcatgattcggccatgcgggaaagcttgcgccaagatcatgatttcgccgccagttatattgaattggccatgcgggaaggttcgcgtgaagaattactcatggctttgcgccaggtcaccaaagcttttggcggtgtcgccaagttggcggataagaccggcctgaatgaaaacactttgtatcgaacgctatccgccaaaggcaacccgcgtctggatacgtttgtcaaggtatgcaatgctgtgggtatgcggatccacataacgcctgttgaagggtag

SEQ ID NO: 52730 - protein, 107 aa, Unknown
  Obtained from environmental sample
  misc_feature (1)..(107): Xaa is any amino acid
MTKTAEKKYVRSVPHDSAMRESLRQDHDFAASYIELAMREGSREELLMALRQVTKAFGGVAKLADKTGLNENTLYRTLSAKGNPRLDTFVKVCNAVGMRIHITPVEG

SEQ ID NO: 52731 - DNA, 2025 bp, Unknown
  Obtained from environmental sample
  misc_feature (1)..(2025): n is a, c, g, or t
ttggccgaggctccggaacgtaattgttaccgttgccaagccaatccctcgatctctacatggccgtcagcggcatccataaccaacggcgcggaattgtctacatcggcgctatcaggcgcagtacatacaacccccggttctttcgcgtggactaacggcgcgactgttcccccttttggaaccaataattcttacaacgtaacgttcacgccgaccgacacggccaattataataccgttaccaatactgtgagcattaccgtaatcaactcgcccataacggccgccaatattaccattaacgctcctaccaatggcgcgactccggcaacaacggcaacagtttcggcatcggagaattttacctccggaacagtaacatggattccgcctgataccgcattcaaaggcagtacagcatacaccgccacggtaacgctgacggcaaaaaccggttataccttcaccaatttgactaatgttaaagtaaacggtgtgtccgctacgataacaggcactcccggtagtaccttggctttgtcatacacattcccggcaacgggcgctaaaacagtttcgggcatagcgatcaaaacacaaccggcaaaactgacatacacccacggcgacacgcttgatttatcagggcttgtggtaacgctgacctatgatgataccacaaaagatgatgtcgccgtcgcagacttttccgcaaataaaatagcaacagacnccggtcacggcattccgatagaacgttcaacatataacggcaaacccattacgatcaaatacggcgtcttgacaaaaaccaccgatgatttaaccgtcaacgccaaatccgtctctgacgatgacgttaccgttctcccaatcaatgcgcagacctatacaggcaaagaaattaaacctgaaattaaagtaatgcacagcgtagtaacaggcactacgagagaattaaaagagaaagaggatggagtgaataaagattacacggtgtcatacagagacaacatcgtgggacccaccgccacagtaaccataacaggcataaacgactatacaggcactaaagaattaaccttctctattacaggagttcctgtaggcggaaagcccataataacaacaacatcattgccaaacggagcagggaacagagcatacagtcaaacattaacggcgacaggagacacacccattacatggacttatgaaggaacattaccagatggtttgagccttaatgaaacaaccggcgttatttcaggaacgtcacataactacatatataccgattggtatgaatacacttatagatcaacatttactgttatagcaactaatgacgcaggaagcgacgaaaagcagttatcaataacaattgcaagaacctttacctccaattcgattctaattaatgatttgaggaataacgatgctaataccgctgataccccatatccaattgcgatcaattatgatattgctggatttaatgtcagttcattaaacggaaaatacgttactattgatttttcagaaaataactttaccagcattccaaattctaaattttctaatggagttaccattgtcagcataactttacccgacagtgttaacagcattgggcaaggtattttttctagttgcaacagccttaccacaattaatgttgacgctggtaataatacatattcatcacaagacggcatattatataataaagcgaaaaccattttacatacatatccggcaggaaaaactggcgcatttaccttgtctgacagcgttacaagtatcggtggaagtgctttttactattgtaataaccttaccgcaataaatgttaacactggtaatagcacatatagttcacaagacggcgtgttgtataacaaagacaaaaccaccttaattcaatatccggcaggaaaaacaggcaattcatttaccataccgaatggcgttatcggcattggacttggcgcttttcacaggtcctcgtgccgattctga

SEQ ID NO: 52732 - protein, 674 aa, Unknown
  Obtained from environmental sample
  misc_feature (1)..(674): Xaa is any amino acid
MAEAPERNCYRCQANPSISTWPSAASITNGAELSTSALSGAVHTTPGSFAWTNGATVPPFGTNNSYNVTFTPTDTANYNTVTNTVSITVINSPITAANITINAPTNGATPATTATVSASENFTSGTVTWIPPDTAFKGSTAYTATVTLTAKTGYTFTNLTNVKVNGVSATITGTPGSTLALSYTFPATGAKTVSGIAIKTQPAKLTYTHGDTLDLSGLVVTLTYDDTTKDDVAVADFSANKIATDXGHGIPIERSTYNGKPITIKYGVLTKTTDDLTVNAKSVSDDDVTVLPINAQTYTGKEIKPEIKVMHSVVTGTTRELKEKEDGVNKDYTVSYRDNIVGPTATVTITGINDYTGTKELTFSITGVPVGGKPIITTTSLPNGAGNRAYSQTLTATGDTPITWTYEGTLPDGLSLNETTGVISGTSHNYIYTDWYEYTYRSTFTVIATNDAGSDEKQLSITIARTFTSNSILINDLRNNDANTADTPYPIAINYDIAGFNVSSLNGKYVTIDFSENNFTSIPNSKFSNGVTIVSITLPDSVNSIGQGIFSSCNSLTTINVDAGNNTYSSQDGILYNKAKTILHTYPAGKTGAFTLSDSVTSIGGSAFYYCNNLTAINVNTGNSTYSSQDGVLYNKDKTTLIQYPAGKTGNSFTIPNGVIGIGLGAFHRSSCRF

SEQ ID NO: 52733 - DNA, 642 bp, Unknown
  Obtained from environmental sample
  misc_feature (1)..(642): n is a, c, g, or t
ttgaanagagcaatttattcggaacaattaangaaagaggggttacagcttataacagcctcgnaaaaaggcgatattgaagccgtagaatcattaattaagaaaggtgtttatatccacgcgcaggatagggagggcaagtgcgcccttgttgttgccgcatataagaacgttctcgaaattgtcgatttactgattgccgcaggcgcagatgtcaacatgaaagacaatactctgcaaagcgcatatttaatttcaacatctgaaggatatacggagctgctgaagaaaacactcaaagccggtgcggatgtccattgtacggacagttacaatggaacagggttgatccgcgccgctgaccgtgggcatgttgaaataataagggaacttttaaaaacagatatccgtgtaaatcatattaacaaaattggatggaccgcattacttgaggcaattattttgggcgacggagggagacggcatactgaggttgtgcgtcttttggttgattctggagctgatgttaatttaccggataaggatggagttaccccgttggcgcatgctaagagtaagggttatactgacattatcaagatattggagaattctggggcaaaggagttactccccctttaa

SEQ ID NO: 52734 - protein, 213 aa, Unknown
  Obtained from environmental sample
  DOMAIN (45)...(77): Ankyrin repeat
  misc_feature (1)..(213): Xaa is any amino acid
MXRAIYSEQLXKEGLQLITASXKGDIEAVESLIKKGVYIHAQDREGKCALVVAAYKNVLEIVDLLIAAGADVNMKDNTLQSAYLISTSEGYTELLKKTLKAGADVHCTDSYNGTGLIRAADRGHVEIIRELLKTDIRVNHINKIGWTALLEAIILGDGGRRHTEVVRLLVDSGADVNLPDKDGVTPLAHAKSKGYTDIIKILENSGAKELLPL

SEQ ID NO: 52735 - DNA, 552 bp, Unknown
  Obtained from environmental sample
  misc_feature (1)..(552): n is a, c, g, or t
atgcagagactttttatatccgtaaactgtgatgaaaaagtaaaaaatcagattctctccgtgcaggaaaaaattaaaacactgtctgtaaaaggaaatttttcatcgcctgaaaatctgcacctaacgcttgtttttattggtgaaactccagatgatgcaataccgctaataacttccgtaattggcaaagcgcttataccgcctgtcgctcaatttacgcttgatttcacgacaacaggttgttttaaacacagtaataaggaactatggtggataggaacggatcataacgatactcatattgacattctaaaaacgatcagagggcgtattacagaggctttactttcaaataacatacattttgataacaggccatttaacccgcacatcacccttggcagggagataaagcatgaatcgcctattatcattccaaaacaagagattatatatcccgtaaaccgaatcagtttgatgaggtcggaacatattagcggaaaattaacttatacggaaatatttggaagggatttaaagggggagtaa

SEQ ID NO: 52736 - protein, 183 aa, Unknown
  Obtained from environmental sample
  misc_feature (1)..(183): Xaa is any amino acid
MQRLFISVNCDEKVKNQILSVQEKIKTLSVKGNFSSPENLHLTLVFIGETPDDAIPLITSVIGKALIPPVAQFTLDFTTTGCFKHSNKELWWIGTDHNDTHIDILKTIRGRITEALLSNNIHFDNRPFNPHITLGREIKHESPIIIPKQEIIYPVNRISLMRSEHISGKLTYTEIFGRDLKGE

SEQ ID NO: 52737 - DNA, 465 bp, Unknown
  Obtained from environmental sample
  misc_feature (1)..(465): n is a, c, g, or t
ttggtcgccggagtttctttttctctttcggggagcatatctggttatgtttacatgggaggagccgcgttgtgctgggttggttacagcctgcttacccgtcctctctttgacagaaaacgatcccgtctatatatcgtgttctggcaaaatttttttggctttctgggattacttccctttgctatgctggaatacaaaagctggggcgatcccacattaccggttatgcttcatgtgatctttcttgcgctgggttgttccgctcttggttactggctctatgcttacgcaatggaagcgctgggagtatcgacaacatcggtgtttatcaatttgattccggtagtaacagtaattgccggattcatcgtcttgaatgaaagacttacccttctgcaaggggcgggagccgcgctggttcttgccggggtatatttaacaatactgccgaagcgaaaataa

SEQ ID NO: 52738 - protein, 154 aa, Unknown
  Obtained from environmental sample
  DOMAIN (24)...(150): Integral membrane protein DUF6
  misc_feature (1)..(154): Xaa is any amino acid
MVAGVSFSLSGSISGYVYMGGAALCWVGYSLLTRPLFDRKRSRLYIVFWQNFFGFLGLLPFAMLEYKSWGDPTLPVMLHVIFLALGCSALGYWLYAYAMEALGVSTTSVFINLIPVVTVIAGFIVLNERLTLLQGAGAALVLAGVYLTILPKRK

SEQ ID NO: 52739 - DNA, 453 bp, Unknown
  Obtained from environmental sample
  misc_feature (1)..(453): n is a, c, g, or t
atgacaaagaaaaccgccgcctgccttctggctcttccgccggtactggcggcggctttttcttttgttcttccgtatgccgccagttttgttcccgctattcgcggacttgccggcggagaaatatccgtcttgcggaacagcgctctcttcaacataactctttttacttttaagcaggcttttttaagcgtgcttgtttctctggctattgggcttcccggcgcgtggttcatcgggaacagccgttcgcgttttacgccgattctgaaaacattaacggcgatacctttcgctatgccgtcaatcttggtggtgttgggccttcgtgctttttttcgggaactcaggctgggtaaatcgtatctatggaactttgcctttttccggcgaacagccgttaaggatactctacaagccgcttgccgttattcttgcgcacggattttttaa

SEQ ID NO: 52740 - protein, 150 aa, Unknown
  Obtained from environmental sample
  SIGNAL (1)...(17)
  misc_feature (1)..(150): Xaa is any amino acid
MTKKTAACLLALPPVLAAAFSFVLPYAASFVPAIRGLAGGEISVLRNSALFNITLFTFKQAFLSVLVSLAIGLPGAWFIGNSRSRFTPILKTLTAIPFAMPSILVVLGLRAFFRELRLGKSYLWNFAFFRRTAVKDTLQAACRYSCARIF

SEQ ID NO: 52741 - DNA, 1311 bp, Unknown
  Obtained from environmental sample
  misc_feature (1)..(1311): n is a, c, g, or t
gtgctttttttcgggaactcaggctgggtaaatcgtatctatggaactttgcctttttccggcgaacagccgttaaggatactctacaagccgcttgccgttattcttgcgcacggattttttaactttccgcttgtgatacgacttgccggagacggaatagcgagagcgcggcgcgcctacgctcccgcggctgcaagtcttggtgcgtctcctttaaaaattattcttaccgtaattcttccgcttaccgttccaagtattttagccgcaagttttttggcgttcatgtactgcttcacaagttttgcggtcgtactggtgttaggcggaggaccgaataccacaactcttgcggtagagatataccggcacgcgcgtatttttttaaattacggtaacgcgggatttcttgcgttaatcgagaccttaatagccgtctgcgtttttctgacttatgtttttgtcggaaaaaaatcaatgtcgatacagacaaatgttatcgagtacgccgaagcggggaaaaaatctaccgcctctcggataattatgattgtgtattttatcatgatggcttttattgttcttggtccgcttctttccataccattggaatcttttttgtacacaccttcccgttccgcatcgcaggttttaagcgtcaggtggtggagcgatctcggaggcacttgttttcccgcgcttggtcgttcgctcatactggctttcttttccgcgacaaccgcttgcgtactcgcgttcttcgcggcgggcgcggtaaaactccttgagacaaataacaaagcggcttcctttcccgcaaaccttatccgcttctttgccgccgctcccgtaatatcatcgggtattgtnttaggtttaggctggctcattctatatggaagaaatttttcacgttctcctttcgcgcttgtgatagttcacggagtcagcgcgatgccttttgcttttaattttatttccgaaggttttcgatcgcttcccgccaatacgcttaacgcggctatggtctatggagcggatcccctgagcgccctggtaacaacggcgctgcccctttcgcttaaccgcgtgcgttccgcatggggctttgccgccgctttaagccttggagaacttaacgcggtaatgatgttaggcatggaaggatgggaaactttgccactgtacatctaccgcgctgcgtccgcttaccgttacgggacagcgtgcgccgccggaaccctgctgatactttgctgcgccgcctgttttttgctctcggagacaggaaggaataaatatgcttga

SEQ ID NO: 52742 - protein, 436 aa, Unknown
  Obtained from environmental sample
  misc_feature (1)..(436): Xaa is any amino acid
MLFFGNSGWVNRIYGTLPFSGEQPLRILYKPLAVILAHGFFNFPLVIRLAGDGIARARRAYAPAAASLGASPLKIILTVILPLTVPSILAASFLAFMYCFTSFAVVLVLGGGPNTTTLAVEIYRHARIFLNYGNAGFLALIETLIAVCVFLTYVFVGKKSMSIQTNVIEYAEAGKKSTASRIIMIVYFIMMAFIVLGPLLSIPLESFLYTPSRSASQVLSVRWWSDLGGTCFPALGRSLILAFFSATTACVLAFFAAGAVKLLETNNKAASFPANLIRFFAAAPVISSGIVLGLGWLILYGRNFSRSPFALVIVHGVSAMPFAFNFISEGFRSLPANTLNAAMVYGADPLSALVTTALPLSLNRVRSAWGFAAALSLGELNAVMMLGMEGWETLPLYIYRAASAYRYGTACAAGTLLILCCAACFLLSETGRNKYA

SEQ ID NO: 52743 - DNA, 978 bp, Unknown
  Obtained from environmental sample
  misc_feature (1)..(978): n is a, c, g, or t
ttgatccggcaactcttagacatcaccgatgtttacgaagctgccaaagacaaacttcttgcctatccggtagaagttggttcatataaaggcaaagtatatggtatgtcatggcaagcatgccccggcgctctgttctatcgccgcagcctcgcccaaaaatatcttggtacagatgatcccaaagtcgtacagtcatactttacagattttaacaaattccttgagacagctcagtctctcaaacaaaaatccaatggttcatgcgtagtcgtttcctcaatcggcgacctcagaaactcattcctgtcagctaggaaagattcatggttagttaacggtaaattggtaatcgatcccgctatggaacagtacatggaaattagtaaaacacttcatgacaacagatgggaaggcagagttggtcagtggtcagaaggttggtttgccggtatgaaaggcgaactcaaagatgaaaccggaaaaccggtagaagtattctcatacttcctccccacatggggtctccactatgtacttaaaaccaatgctcccggtacatcaggcgactgggcgatggttcaaggtccctcagcttatcgttggggcggcacttgggtcggcgcatacaaaggtacaaagaatgttgcggcggctaaagaatttatccgctacgtaaccacagacgacgctttccttgaagcttgggcgaaagacaccggcgacgtggtaagcaatcttaatgttatcaacaaaattaaagataactatagcgagccgtatcttggcggacagaaccactatgccgaatttgccgaaatggcgaaaggcgttaatggcagacttctccagggaagcgacgaagccattgaagccatgtttgacgaagctacagcagcttatgtaaacggcgaaaaaacaaaggctcaggctcttgctgatttcagatcacaggctgaagcgcagtttgcgaaataa

SEQ ID NO: 52744 - protein, 325 aa, Unknown
  Obtained from environmental sample
  misc_feature (1)..(325): Xaa is any amino acid
MIRQLLDITDVYEAAKDKLLAYPVEVGSYKGKVYGMSWQACPGALFYRRSLAQKYLGTDDPKVVQSYFTDFNKFLETAQSLKQKSNGSCVVVSSIGDLRNSFLSARKDSWLVNGKLVIDPAMEQYMEISKTLHDNRWEGRVGQWSEGWFAGMKGELKDETGKPVEVFSYFLPTWGLHYVLKTNAPGTSGDWAMVQGPSAYRWGGTWVGAYKGTKNVAAAKEFIRYVTTDDAFLEAWAKDTGDVVSNLNVINKIKDNYSEPYLGGQNHYAEFAEMAKGVNGRLLQGSDEAIEAMFDEATAAYVNGEKTKAQALADFRSQAEAQFAK

SEQ ID NO: 52745 - DNA, 1629 bp, Unknown
  Obtained from environmental sample
  misc_feature (1)..(1629): n is a, c, g, or t
atgaatacaatcgagcattttgaaagaattattgccctggccaaagaaaatggcttatccgatgagttcttccgggctgccggcgaacaccttgaatcggcaggagccctgctgcatacaaatcctgtcgagacagctatttttgccctgattttggaacgctttgaatcatctgtttctgttgaggagttagctgaagattttaagtgcagtaaaatgatgctgcttaagcacatggatgatttggatgccctgaggcagaagaaactgataaaaacggcgcggtcttcacgccggtatagtgaagacaaattcgaggcatatacggttcctctggatgttatgaaagccatacgaggcaacaccgagtatcaatgcagaaaatatgacaatcttagcccggatgattttttcttctatgccgaagaattgatggatgatttcgctcatggcggttttgacgaaacttttaaagatgaattgaaccttctgttttcacataacaggaacatcagttttataaaaaaaatgagggaatacgagctgctgaatgatgagagcaagctaatcatgcttgctttctgtattgccctgctaaacgacgaggaattgataaagattgacgccctgataagggatctgcgtcatgccattgacagaagacagttcaaagctggaatagacaatctcattaaaaaaaacattatcgaatatgaatgtagaaatggccttgccgataccgaatactaccgccttacgcaaaaagcgaaagacgaattccttgatgatgttgaactatataaaaaaccaaagcgtctgggcaagtattttattccggctgaaaaaataccggaaaaaaagctcttttacggggatagaataaaaaccagtataggcgaacttgcagaactgcttcgtgaggacaatttttcctgcatacaaaaacgtttggcggaaagcgggatgagaaccggttttgcctgcattttttcaggccctcctggaaccggcaagaccgaaaccgcctaccagatagcaagggaaacaggcagggacattatgcttgtggacatagccgagacaaaaagtatgtggttcggggaaagtgaaaaacgtatcaaagaggtttttaaccgttaccgggccgttgtgaataaaggcgaccttgcccccatcctcctttttaacgaggcagacgcggttctagggaaacgccgcgaacttgcggaaaaacgggaaggcccaggtcacaccgagaacgcaatacagaacataattctacaggagatggaagacttaaacgggattctcatcgccactaccaacatgacggccaaccttgacaaggcttttgagcgccgtttcctttataaaatcgaatttgaaaagccggacagtgaaacaaaaaagtttatatggcaaagcctaatacctgaaatttcaggcggggatgccttaaagctcgcggcaacattcgatttttccgggggccaaatagaaaacatcgcccgcaaaagtacggtttcctttatccttaaaggatcatctcctgacttttcctctctcgaaaaattttgcagggaagaattgatggaaaaagccgccgtaaaaataggctttggcgcttga

SEQ ID NO: 52746 - protein, 542 aa, Unknown
  Obtained from environmental sample
  DOMAIN (327)...(512): ATPase family associated with various cellular activities (AAA)
  misc_feature (1)..(542): Xaa is any amino acid
MNTIEHFERIIALAKENGLSDEFFRAAGEHLESAGALLHTNPVETAIFALILERFESSVSVEELAEDFKCSKMMLLKHMDDLDALRQKKLIKTARSSRRYSEDKFEAYTVPLDVMKAIRGNTEYQCRKYDNLSPDDFFFYAEELMDDFAHGGFDETFKDELNLLFSHNRNISFIKKMREYELLNDESKLIMLAFCIALLNDEELIKIDALIRDLRHAIDRRQFKAGIDNLIKKNIIEYECRNGLADTEYYRLTQKAKDEFLDDVELYKKPKRLGKYFIPAEKIPEKKLFYGDRIKTSIGELAELLREDNFSCIQKRLAESGMRTGFACIFSGPPGTGKTETAYQIARETGRDIMLVDIAETKSMWFGESEKRIKEVFNRYRAVVNKGDLAPILLFNEADAVLGKRRELAEKREGPGHTENAIQNIILQEMEDLNGILIATTNMTANLDKAFERRFLYKIEFEKPDSETKKFIWQSLIPEISGGDALKLAATFDFSGGQIENIARKSTVSFILKGSSPDFSSLEKFCREELMEKAAVKIGFGA

SEQ ID NO: 52747 - DNA, 1053 bp, Unknown
  Obtained from environmental sample
  misc_feature (1)..(1053): n is a, c, g, or t
ttggcgcttgaggagaagcaatttatgatatatcctgacaatatgaagtcaagaaaaaacctccccaaaccagccgttcccagaatatattttattgaccgggaaatcgctgccggaaagtaccccaacgttcccagccttgccaggaagtacgaaataagccagtccagtatcagacgggatttggattatatgaagaattcgctgggcgctcccatcgaatatgattttttcaaaaaaggcttttactataccgaaaaaaccttccacctctgcgccgcctacgctaccgccgacgacctgttggctctgggcatggctaaaaaccttcttgatttataccacgacacacccatccacgacgccgcgctaaaccttctggataatatttccgcgcctcttcaaagcgaaaaaaacgccgagtggttccgcgaccggattgtaattcccaagacagcctccgccatggtggacgaaaaggtatgggagggcattgtcggcggccttcgtgaaaaccgcgtaatcacttttcaataccgaaacgccgcccacgaaaactcaggcgacaatgacgaaccaaaactcgatacccgccgcgtccgcccctatcagctcctttttgacaggagcgactggtatctctttgcctttgatgaaaaccgtaaagatatgcggatgttcacaatcgcccgaatttacgatgttgttatcaccgaaaataaatttaccataccgcgcgattttgattaccgaagcctggaagggtcaagttatttcggcgtctactcaggcggaaaggcctatcatttcattatcgaaattaaaggcgacacccgctggatcagggagcgcatctgggccgaagatcagcggattgaaaaaattaacggaggtataaagctgtccttcaccagcaaccagtttgaaaaagtgctggaatggatacttcatctaggctccagcgcccggccacttgccccaaaaaacctgattgaacgctggacaacaaccattcaggaaatggcggttgtgtcaggggtgattaagaaatag

SEQ ID NO: 52748 - protein, 350 aa, Unknown
  Obtained from environmental sample
  misc_feature (1)..(350): Xaa is any amino acid
MALEEKQFMIYPDNMKSRKNLPKPAVPRIYFIDREIAAGKYPNVPSLARKYEISQSSIRRDLDYMKNSLGAPIEYDFFKKGFYYTEKTFHLCAAYATADDLLALGMAKNLLDLYHDTPIHDAALNLLDNISAPLQSEKNAEWFRDRIVIPKTASAMVDEKVWEGIVGGLRENRVITFQYRNAAHENSGDNDEPKLDTRRVRPYQLLFDRSDWYLFAFDENRKDMRMFTIARIYDVVITENKFTIPRDFDYRSLEGSSYFGVYSGGKAYHFIIEIKGDTRWIRERIWAEDQRIEKINGGIKLSFTSNQFEKVLEWILHLGSSARPLAPKNLIERWTTTIQEMAVVSGVIKK

SEQ ID NO: 52749 - DNA, 435 bp, Unknown
  Obtained from environmental sample
  misc_feature (1)..(435): n is a, c, g, or t
ttgccttccatgatcgagagaaacagcggccatattgttaccatatcttcagccgccggaatgatcggcgtaaagggattgtctgattactgcgccggaaaattcgccgccttcggttttgacgaagctctgcgtatggaattgcggcgcatgaaaagcgcaattaaaactacggtagtctgtcccttctttataaataccggaatgtttgacggggtaaaaacccgcttcgcgcttcttctgcctatactcaaaaaagagtatgctgtaaaaaaaatagttaaagcggtattgaaaaacaagaaacggcttatcatgccgcgttttgtgtatacagtatatttactgcggctcctgcctccggctgtaatggattggactgccaatcttttcggtataagccacgcaatggacgatttcaggggcagagaatga

SEQ ID NO: 52750 - protein, 144 aa, Unknown
  Obtained from environmental sample
  misc_feature (1)..(144): Xaa is any amino acid
MPSMIERNSGHIVTISSAAGMIGVKGLSDYCAGKFAAFGFDEALRMELRRMKSAIKTTVVCPFFINTGMFDGVKTRFALLLPILKKEYAVKKIVKAVLKNKKRLIMPRFVYTVYLLRLLPPAVMDWTANLFGISHAMDDFRGRE

SEQ ID NO: 52751 - DNA, 1593 bp, Unknown
  Obtained from environmental sample
  misc_feature (1)..(1593): n is a, c, g, or t
ttggactgccaatcttttcggtataagccacgcaatggacgatttcaggggcagagaatgacacgtaacgaaattcaagaactggtaaacaaagcccgtaaagctcaaaacatttgggcggagctttcgtataacgaaagagcgaggcgcataaaaaaagccggacattgccttgctgaaaaacgtgatgaggttacggaaataatccaccgcgaaaacggcaagctgaaaattgacgctctagcggcggaggttattccggcgctcatggcaattccctactatatcaaacaagggcggcgtctgtgcaagtcgcaaaaaataagcggcggcaatatccttatggtttataaacaaagccgcatggtttataaaccctggggagtagtgggaatcatctctccatggaactatcccttttcaattcctttctccgaagttatcatggcgcttcttgcaggtaacgccgttatcttaaaaacagcgtcccttactccaggctcaggccgcataattgcggaaatactcaaggcggcgaatcttcctgacgggctttttgtaaatgttgaactggcggggagtgaagcaggtcccgcttttgtcaacggaggaatagacaaactgtttttcacaggctctaccgctgtaggcaaggaactgatgactcttgccgcccaaaggcttctccccctcacccttgaacttggaggcgctgatgccgcgataatccgcaaagatgccgatattgaccgcgctgtagcgggagttatctgggcaggtttttcaaatgcggggcaatcctgcggcggagtccagcgcgttctggttcaccgcgacattcacgacaaattcctggaaaagttaaaaacaaaggtggaagcccttcaatcgggaaataacgtttccagcgatctagggccgcttattgccaaaaagcaaaaggaaaaagtccgcaagcaggtagaggaatgtctttcgcagggagcgaagattgccgctcaaagccccgttttcaaactttctgacggaagcgccgcangttctctcaatgatgaaagcacatttgttcctgtaattgttttaaccggagtgaaaaaaggaatgcccgttattgacgatgaagtcttcggtcccgttgtcgccgtgattccttttgataatgacagcgaagctttaagcattgcaaatgattctccctatgcgctgacagcatccgtctggtcaaaaaaccggaggcaggctaaaaaacttgcggctaacatcaacgccggttcaataatgataaatgatcatctgatgtcgcacggtctggcggaaacgccgtggggaggcttcggcgattcaggacttggaagaacgcacggcgaaaacggattccgcgaaatgctcaaggtaaaggtggttatagacgatgtactgccgggcgcaagacgcgaaccctggtggcagccttattcgcaaaaagtttacaaaggacttgccgctcttggagccttgctcggagaacgcagtctgttcaagaaaataggagcgcttcccgctatcgttggttttttcatggcggcatggaagaaagacggtataaaaaagtaa

SEQ ID NO: 52752 - protein, 530 aa, Unknown
  Obtained from environmental sample
  DOMAIN (8)...(468): Aldehyde dehydrogenase family
  misc_feature (1)..(530): Xaa is any amino acid
MDCQSFRYKPRNGRFQGQRMTRNEIQELVNKARKAQNIWAELSYNERARRIKKAGHCLAEKRDEVTEIIHRENGKLKIDALAAEVIPALMAIPYYIKQGRRLCKSQKISGGNILMVYKQSRMVYKPWGVVGIISPWNYPFSIPFSEVIMALLAGNAVILKTASLTPGSGRIIAEILKAANLPDGLFVNVELAGSEAGPAFVNGGIDKLFFTGSTAVGKELMTLAAQRLLPLTLELGGADAAIIRKDADIDRAVAGVIWAGFSNAGQSCGGVQRVLVHRDIHDKFLEKLKTKVEALQSGNNVSSDLGPLIAKKQKEKVRKQVEECLSQGAKIAAQSPVFKLSDGSAAXSLNDESTFVPVIVLTGVKKGMPVIDDEVFGPVVAVIPFDNDSEALSIANDSPYALTASVWSKNRRQAKKLAANINAGSIMINDHLMSHGLAETPWGGFGDSGLGRTHGENGFREMLKVKVVIDDVLPGARREPWWQPYSQKVYKGLAALGALLGERSLFKKIGALPAIVGFFMAAWKKDGIKK

SEQ ID NO: 52753 - DNA, 609 bp, Unknown
  Obtained from environmental sample
  misc_feature (1)..(609): n is a, c, g, or t
atggggcaagactcttttggttgtaacccacgacgagaaactggccgccagggccgagcgctgttatacgctggcaggcggcctgttaaacgcaaccgaaaaggcggacgcatgaagatccgttcgtcttttttcatagcgatacgctaccttctggggcgggctcatgagggaggacgttatttgcgcggagccgccgcggggatcgccgtcagccttataccgatcattgtcaccctcattgtcgccgacggcatgatcaggggcatcatcgaccgttacatggaactggggacaggccatatgcaggtttttcaactttatcgatttccggcatgcttgaagaagctgtcggcaaaatcgcggaagttggcggcgttaaaggcgcgtgggtcgaacagcggggcatgggggtgctggtgggcaaaaaggggaggaccggcgcgagcatacgcgccatcgatccttcgttctggaaagaccccggcagcctcggctacctggaagttatctccggcggcgccgcgcccgaaacggagcgcggcatgctgctcggcaaaaaccttgccgattccatcggcgcggaaaccggcgacaccgtgcggctga

SEQ ID NO: 52754 - protein, 202 aa, Unknown
  Obtained from environmental sample
  misc_feature (1)..(202): Xaa is any amino acid
MGQDSFGCNPRRETGRQGRALLYAGRRPVKRNRKGGRMKIRSSFFIAIRYLLGRAHEGGRYLRGAAAGIAVSLIPIIVTLIVADGMIRGIIDRYMELGTGHMQVFQLYRFPACLKKLSAKSRKLAALKARGSNSGAWGCWWAKRGGPARAYAPSILRSGKTPAASATWKLSPAAPRPKRSAACCSAKTLPIPSARKPATPCG

SEQ ID NO: 52755 - DNA, 372 bp, Unknown
  Obtained from environmental sample
  misc_feature (1)..(372): n is a, c, g, or t
atgcttcccgcctacatcgcgggtatgaataaaaagaaagccatggaaagggcaagggaactgcttgccgacctcatgcttgccgaccgcgcaggacattttccgtcgcagctttcaggcggcgagaggcagcgggttgccgtcgcccgctccatggtcaacgatcccgaccttatcctcgccgacgagccgaccgggaacctggatccggacaacagcgccgttgtagctgaactgctctataggggcgcggaaaaatggggcaagactcttttggttgtaacccacgacgagaaactggccgccagggccgagcgctgttatacgctggcaggcggcctgttaaacgcaaccgaaaaggcggacgcatga

SEQ ID NO: 52756 - protein, 123 aa, Unknown
  Obtained from environmental sample
  DOMAIN (3)...(113): ABC transporter
  misc_feature (1)..(123): Xaa is any amino acid
MLPAYIAGMNKKKAMERARELLADLMLADRAGHFPSQLSGGERQRVAVARSMVNDPDLILADEPTGNLDPDNSAVVAELLYRGAEKWGKTLLVVTHDEKLAARAERCYTLAGGLLNATEKADA

SEQ ID NO: 52757 - DNA, 1623 bp, Unknown
  Obtained from environmental sample
  misc_feature (1)..(1623): n is a, c, g, or t
atgatgggtacgcagcgcgcgaattttatccgcatgggggaaactgacagtcaatacgcggaaattggcagcgtggtaaaactggcgacgctgggcaatataggcataggctatttctcgatctccggcatcccgcgaatgtgcgcgtacaggcccataagcggctcaaaagaaggctggttccttgggataatagcgccgcttccggaaagccccgtaaaaaatcttgacagagggtttttagcggttgggcttatcgcgtttatattcagccttctgggggcaattatagcctcttattttataaaaaaaccttttgaagaaaccgccaagttaaaagaagaagcggaggcccatttaagatccaaaaccgatttccttgccaacatgagccatgaaatccgcacgccgcttaatgtgataatcggtcttacggatttggtgctggaagacgacactctcgacaaaacagttaccgaaaacctgacaaaaatcaacagcgcgggcgacacgcttttaagcatagtaaacgatattctggacttctccaaaattgagtcgggcaagctgacaatatcgcctgttgaatattatttgtccagcgtgttaaacgatgttgttaccctggttattacccgtctcggagaaaaaccgataatattcagccttaatatccccgatgaattgcccgccaaattgttaggcgatgatctgcgggttaaacagatattaacaaatctgctcagcaattccatcaaatacacgcacaggggaagcattgaattaaaagtaaactgtacgcgcgaaggcaatattgtatggatgtatattacagtcacagacacaggcataggcatacacgaggaagaccttaaaaaactgttccttgattatttccaggccgacgccaaagccaaccgcaatattgagggtacggggcttggactgcctattaccaaaagacttgcggagatgatggacggggaaatctccgcggaaagcgaatacggcaaaggcacgaccttccgcctgcgtatcaagcagggctatgttgaggatacgcccctcggagcggagacagcggaaaaactgcgcagtttccgttacatcgacgacaagcgtaccgccgccaaaaggctggtgcggctcaacttaagctatgccaaagtgctggtggtagacgacatgcaaaccaacctggacgtggcggcgggacttttgcgcatatacaacatgcaggtcgattgtttaagcagcggggaagaagctgtaaacaggatatacagcgaaaatcccgtttacgacgcgatattcatggatcacatgatgccgggaatggacggcattgaaaccacggacaagatccgcgcgctgggcagggaatacgcgaaaaaaatacccattatcgctctgaccgccaacgcgatacacggaacggaacagatgttttatgaacacggtttccaggcgtttataaccaaacccatcgacataatggaactggataccgttataaggaaatggatacgcaacgaagaaaaggagaaagaactgggaaccaacgcgtttataactcctgatgtttctcccgaagatgaaaaaaacngcgaaccctggaaatag

SEQ ID NO: 52758 - protein, 540 aa, Unknown
  Obtained from environmental sample
  DOMAIN (122)...(188): His Kinase A (phosphoacceptor) domain
  misc_feature (1)..(540): Xaa is any amino acid
MMGTQRANFIRMGETDSQYAEIGSVVKLATLGNIGIGYFSISGIPRMCAYRPISGSKEGWFLGIIAPLPESPVKNLDRGFLAVGLIAFIFSLLGAIIASYFIKKPFEETAKLKEEAEAHLRSKTDFLANMSHEIRTPLNVIIGLTDLVLEDDTLDKTVTENLTKINSAGDTLLSIVNDILDFSKIESGKLTISPVEYYLSSVLNDVVTLVITRLGEKPIIFSLNIPDELPAKLLGDDLRVKQILTNLLSNSIKYTHRGSIELKVNCTREGNIVWMYITVTDTGIGIHEEDLKKLFLDYFQADAKANRNIEGTGLGLPITKRLAEMMDGEISAESEYGKGTTFRLRIKQGYVEDTPLGAETAEKLRSFRYIDDKRTAAKRLVRLNLSYAKVLVVDDMQTNLDVAAGLLRIYNMQVDCLSSGEEAVNRIYSENPVYDAIFMDHMMPGMDGIETTDKIRALGREYAKKIPIIALTANAIHGTEQMFYEHGFQAFITKPIDIMELDTVIRKWIRNEEKEKELGTNAFITPDVSPEDEKNXEPWK

SEQ ID NO: 52759 - DNA, 1128 bp, Unknown
  Obtained from environmental sample
  misc_feature (1)..(1128): n is a, c, g, or t
atgacagctaacattaattcggtgacaagaacattaatagaaaacagcaagaatgtcagcgatttggcgaaagcgtcagaaattggcaagacggggcttcaaactgtggcgcaggaaatagagggaatcgcccgggattccgaagggcttttggaaattaacgcggtaatggacaatatcgcgggacagaccaatttattaagcatgaatgcggccattgaagcggctcacgcgggagaagccggcaaaggttttgcggtagtcgcggacgaaatacgcaaactggcggaatcatcaagcgagcagtcaaaaacaactgcgggaatgttaaaaaagataaagtcttctattgatagtattaccgcgtcttccaacgaagttcttgcccgttttgaagccatagattcgggagtaagaacagtatctgaacatgaagaaattatccgtaacgcgatggaagaacaggaagcgggcggaaaacaaatactggacgcggtaggacgccttaaagatattaccgttgaggttcatagaggtgccgaagaaatggcaagctccggcgatgaaatgatcaaaaggacccataattttattaaggtaagncaacaggtagtcgaaggcatgaaccaaatggcggatgtagacgtaaaagaaataaagaccgcgattcaccatgttgatgaaatgagcgcggaaaacaataagaatttcaacgatcttaaaagtgaaacggaaaaattcaagattgaaaccggtaaagaaaaaaagaaagtgctggtaatagatgataatacaacggatcttgtaacggctaaaagtatgctgcaaaatgattatgatgttgttactgccgattcgggaaacgccgctttaaaattgttccataccggctttgttccaaacgccattttacttgatcttataatgccgggcatgagcggttgggataccttccagagaataaaaaagatcggctctgttcacaatgtcgccataatcatttattcagcgtcttcggatcccgatgacaatgaacgcgccaggaaaatgggggcggtagattttgtcaagaagcccgctgtcatggatgggttattgagtgttatcagaagggcaatagggaaataa

SEQ ID NO: 52760 - protein, 375 aa, Unknown
  Obtained from environmental sample
  DOMAIN (1)...(250): Methyl-accepting chemotaxis protein (MCP) signaling domain
  misc_feature (1)..(375): Xaa is any amino acid
MTANINSVTRTLIENSKNVSDLAKASEIGKTGLQTVAQEIEGIARDSEGLLEINAVMDNIAGQTNLLSMNAAIEAAHAGEAGKGFAVVADEIRKLAESSSEQSKTTAGMLKKIKSSIDSITASSNEVLARFEAIDSGVRTVSEHEEIIRNAMEEQEAGGKQILDAVGRLKDITVEVHRGAEEMASSGDEMIKRTHNFIKVXQQVVEGMNQMADVDVKEIKTAIHHVDEMSAENNKNFNDLKSETEKFKIETGKEKKKVLVIDDNTTDLVTAKSMLQNDYDVVTADSGNAALKLFHTGFVPNAILLDLIMPGMSGWDTFQRIKKIGSVHNVAIIIYSASSDPDDNERARKMGAVDFVKKPAVMDGLLSVIRRAIGK

SEQ ID NO: 52761 - DNA, 792 bp, Unknown
  Obtained from environmental sample
  misc_feature (1)..(792): n is a, c, g, or t
atgcagtcagtgcctatcttagaaaaccctgacttttgggcgctgacccagggcaatgtgtacatctggctcatggtgctgacaagattgtcgggcctcatgatcaccctgccccccctcaaccaagagcgcattccgcgcacggtcagggtcgccatggtcgggctgatgacagtagttatagccccagtggtcccactgccaaaaatggcccctcatggcgcatggacgcttgcgggattcatggcntgcgaactgtttgtgggcctcatnttaggcacagtcgtaacttggctgatcgagatggtcggcgtggccgggcaattgctggacatgcagatgggtttcgccttcgcgcagatggttgaccccgcaacatcccagcagtcggcattttctggcaccatcctcactcaggtgaccctgctgttcattgtcgtgtctggcctgcaccacaaaatgatcctggccctcgtcgagagctaccgcatactgcctatgggccaagggccgccgataaggccgctggagctcatcacgctctttggctcccttttggccaaagggctacagcttgccatgccggtgctagtcgtcctcatgtgcataaacgtcctggaagcattcgccgcaaagttcatgccccagcttcagttgatccagttgtcattcccgctgaagatttccatcgggctgttcgtctttggctacatgctgcaagaatttagcagttggcttcagccattgctggtaatcatgcccgaatgggcccttaagctgttggggggatag

SEQ ID NO: 52762 - protein, 263 aa, Unknown
  Obtained from environmental sample
  DOMAIN (16)...(254): Bacterial export proteins, family 1
  misc_feature (1)..(263): Xaa is any amino acid
MQSVPILENPDFWALTQGNVYIWLMVLTRLSGLMITLPPLNQERIPRTVRVAMVGLMTVVIAPVVPLPKMAPHGAWTLAGFMACELFVGLXLGTVVTWLIEMVGVAGQLLDMQMGFAFAQMVDPATSQQSAFSGTILTQVTLLFIVVSGLHHKMILALVESYRILPMGQGPPIRPLELITLFGSLLAKGLQLAMPVLVVLMCINVLEAFAAKFMPQLQLIQLSFPLKISIGLFVFGYMLQEFSSWLQPLLVIMPEWALKLLGG

SEQ ID NO: 52763 - DNA, 864 bp, Unknown
  Obtained from environmental sample
  misc_feature (1)..(864): n is a, c, g, or t
atgcagggaacagtgaagaaaaatctgttttttatgttgtgctttttatttatttttataccagtggtggtacaggcgcaggagcaaaatgctcccgctccttttccttttaacccggcggaggggacaacggccctgcccacgccgccgccgccgccgatcattccctttatcgatcttaccgtgcgaaatccggagtcagggaatgaagtggcgttctcccttcaattgctgttactgctcaccgtgctgtctctcgcgcccagcatcatcatacttatgacgagttttctccgtatttccatagtgctggactttatcaaacgggcgctctcgctgcagcaggttcccccgaaccaggtaatcatgggggtgtcgctgtttctgacgattcttataatgtggcctactttctcggcaattaacgaaagagccctgcggcccctctccgacgggcaaattaacgtggaaacagcctaccgcgaagcggaagcccctttaaggcttttcatgttcaggcagttgagaaaccgggacgggggactaagcggcggggagagaaatattttgctgtttatgaatatgcgcgggttggacaggcccaataatctggcggatatacctacctatgtgctgatccccgcgtttatactgaacgagttaacggtggcgttcaaaatcggaatactgctctttattccctttatcgttattgacatggtcgtggcgagcgcgctcatgtcgatgggcatgatcatgcttccgccggtaatgatctcaatgccgttcaaattgatcctgttcattcttgttgacggctggtatttaatcatcggctctctcgtgaaagggtactacggatga

SEQ ID NO: 52764 - protein, 287 aa, Unknown
  Obtained from environmental sample
  SIGNAL (1)...(26)
  DOMAIN (80)...(282): FliP family
  misc_feature (1)..(287): Xaa is any amino acid
MQGTVKKNLFFMLCFLFIFIPVVVQAQEQNAPAPFPFNPAEGTTALPTPPPPPIIPFIDLTVRNPESGNEVAFSLQLLLLLTVLSLAPSIIILMTSFLRISIVLDFIKRALSLQQVPPNQVIMGVSLFLTILIMWPTFSAINERALRPLSDGQINVETAYREAEAPLRLFMFRQLRNRDGGLSGGERNILLFMNMRGLDRPNNLADIPTYVLIPAFILNELTVAFKIGILLFIPFIVIDMVVASALMSMGMIMLPPVMISMPFKLILFILVDGWYLIIGSLVKGYYG

SEQ ID NO: 52765 - DNA, 414 bp, Unknown
  Obtained from environmental sample
  misc_feature (1)..(414): n is a, c, g, or t
gtgcttcttacccttgccgtggtcgcggcggcaatttacggattggtctattttcttaaattcaggcgggcttcacgcgccggggtggaacaggatcccttcctcaagattctcgcaagcgccacgctgggggcaagccgcggtgtctatgtagtctctgtagggccgcaggcatggcttgtgggttccaccgaaagcgggattaaccttataagcgaaatcaatgacaaggacacaataaacgcgatgctccttgaagattcaaagagaatcgcaatgccggcagcaggcggcctggccgggtctgggcttgattttaaggctatattgggaaagctgggaatttctgtaaagccagaaaattccggcccggatcaaatacgcaagcgcagcgaaaggcttaagggactgtga

SEQ ID NO: 52766 - protein, 137 aa, Unknown
  Obtained from environmental sample
  misc_feature (1)..(137): Xaa is any amino acid
MLLTLAVVAAAIYGLVYFLKFRRASRAGVEQDPFLKILASATLGASRGVYVVSVGPQAWLVGSTESGINLISEINDKDTINAMLLEDSKRIAMPAAGGLAGSGLDFKAILGKLGISVKPENSGPDQIRKRSERLKGL

SEQ ID NO: 52767 - DNA, 576 bp, Unknown
  Obtained from environmental sample
  misc_feature (1)..(576): n is a, c, g, or t
ttgctatttgttatgttgactttattttcattatatgttaacctatccttcatgctggttaacagaagcaaaaaagacgttccaaagctctctacaaaggcaagactccttatggcgctgcgcgaacaggcgggaaaagcgctaagcggcggcaaattagcttcggattttgggatttcacgggttggggtttggaaaggaatacaatcactaattaacgcgggttacctcataaaaactaacgactcgggttatattctggacactgccggaacaaatgactttctttatccctgggagtttggtgagaaagagccgatgtttcgtttttttgaaagtacggccagtaccatggacaatgtacgggatttcgcgtttcagggccttgccgccgggatagtggctgtcgccgacacgcaaagcgcgggcaggggacgcaacggcagaacatgggcttcacggcaggggggcctgtattgcagcttcctggacaggccggcaatatcgattggcgattattgcatgccgccgatgttgtaccagatagccgttgccagggctgtaagcggtaggtga

SEQ ID NO: 52768 - protein, 191 aa, Unknown
  Obtained from environmental sample
  DOMAIN (33)...(86): HTH domain
  misc_feature (1)..(191): Xaa is any amino acid
MLFVMLTLFSLYVNLSFMLVNRSKKDVPKLSTKARLLMALREQAGKALSGGKLASDFGISRVGVWKGIQSLINAGYLIKTNDSGYILDTAGTNDFLYPWEFGEKEPMFRFFESTASTMDNVRDFAFQGLAAGIVAVADTQSAGRGRNGRTWASRQGGLYCSFLDRPAISIGDYCMPPMLYQIAVARAVSGR

SEQ ID NO: 52769 - DNA, 894 bp, Unknown
  Obtained from environmental sample
  misc_feature (1)..(894): n is a, c, g, or t
atgatgcctcttcctaaccgccatcttacgtctgtactgcttaggcgggaaggcgagctttttctgtttgactcaggcgagggaacccaggttgccctgcggaaactcaatttgcgctggaaaaaaatctcggtcatttttgttagccatacccacgccgaccatgtcaccggcattccgggtcttttgatgctctcatcccaggtggacagggacgatcctctgtacataatcggcccgccaaggatagcagagtacatcgagagcaaccgccgtgtgttggatatgtatatcaattacgaaattatagtaaaagaggtgactgaaccaggcgtagtgtaccagggtgacggcttccatatacgcagcttcccactgaggcacacaaagccctgttttggctacaccctggaggaatacctgcgcccgggcgaattccaccctgataaggccgaagcgctgggggtgccgcgaggccccctttggtcaaaactgcaaggcggcgaaactgtaaaatccacagatggccgtgacgtgcgtcctcaggaagttctgggtcagccccgtctgggcaggaaattttcctttgttacggacagcctggccttcccggaaatagcgcccgaggttgccggctccgatctctttgtctgcgagggaatgtttgaacaagcgcttgccgaagacgcacatgaaaaaaaacacatgactgccgttgaagccgcccaaatagcgacaatgtcaagcggtataaaaaagctggcgctcatccactacagcccccgctatacagagttcgacctgaaacagcttctcaaggaagcccaaggggtattccccgacaccgtgctttcaaaagacaaggccgtgttcccgattgaatatatagattag

SEQ ID NO: 52770 - protein, 297 aa, Unknown
  Obtained from environmental sample
  DOMAIN (8)...(168): Metallo-beta-lactamase superfamily
  misc_feature (1)..(297): Xaa is any amino acid
MMPLPNRHLTSVLLRREGELFLFDSGEGTQVALRKLNLRWKKISVIFVSHTHADHVTGIPGLLMLSSQVDRDDPLYIIGPPRIAEYIESNRRVLDMYINYEIIVKEVTEPGVVYQGDGFHIRSFPLRHTKPCFGYTLEEYLRPGEFHPDKAEALGVPRGPLWSKLQGGETVKSTDGRDVRPQEVLGQPRLGRKFSFVTDSLAFPEIAPEVAGSDLFVCEGMFEQALAEDAHEKKHMTAVEAAQIATMSSGIKKLALIHYSPRYTEFDLKQLLKEAQGVFPDTVLSKDKAVFPIEYID

SEQ ID NO: 52771 - DNA, 750 bp, Unknown
  Obtained from environmental sample
  misc_feature (1)..(750): n is a, c, g, or t
gtgatagaacccgagcgggaatacaattggctgaacataagctccctgaacggaacggtcgagtctcttgaagaaataatcctgcgctgtaacaggcagggcctcacggatgaaatacaaaacgccaggctgttaatcaaagacgaagaaactgtcgtcgctgtagaaataaaagctaaaaacccgattacaaaaaatctgcctcccaggactttcctcgaaaacaacggagtaattgttatagaagcgaaccgtttttgcgaaaaaaaggacgcggcttccgccggttttattgagttgaaaaactacggcagaagcggagttggaatgaaagtatatcccacaaccgcctgctttaccgaacatgacgatatacccgcccttaaatatcgtttcttaattgaggaaacgggcaagtatacggcggaagtatggactactccgacaaatcccatacaaaacaaacgccccctgcgttttcgttttgaaagttcccggacaagtcagattattaccgcagtccccgatgattttatggcgggaagcccttcggacaaaagatggtgcgacggagtccttaaccagatccgcgttaataaaattccgttaactcttgaaaagggagtgcgggaaatttcaatcggcgcgctggaagccgccctggtgcttgaaaaagtgctgatctacaaagagggcagggaaccgcttagctcatatctgggaccgcctgcttcagagcaatgtccctaa

SEQ ID NO: 52772 - protein, 249 aa, Unknown
  Obtained from environmental sample
  misc_feature (1)..(249): Xaa is any amino acid
MIEPEREYNWLNISSLNGTVESLEEIILRCNRQGLTDEIQNARLLIKDEETVVAVEIKAKNPITKNLPPRTFLENNGVIVIEANRFCEKKDAASAGFIELKNYGRSGVGMKVYPTTACFTEHDDIPALKYRFLIEETGKYTAEVWTTPTNPIQNKRPLRFRFESSRTSQIITAVPDDFMAGSPSDKRWCDGVLNQIRVNKIPLTLEKGVREISIGALEAALVLEKVLIYKEGREPLSSYLGPPASEQCP

SEQ ID NO: 52773 - DNA, 912 bp, Unknown
  Obtained from environmental sample
  misc_feature (1)..(912): n is a, c, g, or t
atggataatatgctggaatactacgggctatccgaaaagaggcaaatcgttagggattggtacaacggctacctatttgggaatacggaggtgtataatccgtggagttccgtgtttgtggtagataattggcttgcggacataaatgaacttccaaagccatattgggcgaacaccagcggcaacagcattgttcgtgacctgatagaccgagcgaccgtcgaaatgaaaaccgacatcgaaacactgatgaccggtgggacgatctcaacgattgttcgtgaggacatcacatataaagagataggcgataatgttgaaaacctttggaattttttgttctttaccggttatttgaaaaaagtggggaataaacgtatggttggggtacagacatttttggatttgtctatcccgaacttagaattactgtatatctatgaaacccaaatacaagaatggttcaacaaacaaataaccataaagagcctcgacatcctaagcgccattttggacggggacaccgagacgttccaacgtgaactgtcgacgcttctttcggagagcataagttacatggataacgccgagaactcttaccacggatttatggtcggggtacttggtgtgttgtcacggttgaacggctatatggtggtatccaaccgagagagcggggacgggcgtagcgatatggtcttgtaccgtataaacggaaacgagagccgggcggttatatttgagtttaaggtggccaaagaatttgacaagttgcccatagcgtgtgaaaccgccctgaaacagatagaagacaagaattacgccgccgcatgggacaaagagggctataaaaacattatcaaatacggcataggtttctacggtaaacgatgtgaggttaaaaaaggatga

SEQ ID NO: 52774 - protein, 303 aa, Unknown
  Obtained from environmental sample
  DOMAIN (1)...(303): Protein of unknown function (DUF1703)
  misc_feature (1)..(303): Xaa is any amino acid
MDNMLEYYGLSEKRQIVRDWYNGYLFGNTEVYNPWSSVFVVDNWLADINELPKPYWANTSGNSIVRDLIDRATVEMKTDIETLMTGGTISTIVREDITYKEIGDNVENLWNFLFFTGYLKKVGNKRMVGVQTFLDLSIPNLELLYIYETQIQEWFNKQITIKSLDILSAILDGDTETFQRELSTLLSESISYMDNAENSYHGFMVGVLGVLSRLNGYMVVSNRESGDGRSDMVLYRINGNESRAVIFEFKVAKEFDKLPIACETALKQIEDKNYAAAWDKEGYKNIIKYGIGFYGKRCEVKKG

SEQ ID NO: 52775 - DNA, 849 bp, Unknown
  Obtained from environmental sample
  misc_feature (1)..(849): n is a, c, g, or t
ttgatcagatcggccgagaacaagcgatattgcaagtgttttctggtttcacaaatacttgcaatttttgcaagtgttttctggtatcaacaaatacttgcatttttaccaaatatctgttattatcaggacaggagcgtttttgcaatgaataaactgaataaacgtaaaaaatatctggcccagcttgccatgtggcgggaagaaaaaatgataaaggtcattaccggtatccgcaggtgcggcaagtcgacgctgtttgaattgtatatcgaacaactaaaggccgacggcgtgtctgacgatcagattgtcttggtcaatttggaagatgaagattattctgatcttctggattataagaagctgcacgaatatataaagtcccgtatcctgaaagacaaatggatgtatatttttattgacgaaatccaaaactgcaataattatgaaaaggcggtttccagtctttacctcaaaaaaaaccttgatatatacctcaccggatcaaacgcctatattctctcaggcgaacttgctaccaaactcaccgcccgttacattgaaattgatatacttccgttttcttttgaggaatacagtgaagcggtgaaaacccccgacaagcgggaacggttcagccagtatatgaacaggggcgcgttcccttatgcaacccgctttacggacaattcgctggcgcacaaccagtatttggaagggatttacaataccgtcctggttaaggatgttatgacaaataagaatttgaaagatataacactgcttaaatcaatagcggcttttttggccagcaatgtgggaagtccggtttccgcgaagaaatag

SEQ ID NO: 52776 - protein, 282 aa, Unknown
  Obtained from environmental sample
  misc_feature (1)..(282): Xaa is any amino acid
MIRSAENKRYCKCFLVSQILAIFASVFWYQQILAFLPNICYYQDRSVFAMNKLNKRKKYLAQLAMWREEKMIKVITGIRRCGKSTLFELYIEQLKADGVSDDQIVLVNLEDEDYSDLLDYKKLHEYIKSRILKDKWMYIFIDEIQNCNNYEKAVSSLYLKKNLDIYLTGSNAYILSGELATKLTARYIEIDILPFSFEEYSEAVKTPDKRERFSQYMNRGAFPYATRFTDNSLAHNQYLEGIYNTVLVKDVMTNKNLKDITLLKSIAAFLASNVGSPVSAKK

SEQ ID NO: 52777 - DNA, 477 bp, Unknown
  Obtained from environmental sample
  misc_feature (1)..(477): n is a, c, g, or t
ttgatacttatttggaagcgctctgtgacgcatactcttttctataaagtcaaccggtatgacattaaagggaagatgcacctcaaatccgaaagcaagtattatatttgcgacacgggcctgcgaaacatgatattgggaacaacaaacaaggatatcggacaccagatagaaaatatcgtttttttggagcttttaaggcgcgggtataccatcaatatcggtaaatcaggacggggtacggaggttgattttgtcgccgtccgtgacaagaaaactgagtattatcaggtttccgcatcggtgttggacgaaaacacattgaaacgggaacttgcgccgtttaaggaaattaaggacaactacccgaaataccttatcacattggacgattttacaggcgataatgagggcatacagcaggtcaatttgattgactggcttttagcaaaaaaagcgtcaaagattataacataa

SEQ ID NO: 52778 - protein, 158 aa, Unknown
  Obtained from environmental sample
  misc_feature (1)..(158): Xaa is any amino acid
MILIWKRSVTHTLFYKVNRYDIKGKMHLKSESKYYICDTGLRNMILGTTNKDIGHQIENIVFLELLRRGYTINIGKSGRGTEVDFVAVRDKKTEYYQVSASVLDENTLKRELAPFKEIKDNYPKYLITLDDFTGDNEGIQQVNLIDWLLAKKASKIIT

SEQ ID NO: 52779 - DNA, 1062 bp, Unknown
  Obtained from environmental sample
  misc_feature (1)..(1062): n is a, c, g, or t
atggaagaagacgcggaaaagctggtgcatgacgctaacggcgctggcaccttcatggatttcaaccgctgcggagtgccgcttctggaaatcgtttcacaacccgacttccgcagcgccgtcgaggtaatcgcctatcttgaaaaattgcgcgagacgctgttgtaccttgatatatgcgactgcaaaatgcaggaaggctctatccgcgccgacatcaatctgtccgtacggccttttggcggcgagcttggagtgcgcaccgaaacaaagaacatgaactctttcaaggctattgcccgcgccattgaatatgaaactgagcgtcagattgaaatactggaagacggcggacagattgtgcaggagacgcggcgctgggacgatgaaaaacttgaatcctatggaatgcgttcaaaggaaaacgcgcaggactaccgctactttcccgagcctgatcttctgccgatggagatcgacgacgcctggctcgcgagcgtcaaggcaaacctgcctgaactggcgcatcaaaaacgggaacgctactgccgcgatcttaagatacccgaatccgaagctgttgttcttaccgttcacaaaaatatctgtgacatattcgagactatagcgcaaaaaagcggccaacccgttgaggcggcacacctcttaaccggtgagattatgcggcttatgaacaatgccaatattctgcctgaagatctgtctgtaaacgccgataaactttcaacgcttattactcttgtcgttggcggaaaaatcaaccgaagcgcgtacaaagaaaccgttgaggcggtattcacgcgcgatgctgatcccaatcaatatatcgccgaaaaaggcttgatgatgatcaacgacgacaacgccgtcatcgaagccgtaaaagcggttataacagaaaaccgggactcggtcgcggattacaaggcgggcaaggaaaaagtgttcggattcctgatggggcaggttatgaagaaactgggcgggaaggggaatcccgacatggcgaagaagatattaacagaggcgcttaacaaatag

SEQ ID NO: 52780 - protein, 353 aa, Unknown
  Obtained from environmental sample
  DOMAIN (1)...(117): PET112 family, N terminal region
  misc_feature (1)..(353): Xaa is any amino acid
MEEDAEKLVHDANGAGTFMDFNRCGVPLLEIVSQPDFRSAVEVIAYLEKLRETLLYLDICDCKMQEGSIRADINLSVRPFGGELGVRTETKNMNSFKAIARAIEYETERQIEILEDGGQIVQETRRWDDEKLESYGMRSKENAQDYRYFPEPDLLPMEIDDAWLASVKANLPELAHQKRERYCRDLKIPESEAVVLTVHKNICDIFETIAQKSGQPVEAAHLLTGEIMRLMNNANILPEDLSVNADKLSTLITLVVGGKINRSAYKETVEAVFTRDADPNQYIAEKGLMMINDDNAVIEAVKAVITENRDSVADYKAGKEKVFGFLMGQVMKKLGGKGNPDMAKKILTEALNK

SEQ ID NO: 52781 - DNA, 1545 bp, Unknown
  Obtained from environmental sample
  misc_feature (1)..(1545): n is a, c, g, or t
ttgatagaaattctggattcgggagggggaaccgcacagtttatggaaaccgagaccgcgttattcgcaaaatattttgaaacagccgagcgcgtcgacacgataaaatgcacaggcaagatatgtaaagtccagggcctccttgtcgaaagcaaaggcccgcaggcaatcatcggcgaaatatgcaaaattgaagtccccaaaggcaaaggaacggtttatgccgaagtggtcgggcttagaaacgaaatcgttcaattgatggttttcgaggaaaccgacgggcttgaagtggggaaccgcgtcattgcccagggcagccgtcttgaagtccctgtgtcgaagcgacttcttggccgggtgctgaacgccatgggccagcctatcgacgacaagggcgatattgattcctccgtaaagtaccccgcgctcgccagcccccccgatccccttaaacgccggcggataagcgagcgaatcgttacaggcgtgcgggcgattgacggccttttggccgtaggcaaaggccagcgtcttggcatatttgccggttcaggcgttggaaaatcgaccctgctaggcatgatagccagaaacaccagcgccgacgtaaacgtaatcgcgctgataggcgagcgcggccgcgaggtaaatgattttatagaaaacgaccttggtcccgaggggctcgcccgcagcgtggttgtggtgaccccctcaaactcgccgccccttgccagactgcgcggggcctatgtggcgaccgccgtcgccgaattcttccgcgaccagggccttgacgttatgctgctctttgactcggtgacccgtttcgcccgcgccatacgcgagataggccttgcctcaggcgagccgtccgccaccaggggttatacgccgagcatgttcgattcaatgcccaagctgctggaaaggtcgggcacttcggatgcgggcagcatcacgggtttttatacgatccttgttgacgcggatgacatggacgagccggtgtcggatacggtacgcggtattcttgacgggcacatcaccctttcccgccgccttgcccaggcctaccattatcccgcgattgacatactgcaaagcatttcccgtcttgcccccacggtgtccgggacttcggtcaccaaagccgccggcgttatacgccggagcatggccgtgtacgccgaggctgaggaactgattaacgtgggcgcgtaccgcgccggttccaacccggccattgacgaggctatcgcgaagcaccagcccatcgaggaattcctgatccaggaagttacggatcgttcttcgcttgaggatacatatttggggttggaacagctctccggcattcccatacctgttgaggaagtaccgggccaggagatacaatcaacggggaaagattccaaaatcaaaatcccggtaggcggaactgagcttggcaaggcggcgaattggcagaacaacagcgtcgcgtcgcttttcgcgagccgcatgagttccgaaggcgattctgaaagtgaaacggtttaa

SEQ ID NO: 52782 - protein, 514 aa, Unknown
  Obtained from environmental sample
  DOMAIN (41)...(106): ATP synthase alpha/beta family, beta-barrel domain
  misc_feature (1)..(514): Xaa is any amino acid
MIEILDSGGGTAQFMETETALFAKYFETAERVDTIKCTGKICKVQGLLVESKGPQAIIGEICKIEVPKGKGTVYAEVVGLRNEIVQLMVFEETDGLEVGNRVIAQGSRLEVPVSKRLLGRVLNAMGQPIDDKGDIDSSVKYPALASPPDPLKRRRISERIVTGVRAIDGLLAVGKGQRLGIFAGSGVGKSTLLGMIARNTSADVNVIALIGERGREVNDFIENDLGPEGLARSVVVVTPSNSPPLARLRGAYVATAVAEFFRDQGLDVMLLFDSVTRFARAIREIGLASGEPSATRGYTPSMFDSMPKLLERSGTSDAGSITGFYTILVDADDMDEPVSDTVRGILDGHITLSRRLAQAYHYPAIDILQSISRLAPTVSGTSVTKAAGVIRRSMAVYAEAEELINVGAYRAGSNPAIDEAIAKHQPIEEFLIQEVTDRSSLEDTYLGLEQLSGIPIPVEEVPGQEIQSTGKDSKIKIPVGGTELGKAANWQNNSVASLFASRMSSEGDSESETV

SEQ ID NO: 52783 - DNA, 345 bp, Unknown
  Obtained from environmental sample
  misc_feature (1)..(345): n is a, c, g, or t
gtgtttctggctatcatgcctagcagggtcgattttccaacgcctgaaccggcaaatatgccaagacgctggcctttgcctacggccaaaaggccgtcaatcgcccgcacgcctgtaacgattcgctcgcttatccgccggcgtttaaggggatcgggggggctggcgagcgcggggtactttacggaggaatcaatatcgcccttgtcgtcgataggctggcccatggcgttcagcacccggccaagaagtcgcttcgacacagggacttcaagacggctgccctgggcaatgacgcggttccccacttcaagcccgtcggtttcctcgaaaaccatcaattga

SEQ ID NO: 52784 - protein, 114 aa, Unknown
  Obtained from environmental sample
  misc_feature (1)..(114): Xaa is any amino acid
MFLAIMPSRVDFPTPEPANMPRRWPLPTAKRPSIARTPVTIRSLIRRRLRGSGGLASAGYFTEESISPLSSIGWPMAFSTRPRSRFDTGTSRRLPWAMTRFPTSSPSVSSKTIN

SEQ ID NO: 52785 - DNA, 804 bp, Unknown
  Obtained from environmental sample
  misc_feature (1)..(804): n is a, c, g, or t
ttgctaagggaactttactgcgccctgaaaggcatcagtctgccccacgacataccggttaccgtcaataccatgcaagacgtgctttttatgggcaggataaacgacatctcgttcgaaataggcggaaaactggtaatccttgtcgaacatcagtcaacaatcaacccgaatatggctctccggcttttgttgtatatagccagggtgtatgagaagatcatcggggataataaaaagatctataccacaaacctcatcccccttccgaggccggaattttttgtgttatacaacggtgtatcgccgtatcccgatgaaaagacactgaaactctccgaagtctttgaatcggtagcttccctgggtataccggagaaggaaatcccttcgcttgagcttgttgcgaaggtaattaacattaaccagggaaggaacgaggagatagtacagagatgtaaaacgctgaacggctattgcgcgttcattgggaaggtcagagaatatgaaaaggaaggctgtagcctggaggaagccataagggaggcggtaatatactgccgagatcatgatatattgaaggagtttctgggaagaaacgcttcggaggtgatgactatgttgttgacggaatggaatttagatgacgcanaacaagtctggtatgaagaaggcatggaaaagggcatggaaaagggcaggaaaaaggcagggaaaaagggatggaaaaaggcatggagaagggatggaaaaaggcagggaagaaatagcccgaaacgccctggtggaaggcgcttccattga

SEQ ID NO: 52786 - protein, 267 aa, Unknown
  Obtained from environmental sample
  misc_feature (1)..(267): Xaa is any amino acid
MLRELYCALKGISLPHDIPVTVNTMQDVLFMGRINDISFEIGGKLVILVEHQSTINPNMALRLLLYIARVYEKIIGDNKKIYTTNLIPLPRPEFFVLYNGVSPYPDEKTLKLSEVFESVASLGIPEKEIPSLELVAKVININQGRNEEIVQRCKTLNGYCAFIGKVREYEKEGCSLEEAIREAVIYCRDHDILKEFLGRNASEVMTMLLTEWNLDDAXQVWYEEGMEKGMEKGRKKAGKKGWKKAWRRDGKRQGRNSPKRPGGRRFH

SEQ ID NO: 52787 - DNA, 1206 bp, Unknown
  Obtained from environmental sample
  misc_feature (1)..(1206): n is a, c, g, or t
atgataaagtcttacacggtggcggtcagggagatcgacgacgccgcggcggcggtcaagcaggccgcagaaagcgtcgcctctctgccgttgcttaaaaatacggtgggcattgtcaccgcgcatccggagtgcgtgccgtcaggcgtcttacgtgacgtggcgcgngcgcttccctttccgagcgtggggatgaccacaatagcgcactgcgccggcgccgaggcggacacctatatgctgtcgatactggtgttgacgagcgacgactgcgtcttttcctgcggcgccagcgatccgataccggagaaatgcagcgtagaggcggcgcatgaggccgtgcgtaagtgttacaaggagcttagcgggcgtctgccggccgaaccgaatttggcgcttctctactcgcaattctttctcgcgccgcgccaataccaattcaccgccgcgatttctgaagtcatcccgaggcttccggtattcggcgccgtggcgaacgacgacaagcaaaatgtgcggccgcagaccaacgcgcggattttggccgacggcgagctttatgacgatagaccggcactgcttttaatctccggcgaggtgtcgcccaaattttacattgcctccgtcacggaggacgcgataatcatgccgcgcgtgggggtgataaccgaggctgacgggatcaggcttctgaaggtgaacaacgtggccgccccggattttttcaagcagataggctttctgggcgaggagtcgggcggttggcgcaacggcggggagggattgctgtcgagcctcttcgtcctgcacatcgacgacggttgcggcggcaccgccgacatcacccgcataccgttcatggtggactccgaggcgatctactgcgccgggccgctcgtggagggcgccgcgatgtcggtggccttcaatacccgcgacggcgttgtggaaaccgcgtcgcggatgtgcgagcagataaagcgcgacagcgccggcggaacggcgattatgtacacctgcataggcagacgcttcggtctgctgggcgaaccaatggccgaactgtcggcgataatcgaacgcttgggggatgatttcgtttacacagccgcctacgggacgggggagatgtgtcctacaagagttactaaggacaaggcgttcaatcaggatcatagccagacgatagtcgcgtgtgtgttttga

SEQ ID NO: 52788 - protein, 401 aa, Unknown
  Obtained from environmental sample
  misc_feature (1)..(401): Xaa is any amino acid
MIKSYTVAVREIDDAAAAVKQAAESVASLPLLKNTVGIVTAHPECVPSGVLRDVARALPFPSVGMTTIAHCAGAEADTYMLSILVLTSDDCVFSCGASDPIPEKCSVEAAHEAVRKCYKELSGRLPAEPNLALLYSQFFLAPRQYQFTAAISEVIPRLPVFGAVANDDKQNVRPQTNARILADGELYDDRPALLLISGEVSPKFYIASVTEDAIIMPRVGVITEADGIRLLKVNNVAAPDFFKQIGFLGEESGGWRNGGEGLLSSLFVLHIDDGCGGTADITRIPFMVDSEAIYCAGPLVEGAAMSVAFNTRDGVVETASRMCEQIKRDSAGGTAIMYTCIGRRFGLLGEPMAELSAIIERLGDDFVYTAAYGTGEMCPTRVTKDKAFNQDHSQTIVACVF

SEQ ID NO: 52789 - DNA, 669 bp, Unknown
  Obtained from environmental sample
  misc_feature (1)..(669): n is a, c, g, or t
atggcgaggacagacggtgttcgatcttcaaacgcgatactgcggacggttgcggaactggtggagtgccgcgacgacacgaccggcgggcacattgagcgtacgcaaagctacttgcagatactcgtggacgccctctggacggacgagctttataaggacgaagtgtcgtcgtggaacatagacttcctattgcagtcttcgcaattgcacgacgtgggcaagatcgccataaaggacagcatcctccaaaaaccggcaaagctcactcctgaggagtttgaggagatgaagacgcataccactttcgggataaaagtcatagagaagatacaggagaatacgtcagaggcgactttccttgagtacgccaagatattcgcgggcgcgcaccacgagaaatgggacgggtcggggtatccgtgcgggcttataggggaggccattccgttgcaggggcggctgatggcgatagccgacgtctacgacgcgctgatctcggaacgtccatacaagaaagcgttcacgcatgaggaggctgttaagatcatatcggacgggagcggttcgcactttgacccgcaccttgtcaaggtgtttcttgaacgcgagcaagagttcaaattgatctctaagagtatgaacggaaaggccgggctgcatttatga

SEQ ID NO: 52790 - protein, 222 aa, Unknown
  Obtained from environmental sample
  DOMAIN (28)...(165): HD domain
  misc_feature (1)..(222): Xaa is any amino acid
MARTDGVRSSNAILRTVAELVECRDDTTGGHIERTQSYLQILVDALWTDELYKDEVSSWNIDFLLQSSQLHDVGKIAIKDSILQKPAKLTPEEFEEMKTHTTFGIKVIEKIQENTSEATFLEYAKIFAGAHHEKWDGSGYPCGLIGEAIPLQGRLMAIADVYDALISERPYKKAFTHEEAVKIISDGSGSHFDPHLVKVFLEREQEFKLISKSMNGKAGLHL

SEQ ID NO: 52791 - DNA, 1752 bp, Unknown
  Obtained from environmental sample
  misc_feature (1)..(1752): n is a, c, g, or t
atgagcgtagggcaaagcataccgagggttgacgcctgggaaaaagtttcgggcagggctaaatataccgatgacattgttgaccgcaacgcgcttatcggcaaagtgctgcactcctcaatcgccaacggacttgtaaaaaaaattgatacaagcgaagccgaaaaaattcccggcgtggtaaagatcatcacctgctttgacgtgcctgattttccctaccctaccgcgggccatccctggtcaacagaccccagccaccatgatcccatggacaggcggctcctgaacgcgagggttaggtgtcatggcgatgagattgccgccgtgatcgccgaagatgaggtttccgcatcccgggctttgcgcgcgctcaaggttgagtatgaggaataccccccggtcctgtcgccggaagaagcgatgggggaaaacgcctctctgcttcatgaagaatgtccgcgtaatatcctgaagcagagttccattacagacggcaattttgacgaagcgattaaagaagaagggctgctctgttttgagggggtgttcgagaccccgattgttcagcactgccatattgaaacggcgacatcctgggcgtatatggaaaacggccgtatcgttattgtatcctcaacccagattccccatatcctcagacgaatcaccgggcaggcgctgggtattccatggggtaaggtgcggattatcaaaccgtatattggcgggggctttggcaacaagcaggacagcctttttgaaccactgaatgcgtttttgtgtaccaaagtcggtgggcggctcgtgaaacttgagctttcgcgggaagaagtgtttgccgccaccagggtgcgtcatagcgaaaaaatttaccttaaaagctgggtgaggcccaatggcaggattgtggcgcgttcctatactgcgtattcaaaccagggggcttatggctcccacggtcatggaatcgccgccaagggaaccaatgtgttccgccagctctacaacgatgaaaaggcccgcaaggctgacatttacacagtttacacaaataccgccgcggcgggggcaatgcgcggttacgggacgccccaggcggtgttcgccatagagtcccatatcgaggacatcgcgaaaagccttaaacttgatcctctggaattccgttttctcaacgtgatgcccgtgggttttgttgataattttaccaaaaatgtaagccgctttgattcattccgccagtgcgtagatgcgggcaagaatcggatcaaatgggatgaaaaacgcgagcgttacgcgaaacaaatcggccccctcaggcgcggcatagggatgtccctgttctggtataacaccgccgtctggcccatttcgatagaaatatcgtcctgccgcatggtgatgaatcaggatggcagcgtacaggtacagcttggagaaaccgaaatagggcagggggcggacacggccttttcccagatggccgccaagaccctggggataccctggcagatggttcatgttatcagcacgcaggacacggacattacgccttttggattcggcgcttacggctcccggcaaacatacgtaggcggcgcgggcgttcacaaggccgcccttctgctaaaggaaaaaattctgaaggccgcgtccctgtacgcaaaattacccgcgggcgaactcgacatcgttaacggcgatattgttaatacttcgcttaacggtaaaaatggtatgcggtcttga

SEQ ID NO: 52792 - protein, 583 aa, Unknown
  Obtained from environmental sample
  DOMAIN (17)...(133): Aldehyde oxidase and xanthine dehydrogenase, a/b hammerhead domain
  misc_feature (1)..(583): Xaa is any amino acid
MSVGQSIPRVDAWEKVSGRAKYTDDIVDRNALIGKVLHSSIANGLVKKIDTSEAEKIPGVVKIITCFDVPDFPYPTAGHPWSTDPSHHDPMDRRLLNARVRCHGDEIAAVIAEDEVSASRALRALKVEYEEYPPVLSPEEAMGENASLLHEECPRNILKQSSITDGNFDEAIKEEGLLCFEGVFETPIVQHCHIETATSWAYMENGRIVIVSSTQIPHILRRITGQALGIPWGKVRIIKPYIGGGFGNKQDSLFEPLNAFLCTKVGGRLVKLELSREEVFAATRVRHSEKIYLKSWVRPNGRIVARSYTAYSNQGAYGSHGHGIAAKGTNVFRQLYNDEKARKADIYTVYTNTAAAGAMRGYGTPQAVFAIESHIEDIAKSLKLDPLEFRFLNVMPVGFVDNFTKNVSRFDSFRQCVDAGKNRIKWDEKRERYAKQIGPLRRGIGMSLFWYNTAVWPISIEISSCRMVMNQDGSVQVQLGETEIGQGADTAFSQMAAKTLGIPWQMVHVISTQDTDITPFGFGAYGSRQTYVGGAGVHKAALLLKEKILKAASLYAKLPAGELDIVNGDIVNTSLNGKNGMRS

SEQ ID NO: 52793 - DNA, 1926 bp, Unknown
  Obtained from environmental sample
  misc_feature (1)..(1926): n is a, c, g, or t
ttgttaaaccaggcctttcgccctttccttgcggcgattctggctgcgatagccattccaaaaaagataaggcgtaggtctgcgcctaacactaaccgctgcgccatcgcagcaatttcaaagggagtcccgatgccaaaagtggccaatctgttatcaaaaatatccaatatctgcggcactgttgcgcttgcattggtgatccttgttgcttcggggcctctggctgcccaaggtgccttgaaagtcaccacgccaaaagaagcccttgggttcgacatcggccaagactattgcttggccaattattcccagttggcctcgtggtggaaaaagctggatcaggaatccgacaggatgaagctggtagaaattggcaaaagcgaagagggcaggccgcagtacatggccgtgatcaccgcgccagaaaaccacaaaaaccttgaccgctacaaagaaatcgcaaagaagctggccttggccgagggcctgagcgacagccaggcgagggaattggccaaggagggcaaggcagttgtatggatagacggcgggctgcatggcaccgaagttctaggggcccagcagcttctggagctcgtctatcagatggtcagccgcaccgacgccgagaccacccgcatactcaaagacgtgatattactggccgtgcttgcaaaccccgacgggatggatctggtctcggactggtacatgagggagagcgacccatcaaagaggagcctcgccaatgtgccgcgactgtaccaaaaatacgcagggcacgacaacaaccgcgacagctacatgtccaaccttgccgagaccaccaacatgaaccgcgtgttgttcatggagtggttcccccaagtcatgtacaaccaccaccagtctggccccgctggaactgtcatgttcgcaccgccattcagggatccattcaactacaacatagacccattagtaatgatgcagcttaatcttgtggcttccgccatgcacacccgctttgtttctgagggcaagcagggcgtaaccatgcgcggaggggccaatttttctgcttggtacaatggcgggcttcgcaccatcacatactttcacaacatggttggaatcctcaccgaaaccattggcagccccactcccatggaaattccgcttgttttaagtcggcagttgcccagcggcgacctgccgtttccgatagcgccccagaagtggcattttagccagtccattgaatacagcatttctgccgacagggccatcttggatttggcctcgaagtacaaagaggactttttgttcaatatctataggatgggcaaaaactccattgaaaggggcagcagggacagttggacgctttcccccaaggccgtccaagccgtcagggacgcagcccctagaaatcagcagcaagctgcgccaacagaagacatacctgcctttgctaggggaggcaacttgccttcgggcctatatgaaacagccctgcggcacccagacaggcgcgacccaagggggtacatactcagcgcggatcagccagacttccccacagccaccaagtttataaatacgctaattaaaaatggtatccaagtgcatcaggcaaccgcgccatttcaggttaaggggaaaaactaccccaagggctcgtgggtggtgaaaaccgcccaggcgttcaggccgcacgtgctggacatgtttgagccccaagaccacccagatgatttccagtacccaggcggcccgccaattgccccctacgatgtggccggctatacgcttgcgatgcagatgggcgtgcagtacgacagaattttggatgcattcgatgggccatttcagaaagtgcagggtttgcagtccgctccgcccgccaggtggttggagcgcaaggggccgctggctatttga

SEQ ID NO: 52794 - protein, 641 aa, Unknown
  Obtained from environmental sample
  DOMAIN (106)...(396): Zinc carboxypeptidase
  misc_feature (1)..(641): Xaa is any amino acid
MLNQAFRPFLAAILAAIAIPKKIRRRSAPNTNRCAIAAISKGVPMPKVANLLSKISNICGTVALALVILVASGPLAAQGALKVTTPKEALGFDIGQDYCLANYSQLASWWKKLDQESDRMKLVEIGKSEEGRPQYMAVITAPENHKNLDRYKEIAKKLALAEGLSDSQARELAKEGKAVVWIDGGLHGTEVLGAQQLLELVYQMVSRTDAETTRILKDVILLAVLANPDGMDLVSDWYMRESDPSKRSLANVPRLYQKYAGHDNNRDSYMSNLAETTNMNRVLFMEWFPQVMYNHHQSGPAGTVMFAPPFRDPFNYNIDPLVMMQLNLVASAMHTRFVSEGKQGVTMRGGANFSAWYNGGLRTITYFHNMVGILTETIGSPTPMEIPLVLSRQLPSGDLPFPIAPQKWHFSQSIEYSISADRAILDLASKYKEDFLFNIYRMGKNSIERGSRDSWTLSPKAVQAVRDAAPRNQQQAAPTEDIPAFARGGNLPSGLYETALRHPDRRDPRGYILSADQPDFPTATKFINTLIKNGIQVHQATAPFQVKGKNYPKGSWVVKTAQAFRPHVLDMFEPQDHPDDFQYPGGPPIAPYDVAGYTLAMQMGVQYDRILDAFDGPFQKVQGLQSAPPARWLERKGPLAI

SEQ ID NO: 52795 - DNA, 837 bp, Unknown
  Obtained from environmental sample
  misc_feature (1)..(837): n is a, c, g, or t
ttggatcagggccgcgctggcggctgggctcatgcttggcctgttgaaattgccgctcgacaagaaggcgacatgcgagacctcatctccaaaaaactgaaagaaatagagctaaatgagcgcgtgtgcgtcctgcatgcagtggaatccggctcgcgcgcatggggcttcgcgtcgcccgacagcgactacgacgtccgctttgtgtatctgcgcgaaacaaatttctacctgaggctggataatactagggacgtcatcgagtggcagttggacaagaccttggacatcaatgggtgggatctgcaaaaggccctgcgtctgctttataaagcgaacccaacgctcttcgagtgggccaattcgcccatagtctataaaaccacgcccgaatggcaagcgataagcaagcactttgcaaaatatttttcgcccaagtcatgtatgtacagctatctgcacatggcagaggggaattacaaagaatacctgaagcatgacttggtcaggccaaaaaaatacttgtacgtaatccgcccaatccttgcgtgcaaatgggtattgagaaacaatgccccaccccccgtgcttttttcggagctggtggctgccgaggccgggccagagctaacgcgggaaattgacaaattgctcagaataaagctaaacacgccagagctagatgaggcgccaaagatagcccccctaaacgacttcatcgaagaaaccctaccccttctcagagagcagatgggctcgctccccggtgggcacgcgggtggcttcgatgacctgaacaggctgtttttggacgcgctgaccagcggcttggtatag

SEQ ID NO: 52796 - protein, 278 aa, Unknown
  Obtained from environmental sample
  misc_feature (1)..(278): Xaa is any amino acid
MDQGRAGGWAHAWPVEIAARQEGDMRDLISKKLKEIELNERVCVLHAVESGSRAWGFASPDSDYDVRFVYLRETNFYLRLDNTRDVIEWQLDKTLDINGWDLQKALRLLYKANPTLFEWANSPIVYKTTPEWQAISKHFAKYFSPKSCMYSYLHMAEGNYKEYLKHDLVRPKKYLYVIRPILACKWVLRNNAPPPVLFSELVAAEAGPELTREIDKLLRIKLNTPELDEAPKIAPLNDFIEETLPLLREQMGSLPGGHAGGFDDLNRLFLDALTSGLV

SEQ ID NO: 52797 - DNA, 693 bp, Unknown
  Obtained from environmental sample
  misc_feature (1)..(693): n is a, c, g, or t
atggttttcgcccccatgcttgacgcagggaacctaaaagccaaatttgacgtgatcattttccccgacggcgcaatatcccaaaggcagagggcaacaactggcggcgggccaggcggccaaggcggtgcaaggcagctgcgggacgcagacttgccagcagagtttcggggcaggcagggccgcgtcaccatagaaaacaccatgccagcgctaaaagagtttgccagcgcgggtggcactattgtcgccatgggttcttccagcgcaataggcgaaatacttggccttggcgcgacaaacgccatgacagagatggttgatggcagggcgcagcccctgcctagggacaagcactacgtgccaggctcaattttgcaggtggcgattgacaacagccagccccttgcatacggcatggacgccgcggcaaacgtctttttcaacaatagcccagcctacaaactcagcgaagccgccatagcaaacggtgccaaggccgttgcttggttcgattcccccaatcccctcaagagcggctggatacatggccctgcctacctgaatggcaccatcgccgcaatggacatcccccacggcaaaggccgcctgtgcctgatagggcccgaacccacattccgcgcccagccgcatggcacattcaagctgctgtttaatgcgatctatatgtga

SEQ ID NO: 52798 - protein, 230 aa, Unknown
  Obtained from environmental sample
  misc_feature (1)..(230): Xaa is any amino acid
MVFAPMLDAGNLKAKFDVIIFPDGAISQRQRATTGGGPGGQGGARQLRDADLPAEFRGRQGRVTIENTMPALKEFASAGGTIVAMGSSSAIGEILGLGATNAMTEMVDGRAQPLPRDKHYVPGSILQVAIDNSQPLAYGMDAAANVFFNNSPAYKLSEAAIANGAKAVAWFDSPNPLKSGWIHGPAYLNGTIAAMDIPHGKGRLCLIGPEPTFRAQPHGTFKLLFNAIYM

SEQ ID NO: 52799 - DNA, 1896 bp, Unknown
  Obtained from environmental sample
  misc_feature (1)..(1896): n is a, c, g, or t
atgtcgtgttatacgcatcacaggcgggcggtgaataacgccgccgataccgaatacgaggggcttcataccattcccaagggaattgatcccgtctattgccccgcttatcttcttgacgcggcgaaggacgcatgggacagggcgcttgaattcggcaaagcgcacggtttccgcaacgcgcaagttacggcaatcgctcccaccggaaccatcggccttttgatggactgcgacaccacggggattgagcctgatttcgcccttgtcaaatttaaaaatctcgccggcggcggccagtttaaaataattaatcagtctgttcctatcgctcttgaaacgctcggctattcgcctgccactatcgaggaaattgtcgcctacgccatgggcagaaaaacgcttaacggcgctcccgccatcaatgttgaaagccttaaagcaaaaggttttactcccgaagcgatacagtcggcggaagacgcggtaaagacggcgaccaatctggaaggcgtttttactccgtgggtgctgggtaaatcgtttgtggagaaggtgctgaaggttcccgaatcgacatgggcgcttgcgggtttttctcttcttaaacatcttgagtttgtaaaggaagatattgaggaagcggagttgttcgcctgcggcactatggctctggagggcgcgccaggccttaagaaggagcattatgtgatctttgacacggcaaatccttcgggcaagaagagcaagagatcgattccgtggacggcgcatatcggcatgatggcggcggttcagccttttatttccggcgcgatttccaaaacgatcaatatgccgaacggcgcgaattatgacgatgtaaagggcgcttatatgctctcgtggaagaacgggcttaaagcggtcgccctgtaccgcgacggctcaaaactttcacagccgcttaacagcgttgacccgggagccgatccgttagttgaaactatcctgaaagttgagaaaggccttgatattcccgtttcttcgcccgaccgcaagaaattaaattcgcgcggcctgcgcagggctttgcccaaccgcagaatgggttacactcagaaggcgaagatcggcgggcactcgatttttatcaggacgggcgaatatgaggacggcaatcttggagaaatctttcttgatatgcacaaagaaggcgccgctttccgaagccttttaaacagttttgccattacggtatccctcggtttacaatacggcgtgcctcttgaagaatacgttgacgcattcactttcagcaggtttgagcctaacggttttgtgcaaggacacgattatgtgaaaatggcgaccagcgttattgactatattttccgcgatctcgcgatcagttatttgaaacgcagcgacttggcgcaggtgaagcccgaagaccttgaagcgacggggaccaagagcgatttcggcgtatcagacggcaaagaccggagcgacaagcacagcgcgggtttcaggccgagcgcgactgtttccacgccgaagagcgcggcaactccgcaagcttcgcagcaagcagtggcgcagcagcaaacaccgtttcagccttccggcgggaaaaccgtaaaagggcagggcgcctcttttgcgggtaacagcgtgcctattgacggcggaattgttgcaggtaacgctaaggccggtatttcttcttccggggcgcatacggcggttatggaaggctcttatcctgaggagaacgaggttattaagattgtcaacgctcggattaagggttatgagggcgatccttgttctttgtgcggatcgttttctttggttaggaacgggacttgcttgaagtgcgataattgcgggagcacgactgggtgttcttaa

SEQ ID NO: 52800 - protein, 631 aa, Unknown
  Obtained from environmental sample
  misc_feature (1)..(631): Xaa is any amino acid
MSCYTHHRRAVNNAADTEYEGLHTIPKGIDPVYCPAYLLDAAKDAWDRALEFGKAHGFRNAQVTAIAPTGTIGLLMDCDTTGIEPDFALVKFKNLAGGGQFKIINQSVPIALETLGYSPATIEEIVAYAMGRKTLNGAPAINVESLKAKGFTPEAIQSAEDAVKTATNLEGVFTPWVLGKSFVEKVLKVPESTWALAGFSLLKHLEFVKEDIEEAELFACGTMALEGAPGLKKEHYVIFDTANPSGKKSKRSIPWTAHIGMMAAVQPFISGAISKTINMPNGANYDDVKGAYMLSWKNGLKAVALYRDGSKLSQPLNSVDPGADPLVETILKVEKGLDIPVSSPDRKKLNSRGLRRALPNRRMGYTQKAKIGGHSIFIRTGEYEDGNLGEIFLDMHKEGAAFRSLLNSFAITVSLGLQYGVPLEEYVDAFTFSRFEPNGFVQGHDYVKMATSVIDYIFRDLAISYLKRSDLAQVKPEDLEATGTKSDFGVSDGKDRSDKHSAGFRPSATVSTPKSAATPQASQQAVAQQQTPFQPSGGKTVKGQGASFAGNSVPIDGGIVAGNAKAGISSSGAHTAVMEGSYPEENEVIKIVNARIKGYEGDPCSLCGSFSLVRNGTCLKCDNCGSTTGCS

SEQ ID NO: 52801 - DNA, 1059 bp, Unknown
  Obtained from environmental sample
  misc_feature (1)..(1059): n is a, c, g, or t
atggacgaggttacggggaacatccaaaaacgcataacggaattccagcgtgaaaacaaacagccccgtatccatatcctggacgacaatgacaacgagcttatatcgtaccaccttcccggcggcgctatcctccaggttgaagacggggacaagatcaagtcgggccgtaccattgccaagatacttaaagagtccgcccgcgctatggatataacttccggtcttccccgcgtcggcgaactgtttgaagcgcgcaaaccgagaagcccggcggaacttgcgaaagtttccggaacggtgttctttgagggaattgccaagggcaaacgcaagatcacggttaaagacacatttggccgtgaatacccccattttatccctatggcaaagcgtcttctggtgcgtgacggcgacacggtggaagccggcgagcctctatgcgccggaaacatcaacccccatgacatattaagtatcatgggagaaagctacctccagacctatctgatggacgagatacagcaggtataccggcttcagggtgtgtcgattaacgacaagcatatcggcgttatagtccgtcagatgatgaggaaagttgagatccgctttgtgggcgacacaaggtttatctatggccagatggtagacaagtaccgcttccacgaagaaaacgccagggttataaaagaaggcggccagcccgccattgcccagcccttattccagggcatgaccaaggcggcgctgaatatcgattcgttcctttcggcggcgagtttccaggaaactacccgcgtactgaccaacgccgccattgccggcagcaccgattacctgcgcggcctgaaggaaaatataatcattgggcatccgatacccgcgggcaccggcatgaagcgttaccagaacattaagctgtttgatgaagacagccaggatctggaaaagcagatgcaggagatccttgaacagcgcaggatagaggctgagtttgccgcggaagccgcaaaaatggcggaaatgatgcctgttgaagatgtggatgaagattag

SEQ ID NO: 52802 - protein, 352 aa, Unknown
  Obtained from environmental sample
  DOMAIN (24)...(259): RNA polymerase Rpb1, domain 5
  misc_feature (1)..(352): Xaa is any amino acid
MDEVTGNIQKRITEFQRENKQPRIHILDDNDNELISYHLPGGAILQVEDGDKIKSGRTIAKILKESARAMDITSGLPRVGELFEARKPRSPAELAKVSGTVFFEGIAKGKRKITVKDTFGREYPHFIPMAKRLLVRDGDTVEAGEPLCAGNINPHDILSIMGESYLQTYLMDEIQQVYRLQGVSINDKHIGVIVRQMMRKVEIRFVGDTRFIYGQMVDKYRFHEENARVIKEGGQPAIAQPLFQGMTKAALNIDSFLSAASFQETTRVLTNAAIAGSTDYLRGLKENIIIGHPIPAGTGMKRYQNIKLFDEDSQDLEKQMQEILEQRRIEAEFAAEAAKMAEMMPVEDVDED

SEQ ID NO: 52803 - DNA, 810 bp, Unknown
  Obtained from environmental sample
  misc_feature (1)..(810): n is a, c, g, or t
ttgagcgaccgcattatcggacgctacacgattgagcctgtgaaacatccctttaccggcgagatnatcgtcgatgtcaacgaggagattaccgaggagatcgccaaaaaaatcaccgccgccgaggtcaactcagtgcgcatacgcaccgttcttacctgcgaagccaagcacggcgtctgccgcatgtgttacgggcgcaatctagccacgaatcgcacggtggacataggggaggctgttggaaccatagccgcccagtcaatcggccagccgggaacccagcttaccatgcgtactttccatattggaggcacggctaccaagatcagcgaggaaaaccgtatcttccttaaatacccggtttacataagcgacgttataggcacccatgttgtgcttgaagacgggcgctggcttttcacgcggcgcggtcacgcgattgtaagcaaagtaatgcacgaatatccaattgaggacggcgaccagatcatggtagaaagcggtcagcgggttaatcccgatatcgtaattatcagacgcggttccacggaaataaaagcccctgacagcacatacgttcagatcctgaacaactccgacaccgtggggccccattcaaggacactctacctggtcggtaaagaacaaaagatcgagatcaggaacggttccgattttcttgtaaaaaaggaacggtggtcgataaggaaaaaaccatcgccacttttgatcctttctccgatcctatcattgccgaattcagcggaaaggttaaatacgaggacattattccgggaccagccctaa

SEQ ID NO: 52804 - protein, 269 aa, Unknown
  Obtained from environmental sample
  DOMAIN (34)...(245): RNA polymerase Rpb1, domain 5
  misc_feature (1)..(269): Xaa is any amino acid
MSDRIIGRYTIEPVKHPFTGEXIVDVNEEITEEIAKKITAAEVNSVRIRTVLTCEAKHGVCRMCYGRNLATNRTVDIGEAVGTIAAQSIGQPGTQLTMRTFHIGGTATKISEENRIFLKYPVYISDVIGTHVVLEDGRWLFTRRGHAIVSKVMHEYPIEDGDQIMVESGQRVNPDIVIIRRGSTEIKAPDSTYVQILNNSDTVGPHSRTLYLVGKEQKIEIRNGSDFLVKKERWSIRKKPSPLLILSPILSLPNSAERLNTRTLFRDQP

SEQ ID NO: 52805 - DNA, 873 bp, Unknown
  Obtained from environmental sample
  misc_feature (1)..(873): n is a, c, g, or t
atggcggtggagaataaatttcttgattggggatccctcatacgggtcaaacccgtgaaattccctatatgggacaagatagaccatgagacggtaatacccgaagacggaattatagaaaccaccgtcggaaggcttgtattcaacgaggagcagcccaaagagattcccttcatcaattatgaaatgaaagacaaagagcttcgcgcccttattgagtatgtcttcaagaaaaacggctcctggattacggtaaaaatgctggacgcgatcaagtcgaccggctaccgttatgcgacagtttttggcgccacgattggcattgatgatattgtggttcccaaagaaaagcctgaaatgatcgataaagcaaacatggaagttgaggcgattcaggcccagtggcgcaggggaattatgacccaggaggaacgctacaataaggtcgtcgaggtatggacaaagacccacgaggaactgaccaacatcatgatgaagaccctggaggcggatcatgacggctttaactcgatttacatgatggcaaactccggggcgcgcggaagccgcaaccagatacgccagcttgccgcgatgcggggccttatggccaagccttccggcgaaattatagaactgcccatacgctcaaacttcaaggaagggctttccgtcatcgagttctttatttcaactaacggcgcgcgcaagggtcttgcggacacagccctgaagacatccgaagccggctatcttacccggcggcttgtggatatagcccaggacgtggttgtgaacgagaatgactgcggcaccatcaacgggatttcgtatacggcggtaaggaaggcgaggacattgtcgagcctttga

SEQ ID NO: 52806 - protein, 290 aa, Unknown
  Obtained from environmental sample
  DOMAIN (1)...(111): RNA polymerase Rpb1, domain 3
  misc_feature (1)..(290): Xaa is any amino acid
MAVENKFLDWGSLIRVKPVKFPIWDKIDHETVIPEDGIIETTVGRLVFNEEQPKEIPFINYEMKDKELRALIEYVFKKNGSWITVKMLDAIKSTGYRYATVFGATIGIDDIVVPKEKPEMIDKANMEVEAIQAQWRRGIMTQEERYNKVVEVWTKTHEELTNIMMKTLEADHDGFNSIYMMANSGARGSRNQIRQLAAMRGLMAKPSGEIIELPIRSNFKEGLSVIEFFISTNGARKGLADTALKTSEAGYLTRRLVDIAQDVVVNENDCGTINGISYTAVRKARTLSSL

SEQ ID NO: 52807 - DNA, 837 bp, Unknown
  Obtained from environmental sample
  misc_feature (1)..(837): n is a, c, g, or t
atgggctacggttatatttcttttgacgatcatcattttaagaacgatcttcaatttaatgacgcggttgaaatgctgaagcgtttgcaggcgcaggcgaagaaacggaagctggatttcggcgtgaagctcacaaacacctttccggtgcaaatcaaacggaacgaacttccgggaaacgagatgtatatgtctggccgtccgcttttcccgctgtcgattaatgtcgcaaaaaaactgtcgcgggcgtttgacggggaaatttccatctcctactcaggcggcgcggattactttaacctgaaggatattcttgaaaccggcataaggccggttaccgtggcgaccacgctcctcaaacccggcggctatgagcgtctgccccagcttgcggaactggcggaagaaacggtaaaggatatatccatggccgcgcctgtcaatgtaaacgccctcaacgcgcttgcggaatccctgccaaagaaaagcagataccgcaaagagtaccggcaaacaggtttgcgaaaaaccggaagccctctgcccctgttcgactgtgcgaaagcgccctgtatggatggcggatgccctatttgccagcgtatacccgaatacctcgccgccgtcgccgccggtaattatgacgaggctttcaggatcatcgcggcggataatacagcgccttcaattaccgggactatctgcgatcaccagtgccagtacaggtgtacgcgccttgattatgaggatcccctgcaaataagaaaagccaagctcattgccgccgaaaaagcgcagaaagcgctttacctgcttctctgcaaagcccgaaaataa

SEQ ID NO: 52808 - protein, 278 aa, Unknown
  Obtained from environmental sample
  misc_feature (1)..(278): Xaa is any amino acid
MGYGYISFDDHHFKNDLQFNDAVEMLKRLQAQAKKRKLDFGVKLTNTFPVQIKRNELPGNEMYMSGRPLFPLSINVAKKLSRAFDGEISISYSGGADYFNLKDILETGIRPVTVATTLLKPGGYERLPQLAELAEETVKDISMAAPVNVNALNALAESLPKKSRYRKEYRQTGLRKTGSPLPLFDCAKAPCMDGGCPICQRIPEYLAAVAAGNYDEAFRIIAADNTAPSITGTICDHQCQYRCTRLDYEDPLQIRKAKLIAAEKAQKALYLLLCKARK

SEQ ID NO: 52809 - DNA, 606 bp, Unknown
  Obtained from environmental sample
  misc_feature (1)..(606): n is a, c, g, or t
gtgcctgtgaccgtgtatgaaaagcgggataaagccttcggcatcgtgcgttatgtgattccatctttcagaatttccgatgaggctattgaccgcgattacttgatggcggaaaaacttggcgttgaatttaagtttaaccagcctgataatttttccattgacgaactgcggaagaaacacggctttgtcgtcatcgcctgcggcgcgtggaaggaaggctcaaacgtggtaaaacagggccaggaaaaaataatcgacgccctgcgtttccttgaggactccaaaaagacaaactgcggccttgatctggggaagagggtcgcggtcattggcggcggggacgttgcaatggactgcgccagggccgcgaaacggaataagagcgtggaatcggtgacaatcgtttaccggcgcaccagggagttcatgccatcccagtacgaggaacaggaattggcccttgccgacggagtgcaaatcaaggaactactggcccccgaaacctggtctgacggtgttctcggctgtgaggtgatgcagttgggagattttgattcatcangcaggcggggcatgaagggacgggcaggaaagaatccttaa

SEQ ID NO: 52810 - protein, 201 aa, Unknown
  Obtained from environmental sample
  misc_feature (1)..(201): Xaa is any amino acid
MPVTVYEKRDKAFGIVRYVIPSFRISDEAIDRDYLMAEKLGVEFKFNQPDNFSIDELRKKHGFVVIACGAWKEGSNVVKQGQEKIIDALRFLEDSKKTNCGLDLGKRVAVIGGGDVAMDCARAAKRNKSVESVTIVYRRTREFMPSQYEEQELALADGVQIKELLAPETWSDGVLGCEVMQLGDFDSSXRRGMKGRAGKNP

SEQ ID NO: 52811 - DNA, 564 bp, Unknown
  Obtained from environmental sample
  misc_feature (1)..(564): n is a, c, g, or t
gtggtcagagccattgctgatgccaaggctgctgccgcggatattctgcaaaaacttaaactggaagccgatttttcagtaaaaccatcatgctccgtcgttgatgatatttccgacctttactataagaaaggtgtgatcagcgagctaaaacaggataataccgacgcttaccgctgcctttcgtgtaacagcctatgcgaggtctgcgttgacgtgtgcccgaacagagccaatgtgatggtggaattgccgccgaacaatggtttaggaatacatcaaatcctgcatatagaccgtatgtgcaacgaatgcgggaattgcgccattttttgcccccacgcgggaaaaccgtataaggacaagctgacggttttttgtcgtgaagaggattttacagagagcgaaaacgcgggcttccttaagaccggcgcagacacattcaagatccgtctggaagacaagtctgtgctggcttaccgtagaggcgaaaacacgatccccaagcaatggattgcgctgattgatgttgttttatcgaagtatgaatacttgttagcatag

SEQ ID NO: 52812 - protein, 187 aa, Unknown
  Obtained from environmental sample
  misc_feature (1)..(187): Xaa is any amino acid
MVRAIADAKAAAADILQKLKLEADFSVKPSCSVVDDISDLYYKKGVISELKQDNTDAYRCLSCNSLCEVCVDVCPNRANVMVELPPNNGLGIHQILHIDRMCNECGNCAIFCPHAGKPYKDKLTVFCREEDFTESENAGFLKTGADTFKIRLEDKSVLAYRRGENTIPKQWIALIDVVLSKYEYLLA

SEQ ID NO: 52813 - DNA, 435 bp, Unknown
  Obtained from environmental sample
  misc_feature (1)..(435): n is a, c, g, or t
atgtcagaaattgattttgtaatccgcctttgcctcgcctttgccgcgggaggcattatcggaatagaaagatcaagccgccgtcaggtcgcagggttgcgcacccacatacttattgccgtaggatcatgctgtctgatgatgctttcaatctggctgcctcagcagtcaaacggcggagaccctggaagaatagcggcgcaggttgtttccggaatgggctttttgggcgcgggcgcaataatccgccttggcagtaatatcaggggacttactacagccgcgtccctgtggctaacagcggcggtagggcttgccataggagcgggaatgtttattgccgctttaacagccgtagctcttgccatcattacgctaatattacttcaccgccttgaaagaaaattgtttcccgaagataattggaaacaatga

SEQ ID NO: 52814 - protein, 144 aa, Unknown
  Obtained from environmental sample
  DOMAIN (10)...(138): MgtC family
  misc_feature (1)..(144): Xaa is any amino acid
MSEIDFVIRLCLAFAAGGIIGIERSSRRQVAGLRTHILIAVGSCCLMMLSIWLPQQSNGGDPGRIAAQVVSGMGFLGAGAIIRLGSNIRGLTTAASLWLTAAVGLAIGAGMFIAALTAVALAIITLILLHRLERKLFPEDNWKQ

SEQ ID NO: 52815 - DNA, 687 bp, Unknown
  Obtained from environmental sample
  misc_feature (1)..(687): n is a, c, g, or t
atgcgccgcgagcttgccaatcggggcatatcgacgggaaagaaccgtgtcgcgcgagttatgcgggagtgcggtttccgcgccaaaacgcacaaacccttccgcgttgtaactaccgactcgaaccacacgcagccgatagcgtcaaatcatctgaaccgtgagttcacggttgatgaacccaacaaggtgcttgtgggcgatatcacgtatgtcaagacatccgccggctgggcgtatttggcggtattcattgacctcttttcgcgtatggttgtgggatgggatgttggcagcagtctagtaacaggagtggttctgagcgctctaaaccgcacggtaaaaagccgcgacctgcaacccggtgtgatgatccattccgataggggcattcagtacgccagtgatgcgttccgggaagcgttgcgggggtatggcttcatccaaagcatgtcacgcaaggggaattgttgggacaacgccgttgcggaatccttcttccgcatttacaaaacggagttcgtatatcaccgtaaattcaaggacttaacggatgtttggcgtaaaagttttgagtatatcgagtgttactataaccggaaaagaatacatgggagtctaaattacttgactccggtcgagttcgaaaactggttttataggaaggacgtcaaaataatggggtaa

SEQ ID NO: 52816 - protein, 228 aa, Unknown
  Obtained from environmental sample
  DOMAIN (57)...(217): Integrase core domain
  misc_feature (1)..(228): Xaa is any amino acid
MRRELANRGISTGKNRVARVMRECGFRAKTHKPFRVVTTDSNHTQPIASNHLNREFTVDEPNKVLVGDITYVKTSAGWAYLAVFIDLFSRMVVGWDVGSSLVTGVVLSALNRTVKSRDLQPGVMIHSDRGIQYASDAFREALRGYGFIQSMSRKGNCWDNAVAESFFRIYKTEFVYHRKFKDLTDVWRKSFEYIECYYNRKRIHGSLNYLTPVEFENWFYRKDVKIMG

SEQ ID NO: 52817 - DNA, 885 bp, Unknown
  Obtained from environmental sample
  misc_feature (1)..(885): n is a, c, g, or t
gtgataaaccagagcgccagcgtaaccgaaacaaacgccacaatggaacaggttatcgccaacatcaacaaactaaacggccacgtggaaaaccagagccgcaacgtttcgcaggcgtcgtccgccattgaggaaatggtagccaatatcagttccgtcaccaacacgctggtcaacaacgccgcgaatgtaaacacgttaaaagacgcctccgaagtagggaagacagggttgcaggaagtggcgtcggacattcaggaaatagcccgcgagtccgaaggcctgctggagattaactcggtaatggaaaacatagccagccagacaaacctgctttcgatgaacgcggcgatagaagcggcccacgcgggggaggcgggaaagggctttgccgtagtcgccgacgagatacgcaaacttgctgaaagttccggcgagcagtcgaaaacgattggcacggtactgaaaaagatagcggaatcaatcaaaaagattacagtctccaccgataacgtgttaaccagattcggagctattgactcaggtgtcaagactgtctcggatcaggaagaaaacatacgaaacgcgatggaagagcagggcgaagggagcaagcaaatactgcaaagcgcgggcagtttaaacgagattacccggcaggtacaaagcagttcggaggaaatgcttaacggcagccaggaagtaatgaaggaaagccagaaccttgaaaaggtaacgcagganataaccggcggcatgaacgagatggcaaacggggcggatcagataaacatagcggtaaacaatgtcaatgagatgactcaacagaaccgtgacgccattgatgttttgataaaggaagtttcgcgctttaaggtgaaatag

SEQ ID NO: 52818 - protein, 294 aa, Unknown
  Obtained from environmental sample
  DOMAIN (30)...(294): Methyl-accepting chemotaxis protein (MCP) signaling domain
  misc_feature (1)..(294): Xaa is any amino acid
MINQSASVTETNATMEQVIANINKLNGHVENQSRNVSQASSAIEEMVANISSVTNTLVNNAANVNTLKDASEVGKTGLQEVASDIQEIARESEGLLEINSVMENIASQTNLLSMNAAIEAAHAGEAGKGFAVVADEIRKLAESSGEQSKTIGTVLKKIAESIKKITVSTDNVLTRFGAIDSGVKTVSDQEENIRNAMEEQGEGSKQILQSAGSLNEITRQVQSSSEEMLNGSQEVMKESQNLEKVTQXITGGMNEMANGADQINIAVNNVNEMTQQNRDAIDVLIKEVSRFKVK

SEQ ID NO: 52819 - DNA, 828 bp, Unknown
  Obtained from environmental sample
  misc_feature (1)..(828): n is a, c, g, or t
atgagtaacgcggtaaaattcacccctgaaaacggcaagatccgactgagcgcggaaaagctggaagaagaaaacgaccgcccgcctgtggcggaccgtccgcctgcggtggaccgtccgcctgtggcggacgagattaccataaaaatcgaagttgaggacaacggcacggggatttctccggaacagcaaaaaacacttttcactgcttacaaccaggccgacagcgccgcggcgaaaaatttcggaggcaccggccttgggctgttcatcgccaaacggattgtggaactgatgcgcggaacaatacgagttgaatcggaaccgggcaagggcgcgaaatttattttcaccataaaagcgaaacaggggacgcagaaagaggataaagcggcgtccctggaagcgtccgccgatttaaaagcgtccgacttgcatctacagtattataccatattggtcgcggaagacatggattttaaccgtgaagtcctgtccaaataccttgaaaagaccggcgtaaccattgattttgccttcaacggcaaaatagccgttgataagttcaaaaagaatcccgacaaatacacgttgattttcatggacattaacatgccggaaatgaacggggacgaggcggcaaagataataagggcgcttgacattaagaaggcgaaggagatacccattatcgccatgactgccgatgtttttaaggaagacattgataaatgccttgccgcgggcatgaacgaccatatccccaagccggttgttcccaaaaccatactcgcgaaactcaaacagtatatggctatttcaccttaa

SEQ ID NO: 52820 - protein, 275 aa, Unknown
  Obtained from environmental sample
  DOMAIN (150)...(268): Response regulator receiver domain
  misc_feature (1)..(275): Xaa is any amino acid
MSNAVKFTPENGKIRLSAEKLEEENDRPPVADRPPAVDRPPVADEITIKIEVEDNGTGISPEQQKTLFTAYNQADSAAAKNFGGTGLGLFIAKRIVELMRGTIRVESEPGKGAKFIFTIKAKQGTQKEDKAASLEASADLKASDLHLQYYTILVAEDMDFNREVLSKYLEKTGVTIDFAFNGKIAVDKFKKNPDKYTLIFMDINMPEMNGDEAAKIIRALDIKKAKEIPIIAMTADVFKEDIDKCLAAGMNDHIPKPVVPKTILAKLKQYMAISP

SEQ ID NO: 52821 - DNA, 1020 bp, Unknown
  Obtained from environmental sample
  misc_feature (1)..(1020): n is a, c, g, or t
ttgcgatgcttgatattgaaaatgaatgatactgatatactgcgtattatagcctcagaggacaaagatgaaattgatactctctttgctcaggcgttaaaagtacgcgagactcattacggcaaaagcgtatatatccgcggattaatcgaatttaccaattactgcaagaacgactgctattactgcggtcttcgctgttcaaattccaaacttgagcgttacaggttttctttggaagaaatactggaatgctgcagagcgggagacaaactcggtatcaaaacatttgttctgcaaggcggcgaagatccatggtttacaactgagcgcgtcacggaaattgtatctgccatacggaaagaatttcccactcacgcgattaccctctccattggcgaaaggccgcaaagtgactatgaacgttttttccgagcgggagcaaaccgttttcttctgcgccatgaaaccgccactgacgagcattacgcgaaactccaccccgctgatatgagtcttgaaaatcgcaaacagtgcctttggaacctaaaaaaaatcggctatcaggtgggggcggggtttatggtaggaactcccgatcaaacgccagagtgcctgcttgcggacattcactttttagcggaactacagccccaaatggtcggcatcggcccttttattccgcaaaaagacactccgtttgcctcacagcccgccggaaatcttaccctctgcctgaaaatgcttgccatcacgcggcttaccctgcccaaggcgctgattcccgccacaaccgccatcggaacaattacacctaacggaagggaacttgcccttgaggccggcgcgaatgtctttatgcccaacctgacgccaaccgcttttagaaaactctatgccctgtacgatgacaaaatctgtaccggtgatgacgctgtaacgtgcatatcctgcatgaagaacagaatagtctgctcgggctttacgcctgaaatggtacgaggggacgcgaaggagtaa

SEQ ID NO: 52822 - protein, 339 aa, Unknown
  Obtained from environmental sample
  DOMAIN (222)...(303): Biotin and Thiamin Synthesis associated domain
  misc_feature (1)..(339): Xaa is any amino acid
MRCLILKMNDTDILRIIASEDKDEIDTLFAQALKVRETHYGKSVYIRGLIEFTNYCKNDCYYCGLRCSNSKLERYRFSLEEILECCRAGDKLGIKTFVLQGGEDPWFTTERVTEIVSAIRKEFPTHAITLSIGERPQSDYERFFRAGANRFLLRHETATDEHYAKLHPADMSLENRKQCLWNLKKIGYQVGAGFMVGTPDQTPECLLADIHFLAELQPQMVGIGPFIPQKDTPFASQPAGNLTLCLKMLAITRLTLPKALIPATTAIGTITPNGRELALEAGANVFMPNLTPTAFRKLYALYDDKICTGDDAVTCISCMKNRIVCSGFTPEMVRGDAKE

SEQ ID NO: 52823 - DNA, 366 bp, Unknown
  Obtained from environmental sample
  misc_feature (1)..(366): n is a, c, g, or t
gtgagggggtccgccgcgcttgacaccttgaaagacggcgataaaattttgatctgcgaaggctgtacccaccaccggcaatgcgacgacataggcactgtcaaactgccacgctggattaaggaacattccaaaaaagagcctgaattcagtttttgttcgggcggcgactttccgcaggatttgtcggcttacaaggttgtcattcactgcggggcgtgcatgctgaacgagcgcgaaatgcactaccgcagaaggcacaccgaggagcaaaacattccgtttacaaattacggcactgtgatagcccacatgaatgggattttagagcgatgtattgcgatgcttgatattgaaaatgaatga

SEQ ID NO: 52824 - protein, 121 aa, Unknown
  Obtained from environmental sample
  misc_feature (1)..(121): Xaa is any amino acid
MRGSAALDTLKDGDKILICEGCTHHRQCDDIGTVKLPRWIKEHSKKEPEFSFCSGGDFPQDLSAYKVVIHCGACMLNEREMHYRRRHTEEQNIPFTNYGTVIAHMNGILERCIAMLDIENE

SEQ ID NO: 52825 - DNA, 648 bp, Unknown
  Obtained from environmental sample
  misc_feature (1)..(648): n is a, c, g, or t
ttgggggaaatgagggtaagcagggcgaaacaggtgctgaataagaccgatacggcggttctagttcttgacggggagttggctcccgacaatgctctgtcttccattgaggctgagttgatggcgattttcgacgaaaagaagataccctacattctcgctcttaataaatgcgagctttgtaataccgattctttgggaatggcgtcctcaagcgaaattctgcctgtaagcgcgaagacgggttttaacgtcaatctgcttaaagacaaaatcgccgctcttgcgcttgaaaaagaaccggaacaaagactggttgcggacattgtaaaaccaaatgattttatagtccttgtaattcccattgataaagccgctcccaaaggcaggctgattcttccgcagcagcagatgatacgcgacattttggaagcgggcgcaaacgctatcacggtaagggaaaccgaattacagcagacgcttgccgatatcggcaaaaagccttcgcttgtaattacggacagtcaggctttcgcccaagtttccgccatagtgccaaaagacattccgctcacttcgttctctatcctgttcgccccgctacaagggctatttaaaaacagccgtgagggggtccgccgcgcttga

SEQ ID NO: 52826 - protein, 215 aa, Unknown
  Obtained from environmental sample
  misc_feature (1)..(215): Xaa is any amino acid
MGEMRVSRAKQVLNKTDTAVLVLDGELAPDNALSSIEAELMAIFDEKKIPYILALNKCELCNTDSLGMASSSEILPVSAKTGFNVNLLKDKIAALALEKEPEQRLVADIVKPNDFIVLVIPIDKAAPKGRLILPQQQMIRDILEAGANAITVRETELQQTLADIGKKPSLVITDSQAFAQVSAIVPKDIPLTSFSILFAPLQGLFKNSREGVRRA

SEQ ID NO: 52827 - DNA, 1050 bp, Unknown
  Obtained from environmental sample
  misc_feature (1)..(1050): n is a, c, g, or t
ttgtgttttgccggggccgcgggaacagtgctgccgccgacaagcggcgataataaaaacaaaatccttgcggcgctgaataagctgcaagcgggcggttccacagcagggggagagggcattcaacttgcctacaagctggcggaagagagttttgatccgaacgcggtgaaccgggttattctgtgtaccgacggagatttcaatgtgggtattaccaaccgcagcgatctggtagatatgattgccgcgaaagctaaaagtggcgtatatttgaccgtttttggattcggcatggacaactacagggacggaaccttaaaacaactggcttccaagggaaacgggaactacgggtatatcgataccatagaagaagccagtaaaattttagtggagcagttaagcggaacattgatcacaattgcccaggacgtaaaaatccaagtcgaatttaaccctgaaactgtcggcgcataccggctcataggttacgagaaccgccttcttaacaaggaagattttaacgacgacaccatggacgcaggcgacataggcgcggggcatactgtaaccgctttttatgaactcataccaaaaggcgctgaggataatgctctgcccaaagtcgatcccctcaaatacgggacaccaacaacttcaaacggttacttagatgagcttttgacagtaaaactccggtacaaactgccaaaggaaaccgaaagctctctcttaagttttccggttttagtgtcatcgatccgtaaagccggagaggaatcgggagattttagatttgcctcagcggttgccggttttggaatgttgctgcgcgacagtccctataaaggaaatgccgactttgataacattcttaatatggcgcaaagctcaattgggaaagatctttcaggataccggcggggttttctggaattgataaacaagcgcaggcaatcggcaattgagggaacaaatacggaaaaacgctggttaatacagataataattgacaaattccggttattatggcatactacaatatag

SEQ ID NO: 52828 - protein, 349 aa, Unknown
  Obtained from environmental sample
  misc_feature (1)..(349): Xaa is any amino acid
MCFAGAAGTVLPPTSGDNKNKILAALNKLQAGGSTAGGEGIQLAYKLAEESFDPNAVNRVILCTDGDFNVGITNRSDLVDMIAAKAKSGVYLTVFGFGMDNYRDGTLKQLASKGNGNYGYIDTIEEASKILVEQLSGTLITIAQDVKIQVEFNPETVGAYRLIGYENRLLNKEDFNDDTMDAGDIGAGHTVTAFYELIPKGAEDNALPKVDPLKYGTPTTSNGYLDELLTVKLRYKLPKETESSLLSFPVLVSSIRKAGEESGDFRFASAVAGFGMLLRDSPYKGNADFDNILNMAQSSIGKDLSGYRRGFLELINKRRQSAIEGTNTEKRWLIQIIIDKFRLLWHTTI

SEQ ID NO: 52829 - DNA, 333 bp, Unknown
  Obtained from environmental sample
  misc_feature (1)..(333): n is a, c, g, or t
gtgggtcggaagcttaattggggacaaggcatgagtaatttaaaccttgatgattatatcagaaaggttcctgattttcccaagaaaggcattttattctatgacatcaccagcatactggcgagcccggtcgcgtttcaatactgtgttgattcaatggtatcaatatacaggaacaaatccattgacgcggttgccgccatagaggccaggggttttcttttcgccgctccctttgcgatagctatgaaaatccccctcattcccatccgtaaaaaaggcaaactccccggtattactttatccaaaaaatacatcctcgtgccgatctga

SEQ ID NO: 52830 - protein, 110 aa, Unknown
  Obtained from environmental sample
  misc_feature (1)..(110): Xaa is any amino acid
MGRKLNWGQGMSNLNLDDYIRKVPDFPKKGILFYDITSILASPVAFQYCVDSMVSIYRNKSIDAVAAIEARGFLFAAPFAIAMKIPLIPIRKKGKLPGITLSKKYILVPI

SEQ ID NO: 52831 - DNA, 636 bp, Unknown
  Obtained from environmental sample
  misc_feature (1)..(636): n is a, c, g, or t
atggcgacaaaaaccgaaagaatcctgcccgtaggcgtccaagacttcccgaagattcgggagaacggttatatctacgtggacaagacgccgcagatctaccgactgatctccggcgtaaaaggggcgttcttcctctcgcgtccgaggcgcttcgggaagtcgttgctctgttcgacgcttggggcgattttcgagggtcggcgtgagtttttcggggagatcgcgggaagaccggcgttggccatcgacggcctcgactgggagtggaagaggcatccggtgattaggcttgatctgagcgcggggaattacagcaacggcggggttgagacgctccgctccgtcctatacgccgaaatgcgggggtatgcaaaaatatatggggttaagcttgaccggacggatattccggccagtcaatttaaaaccctcatagaggaagcctgtgaaaaaaccggcgaaaaggccgtcgtgattattgacgagtacgacagtccgctgaccggtaccctgaccgagcgggatgtccatattgaactgcgggatgagttgagggcattctacagcgtcctcaaatcttgcgacgcccacttgcgattcatattcctgaccggcatcagcaagttctcctaa

SEQ ID NO: 52832 - protein, 211 aa, Unknown
  Obtained from environmental sample
  DOMAIN (1)...(211): Protein of unknown function (DUF1703)
  misc_feature (1)..(211): Xaa is any amino acid
MATKTERILPVGVQDFPKIRENGYIYVDKTPQIYRLISGVKGAFFLSRPRRFGKSLLCSTLGAIFEGRREFFGEIAGRPALAIDGLDWEWKRHPVIRLDLSAGNYSNGGVETLRSVLYAEMRGYAKIYGVKLDRTDIPASQFKTLIEEACEKTGEKAVVIIDEYDSPLTGTLTERDVHIELRDELRAFYSVLKSCDAHLRFIFLTGISKFS

SEQ ID NO: 52833 - DNA, 879 bp, Unknown
  Obtained from environmental sample
  misc_feature (1)..(879): n is a, c, g, or t
ttggagacgaatttcgggccggagatagatagtgttttggaaagcaccgggtgtagccgcgaggagtatatggacaaaatgcgccgattctacaacggttaccgcttctccgagaacccgctcactgtctataatccattcgggatactcaatcatttcgaaaacaacggaagatttaggccgtattggtacagaagcggtacgccaaccctcctgacagacctgattaacagccagaatattgacatcacaaacttaaacaatatgcaggtagggtacgacgatttcgatgccttcgacatagaggagatggaaccggcgccgcttttatatcaaaccggctacctaactataacagattacaacgaaaaagaagagtgtttcacgcttgattatccgaatattgaagtgcgtagcgcctttgcaaaatcgcttgcgacgcggtgtctaaagaccccttcaaactggtcgtactcgtcatgcaaaacgctaatggcggcgctaaacggcggcgacgtagacgccgcgatggaggcggtaaagctatttctgactaaaattccatacgaattgtttcaaaaaagggagaacttcttccaatcggtgatatacgtggtattcgcaatgttaggccttgactgccgcacggaggaaagaatcgccgctgggcggatcgacatggtcgtcgagacgcggggctttgtttactgtttcgaattcaaattagacggcaccgctgaagccgcgctcgcgcagatcgacagcaaggagtacgctactccttggacaggtcacggaaagaaggtttttaaggtcggggtgaactttgatttcgagaagaagaacatcggtgagtgggtatctacggcaactgaataa

SEQ ID NO: 52834 - protein, 292 aa, Unknown
  Obtained from environmental sample
  DOMAIN (1)...(286): Protein of unknown function (DUF1703)
  misc_feature (1)..(292): Xaa is any amino acid
METNFGPEIDSVLESTGCSREEYMDKMRRFYNGYRFSENPLTVYNPFGILNHFENNGRFRPYWYRSGTPTLLTDLINSQNIDITNLNNMQVGYDDFDAFDIEEMEPAPLLYQTGYLTITDYNEKEECFTLDYPNIEVRSAFAKSLATRCLKTPSNWSYSSCKTLMAALNGGDVDAAMEAVKLFLTKIPYELFQKRENFFQSVIYVVFAMLGLDCRTEERIAAGRIDMVVETRGFVYCFEFKLDGTAEAALAQIDSKEYATPWTGHGKKVFKVGVNFDFEKKNIGEWVSTATE

SEQ ID NO: 52835 - DNA, 714 bp, Unknown
  Obtained from environmental sample
  misc_feature (1)..(714): n is a, c, g, or t
ttgtccaggaagatgcttgttgtttaccgtggaacggacatgacccttatcggctggaaagaaagttttaacatgagcttcattgcctctgttccctcgcagaaagaagccgtatcctaccttgagaagatcagcagaagatttctttatcctttgatcatagccggacattcaaagggcgggaatctggcggtttacgcgtctgccttttgcggcaagctcgtccgaaggcgcattactgttatttacagcaatgacgcgccgggttttcacaaagaagtgatacagagtaacggctaccaggcaatctgcccccggattcgagcctttatcccccagtcgtcattggtcgggatgctgtttgagcatggcgagacccctatggtgataaaaagcaccgcgagcggtcccatgcagcataacctctgttcgtgggaagtttcatataataacctggtcgatgccggggaactcacgccgcagagtcgctttattgacaatattatctccgaatggatcaatcagattgacgaggggcagcggcagcagtttatccaggctatatataagatccttgtttcttgcgacgtggaatccgtgaccgatcttaccgatgactggaaaagtactgccggcggcataatcaacgccctgagaactatggacaagcccacaaaaaaacttatgggaaaaataatagggggagctgtttag

SEQ ID NO: 52836 - protein, 237 aa, Unknown
  Obtained from environmental sample
  misc_feature (1)..(237): Xaa is any amino acid
MSRKMLVVYRGTDMTLIGWKESFNMSFIASVPSQKEAVSYLEKISRRFLYPLIIAGHSKGGNLAVYASAFCGKLVRRRITVIYSNDAPGFHKEVIQSNGYQAICPRIRAFIPQSSLVGMLFEHGETPMVIKSTASGPMQHNLCSWEVSYNNLVDAGELTPQSRFIDNIISEWINQIDEGQRQQFIQAIYKILVSCDVESVTDLTDDWKSTAGGIINALRTMDKPTKKLMGKIIGGAV

SEQ ID NO: 52837 - DNA, 642 bp, Unknown
  Obtained from environmental sample
  misc_feature (1)..(642): n is a, c, g, or t
atgatcagggcgagacgacgcagcgcatcgcggacgggctgtttcaaggcggtcaaggattacgtctacggcatacagatggcgagtttctaccgcgacggcgagtacctgccgcacgtcaaggtgatggacaccgactgcaggaagagcgaaacttacgactcgctcacggattttggcctgccctacggactgatcaggataccgcagccgtacgacaccgcgacgctcaactacaactggcagatatggggctgccaggcctactcgctgttctcgacgtacaccgagcacatcgggaagcagtccacgcaaactgccgtgaacgcggtactgcgcttccttatcgccaaaggggtactcaaatgggcgctgcacggcggcatgcacacccgtatactaaacgaggaattgataagaaacgtccagacaaaccgggccgggataatgaaaaaatacgtcgcggtaggcgatgaggtagccgagggcgatctgctctgcgagataatccatcctttagaggggaacaagataggccggatagagtcgccgatggacgggacaattttcttcgcttacaacaagcagttggtgatggagcataccgacgtgttcaacatcgtgccattttcaaatgtatag

SEQ ID NO: 52838 - protein, 213 aa, Unknown
  Obtained from environmental sample
  misc_feature (1)..(213): Xaa is any amino acid
MIRARRRSASRTGCFKAVKDYVYGIQMASFYRDGEYLPHVKVMDTDCRKSETYDSLTDFGLPYGLIRIPQPYDTATLNYNWQIWGCQAYSLFSTYTEHIGKQSTQTAVNAVLRFLIAKGVLKWALHGGMHTRILNEELIRNVQTNRAGIMKKYVAVGDEVAEGDLLCEIIHPLEGNKIGRIESPMDGTIFFAYNKQLVMEHTDVFNIVPFSNV

SEQ ID NO: 52839 - DNA, 780 bp, Unknown
  Obtained from environmental sample
  misc_feature (1)..(780): n is a, c, g, or t
atggataagaaaatcatatactcgatcaagtctccctaccgccagagcatggatatcatcgggtacaccttcggctcgggcgagctctcctgctgcgtggtgggcgcgctgcgcggcaatgagattcagcaaatggcgatctgcgcccagttagtcgacacgctcaagcggctggaggaaaacgggtgtgttttactgggcaaaagcgtaatgatcatcccctgcgcgaacacctactccatgaatatcggcaaacgcttctggacgatggacaacaccgacatcaaccgtatgttccccggatatgatcagggcgagacgacgcagcgcatcgcggacgggctgtttcaaggcggtcaaggattacgtctacggcatacagatggcgagtttctaccgcgacggcgagtacctgccgcacgtcaaggtgatggacaccgactgcaggaagagcgaaacttacgactcgctcacggattttggcctgccctacggactgatcaggataccgcagccgtacgacaccgcgacgctcaactacaactggcagatatggggctgccaggcctactcgctgttctcgacgtacaccgagcacatcgggaagcagtccacgcaaactgccgtgaacgcggtactgcgcttccttatcgccaaaggggtactcaaatgggcgctgcacggcggcatgcacacccgtatactaaacgaggaattgataagaaacgtccagacaaaccgggccgggataatgaaaaaatacgtcgcggtaggcgatga

SEQ ID NO: 52840 - protein, 259 aa, Unknown
  Obtained from environmental sample
  misc_feature (1)..(259): Xaa is any amino acid
MDKKIIYSIKSPYRQSMDIIGYTFGSGELSCCVVGALRGNEIQQMAICAQLVDTLKRLEENGCVLLGKSVMIIPCANTYSMNIGKRFWTMDNTDINRMFPGYDQGETTQRIADGLFQGGQGLRLRHTDGEFLPRRRVPAARQGDGHRLQEERNLRLAHGFWPALRTDQDTAAVRHRDAQLQLADMGLPGLLAVLDVHRAHREAVHANCRERGTALPYRQRGTQMGAARRHAHPYTKRGIDKKRPDKPGRDNEKIRRGRR

SEQ ID NO: 52841 - DNA, 516 bp, Unknown
  Obtained from environmental sample
  misc_feature (1)..(516): n is a, c, g, or t
gtgagcgaacagacggcggacgaactgctgccttacgcgctgatggtcaatgtcgatctcgtgtggatacactcatcggcgaccgtattggaatcgacgctggcgcactcgctcaatatacgcggcgttaagacgctggtagtcgagatgggcgttggaatgcgcataacggagagtttctgtacgcagttcgtggacggcatactgaatctgctgcgcgaactgggaatgtggaacggaaccggcggaaagaccaggcagccccttgtctcaaaagatcacagcgtcggctttctgaactcggacgcgcacgggatatttatcccctacgccacgcacggcagccatgtaaactcaggcgaccgcatcggatgcgtcatagacccgcttacgggaaacgtcgtcgaggaaacgctcgcgccctgcggcggcctgctgtttacgttacgcgaataccccgtcgtcttcggcggctcgcttctggcgcggatcatggaggactcccgaaatggataa

SEQ ID NO: 52842 - protein, 171 aa, Unknown
  Obtained from environmental sample
  misc_feature (1)..(171): Xaa is any amino acid
MSEQTADELLPYALMVNVDLVWIHSSATVLESTLAHSLNIRGVKTLVVEMGVGMRITESFCTQFVDGILNLLRELGMWNGTGGKTRQPLVSKDHSVGFLNSDAHGIFIPYATHGSHVNSGDRIGCVIDPLTGNVVEETLAPCGGLLFTLREYPVVFGGSLLARIMEDSRNG

SEQ ID NO: 52843 - DNA, 2475 bp, Unknown
  Obtained from environmental sample
  misc_feature (1)..(2475): n is a, c, g, or t
atgcgcgttacgacgcctgattttatttcaaaacgtctcctgtttatacaaattttgtttaccgcttttgcgtttttcctgatggttttattaagctacatcttctccggcagaatcgtgcgggccaatcttttacgcaatgttgaaagcatacttgactatgaggagtcccaaatcggttttgatctgctggtatcgcgcacgatgctggacgatttcgcgcaatctatacgaagtttggccatacgcggagacggacccgcggaactcaccgcttttaccgaggatatagcaagttatataatcttaaaaaataattacactatcagccaaaacggccctttcgcttatatcgaaaaaaatcctgacgagccgtcctttattaacggcattggctggaagccgccggatgactggaagccgtcggagcgcctctggtacaaagccgccgttgaagccgcgggccgcagtaccgccggtggcattatagccgaaacaattccatatacggacacggtgagcggcgaaactgttttttcctactcccgctgtatttttgacaacgacgggaagcgcataggggttgccgctattgacgtgcgcgccggtaacatcggtaaaaatgttgttaaaaccgcttctgaaaaaggcggcggctacggggtgctggtcagccaggatttaacattaatcggacattccaacccggattatgtcggaaggaaattttacgatccggaagtctccctttcgactttaaccgagaaattgataaaaatggaaaacatttcaaagttcgagtggattaactggaaaggcgaatcggttgtcggttatttcaagacgctttctaacgggtggcgtctgggtctttttgcgcaaaaaaaaatatattacgaacctgtataccaaatggcgtttatcctcggtatattgggttttgtgcttgcatcagtgctgataattgtcctgattcacgttgacgcggcaagggtcaaatcggatatagaaaacaggcacaagagcgcgttccttgccaacatgagtcacgagatacgtacgcccatgaacgccataatcggcatgaccatgataggaaagacagcttccagtaccgagcgcaaagattactgccttaccaaaatacaggacgcttcgaaccatctgcttggcgtgataaacgatattctggatatgtcaaaaatagaagccaacaaatttgaacttaccccggcggaattcgacctggagaaaatgctccggcgggtagtgaatgtcatcaatttccgtatagaagaaaaacatcaaaaactctcggtacatatagaccgggcaattccccgcatactcataggcgacgatcagcggatagcgcaggttattaccaacctgctttggaacgcgataaagttcacgccggataaaggttccgtttccctttccacgcgccttgcgggaatagggagcgatatctgtaccctgcagatttcggtaagcgataccggaatcggcataccccccgaacagcagttgaaaatctttcagtcttttgaacaggccgaatccagcacaacccgtaaatacggcggtacgggacttgggcttgcgatttcaaaaagaattgtagagatgatgggcggatcaatatggattgaatcagaacctgaaaaaggttctgtttttttctttacgataaaggtatggtgcggtacggaagaaaagtacgtatctttgtctcctgaaataaattttagcaatgtccgtattttagcggtagacgatgaagctgatgttttagcgtattttaaagaaataacgcaggatttaggaataatgtgtgataccgcgatgagcggggaaaaagcacttgaactaataagtaagaataacggttacaatatttattttatagactggaaaatgcccatcatggactgtatatggcttgcccgggaaataaggttgcgaagatatgataattccattataacgatgatttccgccgccgaatggggcgatgtcgccgaagaagcgaaaacggccggtattgataaattcctgtccaagccgcttttcccttccgcgattgcggagatcataaacgaatgttatggcgttaacaaaaggcatattgaaaaagcgccgtccgaggaaattgaaggcgtttttgaagggcggcgtatactgcttgttgaagacatggaaatcaaccgtgaaattgtacgggcgttgcttgaaccgacaaagctgaaaatagactgcgctgaaaacggcgcggaagcggtccttatgtttgaaaaattccccacccagtacgatgtaattttcatggacattcaaatgcccgtaatggacggctacgacgcgacacggcgtattcggattattgaagctgaactggagaaaacacttcagagaataatggtaacaatgaaattttcgcaagcaaattcccataattgccatgacagctaa

SEQ ID NO: 52844 - protein, 824 aa, Unknown
  Obtained from environmental sample
  DOMAIN (166)...(246): Cache domain
  misc_feature (1)..(824): Xaa is any amino acid
MRVTTPDFISKRLLFIQILFTAFAFFLMVLLSYIFSGRIVRANLLRNVESILDYEESQIGFDLLVSRTMLDDFAQSIRSLAIRGDGPAELTAFTEDIASYIILKNNYTISQNGPFAYIEKNPDEPSFINGIGWKPPDDWKPSERLWYKAAVEAAGRSTAGGIIAETIPYTDTVSGETVFSYSRCIFDNDGKRIGVAAIDVRAGNIGKNVVKTASEKGGGYGVLVSQDLTLIGHSNPDYVGRKFYDPEVSLSTLTEKLIKMENISKFEWINWKGESVVGYFKTLSNGWRLGLFAQKKIYYEPVYQMAFILGILGFVLASVLIIVLIHVDAARVKSDIENRHKSAFLANMSHEIRTPMNAIIGMTMIGKTASSTERKDYCLTKIQDASNHLLGVINDILDMSKIEANKFELTPAEFDLEKMLRRVVNVINFRIEEKHQKLSVHIDRAIPRILIGDDQRIAQVITNLLWNAIKFTPDKGSVSLSTRLAGIGSDICTLQISVSDTGIGIPPEQQLKIFQSFEQAESSTTRKYGGTGLGLAISKRIVEMMGGSIWIESEPEKGSVFFFTIKVWCGTEEKYVSLSPEINFSNVRILAVDDEADVLAYFKEITQDLGIMCDTAMSGEKALELISKNNGYNIYFIDWKMPIMDCIWLAREIRLRRYDNSIITMISAAEWGDVAEEAKTAGIDKFLSKPLFPSAIAEIINECYGVNKRHIEKAPSEEIEGVFEGRRILLVEDMEINREIVRALLEPTKLKIDCAENGAEAVLMFEKFPTQYDVIFMDIQMPVMDGYDATRRIRIIEAELEKTLQRIMVTMKFSQANSHNCHDS

SEQ ID NO: 52845 - DNA, 621 bp, Unknown
  Obtained from environmental sample
  misc_feature (1)..(621): n is a, c, g, or t
gtgtcgattatgaatattgaaatgccaaaattatttttaaaacgtcctttatatgtacagttgttttttaccggtttcgcgtttgtgttgatgacccttttgagttatttttttgtaaacagaatcgtaaaagacaacattttgcgtaacacagaaagcgttcttgattatttgcaagcccaaattgaaaccgatattgcggaattgaaaaccacattgggcgcttattcacaaggtgtgcgcagtatgctcctaaacggagaagattcggacaagataagatattacaccgatgaaatatcaatttttttaagatcaatggaaaaaagcgaattttccattaacggcgtttacggttatattgaaaaatttcccggcggacatatttttcttaatggtcttaatatgcgcctgccggatgactattcgcctacggagcgtccctggtacaaggcgtctcttacggcaggcagaggtattgtagaaacgccgccttaccgcgatatggtaacaaacgaaattattataacttatttatgncatatttatgatgataaaggcgatcgtttgggcgttgtatgcgttgatgcccgcgccggctatattggagaaaaacaataa

SEQ ID NO: 52846 - protein, 206 aa, Unknown
  Obtained from environmental sample
  misc_feature (1)..(206): Xaa is any amino acid
MSIMNIEMPKLFLKRPLYVQLFFTGFAFVLMTLLSYFFVNRIVKDNILRNTESVLDYLQAQIETDIAELKTTLGAYSQGVRSMLLNGEDSDKIRYYTDEISIFLRSMEKSEFSINGVYGYIEKFPGGHIFLNGLNMRLPDDYSPTERPWYKASLTAGRGIVETPPYRDMVTNEIIITYLXHIYDDKGDRLGVVCVDARAGYIGEKQ

SEQ ID NO: 52847 - DNA, 828 bp, Unknown
  Obtained from environmental sample
  misc_feature (1)..(828): n is a, c, g, or t
atggaaaacaggtactcggacgcgcttgattactgcctgtcccaccggctgttaatcgtaacccttgtcctccttgttctggttttctcgttactgcaattcagcggcatcgggatgaacatgtatacccgcatccgcgttgacgacaatgttaatatcaatgtgtcaatgccccagggaaccgccatcgacgttaccgagggtatgctgttcaggctggaagagattgtcaaacgcgaagtgcaaggctacaaccacctgatcctcaccgcgcggcgcagcgggacaaatcaggggacgctccagattatcctgcctgaaccggcaaagcagacagacacgcctgattcgataatccgcaaacttacgcctatcacaagccagattcccgggataagggccagctacagggcggggcgcgggatcggaagcacgtcggcggttgagattgccgtcagttcgcgcaattatccggcgcttatggacaccgccaacgagatacacagtatcatcgagcgttatctgcccgatattgaaaaccctactgtcaacattgacgagggcgcgccccagcttcagattgaaattgaccgcgaccgcgccgcgagtttcggcctttcccttgcttcgattgcttcggaaatacgcacggctatggacggcactaccgccaccacaatgaccagcggcgaaaggctggtaaacgttcaggtgcagttaagggatgcagaccggcagggtctgcccaatctggacgcggttttcgtcatgagccgcaacggttcccgcgtttccctttccaacgtggcgcgatctcggccaatctga

SEQ ID NO: 52848 - protein, 275 aa, Unknown
  Obtained from environmental sample
  misc_feature (1)..(275): Xaa is any amino acid
MENRYSDALDYCLSHRLLIVTLVLLVLVFSLLQFSGIGMNMYTRIRVDDNVNINVSMPQGTAIDVTEGMLFRLEEIVKREVQGYNHLILTARRSGTNQGTLQIILPEPAKQTDTPDSIIRKLTPITSQIPGIRASYRAGRGIGSTSAVEIAVSSRNYPALMDTANEIHSIIERYLPDIENPTVNIDEGAPQLQIEIDRDRAASFGLSLASIASEIRTAMDGTTATTMTSGERLVNVQVQLRDADRQGLPNLDAVFVMSRNGSRVSLSNVARSRPI

SEQ ID NO: 52849 - DNA, 1635 bp, Unknown
  Obtained from environmental sample
  misc_feature (1)..(1635): n is a, c, g, or t
atgaatatatcagaatattccgtaaaacaccccgtaacggtattaatactttttgctttaattattggtatcgctgcgacattgctttcaaaactcgcgcttgatctttacccttcaattgatcagccgatttttacggtgtacacgcgttttccgggggcgggtcctgaagatatagaacgcaatgttacggcgcgtcttgaacgttccctttcctcgtccagaagactggtaaacatgacaagcaattcccagtttgaaaccagcaatatccgccttgaatttgaatacggaaccgacatggacaaggcggtaaacgacacccaggttcttcttaaccgcctggtaaactcccttcctgacggcgtccagactccggtcgtgcgccgttttgacgcaagcgcgatgccgattatgcggcttgtcgtaagggggaattatccgccggatcaactgcgtattttcgccgaggatgaaatccagccgagcatagagcgtgttgaaggggtggccgcggccgaagttacgggcggcacaacccagattgtcaaggtcgaagtttcgcttaaccgcctcgccgcctttaatttgacgttaaacgacatttcaaattcgcttaaagggcaaagcgtccttgcttccggcggcaacctgcgcaggggaacccgcgagtaccagatcatgacgcaggaagagcttgtcagtatcgatcagataaaacggctggttgttaaaacagtaaatctccccgcaagcggcggcgcaagcgcttccggtggaggcgcaaaccgcacgcaggcggtgaggatagaggatgtcgccgatgtgtaccttggctacaatgacaacgccgcaagggtaagcatcaacgggcagagcggcgtttacatacaggtaaccagcgaaagcggcagcaatcaggtaaaggtgtccgacaatgtcaggtcggcgttaggcgaaattaacgccgagctgccccaggggatcacccttgaggtattgtcagataacaccagcatgatcagggcgacattaaaccaggtatataacaacgcgtggcagggcggcttgttggcaatgctcatcctgctgatattcctgcggaacataaggggcaccattataatcgggctttccgtccctatttccatgctgcttacccttatgtttatgtcggtattcgggtttacccttaacctccttaccatgaccgggcttatcatgggcatgggcatgacgatggacagttccatagttatcctggaaaatgtccacaaataccgggaacgcggggcaaaggccgccatcgccgccatcctgggaagccgggaaatgatgagagccattatcgcttccgcggcgaccaccctgtgcgtttttataccgcttattatctataagaacgatcttaaggaaatgggccagctttttaacgaccttatctttaccgtggtaatttctttaagcgcttctctgctggtcgccattactttggtaccaagcctctgcggcgcgatactgccgctgcaaacacgaatacaaaagccgttgaagaacaggctgctgcgtaaaatagacgacgtgatggagaacttttttaaagggtatggaaaacaggtactcggacgcgcttga

SEQ ID NO: 52850 - protein, 544 aa, Unknown
  Obtained from environmental sample
  DOMAIN (3)...(544): AcrB/AcrD/AcrF family
  misc_feature (1)..(544): Xaa is any amino acid
MNISEYSVKHPVTVLILFALIIGIAATLLSKLALDLYPSIDQPIFTVYTRFPGAGPEDIERNVTARLERSLSSSRRLVNMTSNSQFETSNIRLEFEYGTDMDKAVNDTQVLLNRLVNSLPDGVQTPVVRRFDASAMPIMRLVVRGNYPPDQLRIFAEDEIQPSIERVEGVAAAEVTGGTTQIVKVEVSLNRLAAFNLTLNDISNSLKGQSVLASGGNLRRGTREYQIMTQEELVSIDQIKRLVVKTVNLPASGGASASGGGANRTQAVRIEDVADVYLGYNDNAARVSINGQSGVYIQVTSESGSNQVKVSDNVRSALGEINAELPQGITLEVLSDNTSMIRATLNQVYNNAWQGGLLAMLILLIFLRNIRGTIIIGLSVPISMLLTLMFMSVFGFTLNLLTMTGLIMGMGMTMDSSIVILENVHKYRERGAKAAIAAILGSREMMRAIIASAATTLCVFIPLIIYKNDLKEMGQLFNDLIFTVVISLSASLLVAITLVPSLCGAILPLQTRIQKPLKNRLLRKIDDVMENFFKGYGKQVLGRA

SEQ ID NO: 52851 - DNA, 777 bp, Unknown
  Obtained from environmental sample
  misc_feature (1)..(777): n is a, c, g, or t
atggcgcaaggcggcggggaacgacctgcgcgtccgcagaatgacaacgctcaaagcgatggagaacgaccggcgcgtccgcaaaatgtcaacgcgcaagaaggcggagaacgaccggcgcgtccgcaaaatgtcaacgcgcaaggaggcggggaacgtccgcagcgtccgcagaacgaaaacgcgcaagaaggcggaaggccgtctccgggaaacggagagcaggctcaagggcaggctccgaggggcggctcgcgtaacgccaccacggtaagagttactcccgtatcgccgggtacaatagaaaaaagcgttatcattaacggggaaatacttgcgcgtaaccaggtaactatttatccgactgtgggcggaaggcttgttgaaacaagactcggcatcggggacagggtaaaccgcggcgatgttgtcgccatggtagacccgtcaaggccgggagaagtttattcgcgaagcccggtagttgcgacggtttccggaacggtattgcaggcgcctttcagcataggcgacactgttacggcgcagtcggcagtttatgtagtaggagacctttcggctctgttagttgaaacctacattcccgaaaggttcgtggcggtcgttacgcagggtttgcgggcttcattgaagctggaagccatgccaaatgaaacatttttggctgaagtattcgagataaacccggtgcttgatccggcgagccggaacatgaggatacgcctgaggtttgtaaaaccggatccgcgcatttaa

SEQ ID NO: 52852 - protein, 258 aa, Unknown
  Obtained from environmental sample
  misc_feature (1)..(258): Xaa is any amino acid
MAQGGGERPARPQNDNAQSDGERPARPQNVNAQEGGERPARPQNVNAQGGGERPQRPQNENAQEGGRPSPGNGEQAQGQAPRGGSRNATTVRVTPVSPGTIEKSVIINGEILARNQVTIYPTVGGRLVETRLGIGDRVNRGDVVAMVDPSRPGEVYSRSPVVATVSGTVLQAPFSIGDTVTAQSAVYVVGDLSALLVETYIPERFVAVVTQGLRASLKLEAMPNETFLAEVFEINPVLDPASRNMRIRLRFVKPDPRI

SEQ ID NO: 52853 - DNA, 1221 bp, Unknown
  Obtained from environmental sample
  misc_feature (1)..(1221): n is a, c, g, or t
ttgtacggtgtcaatgtaacgaaccccattaccgtggcggattttctggaaaccgtatctcttcttaataccgatctgtgccaactgtgggccggaacctttaccagcctggacgcgcgggtacagagaaatacctcgaccgcaaagctggatttattcctgtatctggcggtagtgctggtatcgctgggaatcgccatcggttttgtggcgttcatcacgctggatattaacaagtcggtcagaatccttaaaaccttgttcaaggggctcaacgaaaacgatttaaccctgtctttgaaggtcaattccatggatgaattcggcgagcttatgacggctttcaacggattcctcaatatactccgatccacatttggaagtttcaaacagagcgcccaactggtcgccaattcggtttttgatctttcctcatcatcaaaagaaatttcaaccaccgccaacgaacagtcctccagcgtttccgagatagtcagcacgatggaaggcagcaagaacctgtccgagcagatcgcctataaaaccaccgaggttgccaatctcgccaaagaaacgcaggagttgagcagtaaaggcgctgaactaagggaagccaaccaaaccatgatggaagacataagaaatcaaaaccagaagatcataagcgagatacgcaacctttcggacatgattatcaggatcagcgaggcaatcaggatcatcgacggaatcgccgatcaaacaaaaactgatagcgtttacgcctcgctagaggcgtcgtcttcgggagaagccggagcgcggttctcggttgtcgcctcggaaataaggcgtttcgcggataacgtggttgaatcaacaaaggaaatcaaacagaagatagaagaagtgcagggcgcttcccagaccttaatcgccgaagccaacaacggctcaaggcagattgaaataggctatgaaagaatgagcgagcaaaaaatcgtctttgagcatatcgttgacaactcccagaatgtcgcgacccgttcgcagcagatttcaaatttaagcaagcagcaggaactggcttcgtcgcagattttcacggctctcaaggaaatatcagccggggtaaaacaatttgttatagccacttcatccacttccaagatcgcggacagcttaaacggcatgtccgaggacttaaaaggaagagtggaaaaataccgtaccgaaaattaa

SEQ ID NO: 52854 - protein, 406 aa, Unknown
  Obtained from environmental sample
  DOMAIN (55)...(124): HAMP domain
  misc_feature (1)..(406): Xaa is any amino acid
MYGVNVTNPITVADFLETVSLLNTDLCQLWAGTFTSLDARVQRNTSTAKLDLFLYLAVVLVSLGIAIGFVAFITLDINKSVRILKTLFKGLNENDLTLSLKVNSMDEFGELMTAFNGFLNILRSTFGSFKQSAQLVANSVFDLSSSSKEISTTANEQSSSVSEIVSTMEGSKNLSEQIAYKTTEVANLAKETQELSSKGAELREANQTMMEDIRNQNQKIISEIRNLSDMIIRISEAIRIIDGIADQTKTDSVYASLEASSSGEAGARFSVVASEIRRFADNVVESTKEIKQKIEEVQGASQTLIAEANNGSRQIEIGYERMSEQKIVFEHIVDNSQNVATRSQQISNLSKQQELASSQIFTALKEISAGVKQFVIATSSTSKIADSLNGMSEDLKGRVEKYRTEN

SEQ ID NO: 52855 - DNA, 546 bp, Unknown
  Obtained from environmental sample
  misc_feature (1)..(546): n is a, c, g, or t
gtgcgggtcattaacaccattaccgaccagacgaaagtaattgcgtttaacgccgcgctggaagccgccggcgcgggagaaacgggcaaacgtttcgcggtggtcgccgccgaggtaaacaggctcgcggacgacatagccgtccttacccgccagattcgggaacaggtcgaggaaattcaaagttcttcctcttcgctgatcgtatacagcgaggaaggttccgacagaatcgccgagggttataaacttatcaaggatttggaagacgtttttaaggagatcagggcgggcgcggaaataacttccaaccaggcgcaggccatcacggtctccacgcagcagcaattgaagtccagcgaaaaagtcagtttcgccatttccgaggtttcccagggggtaaaacatttcatcggcgctgtcgagacggcggccacctccgcgggaacgctgacggaacgcacccgcgagcttgaacgcttcctgacatcgcagggcgcggcaggcgttaaagaaacaatcggacagggtgaacatggcggttga

SEQ ID NO: 52856 - protein, 181 aa, Unknown
  Obtained from environmental sample
  DOMAIN (1)...(165): Methyl-accepting chemotaxis protein (MCP) signaling domain
  misc_feature (1)..(181): Xaa is any amino acid
MRVINTITDQTKVIAFNAALEAAGAGETGKRFAVVAAEVNRLADDIAVLTRQIREQVEEIQSSSSSLIVYSEEGSDRIAEGYKLIKDLEDVFKEIRAGAEITSNQAQAITVSTQQQLKSSEKVSFAISEVSQGVKHFIGAVETAATSAGTLTERTRELERFLTSQGAAGVKETIGQGEHGG

SEQ ID NO: 52857 - DNA, 555 bp, Unknown
  Obtained from environmental sample
  misc_feature (1)..(555): n is a, c, g, or t
atgacgactgaacaaatgctgcaaatcagcggactccgtcttgctccttatatacaggttgccacaaaccttatcggcaaatcgcgcgagggcggcggaaatatgttccgtcatcagattgacactatgggaattcttatcgactacggttatgttaatccggtattgctgaaagcttcgcttgttcatgatgttcttgaagatatccccgattttaatcacaatgttttactgtcaattgacaccgaaagccttgccgtttataaccttgttcttgaagttacgcgaaggcacggcgaaacaaaacccgattttcttacccgtatacttgaaacaggctcttttgacgcaaaaactttaaaagtagcggatcgtatatccaatatgatttctctcggttttgtaaacaacctcgcctttgtagagcgttatataaacgaaacggaaaaatatctgttccctcttgccgagcaggtaaatcgttatatgctgatagaacttacagaccttgtaaaaataaaacgcaaatatctggaagacttgaaacaacaatga

SEQ ID NO: 52858 - protein, 184 aa, Unknown
  Obtained from environmental sample
  misc_feature (1)..(184): Xaa is any amino acid
MTTEQMLQISGLRLAPYIQVATNLIGKSREGGGNMFRHQIDTMGILIDYGYVNPVLLKASLVHDVLEDIPDFNHNVLLSIDTESLAVYNLVLEVTRRHGETKPDFLTRILETGSFDAKTLKVADRISNMISLGFVNNLAFVERYINETEKYLFPLAEQVNRYMLIELTDLVKIKRKYLEDLKQQ

SEQ ID NO: 52859 - DNA, 900 bp, Unknown
  Obtained from environmental sample
  misc_feature (1)..(900): n is a, c, g, or t
atgaaaaacattatcaaacaaatctgtgttatcgcttttgtagcgataatcggcttttcttttttcgcttgcggcggcgatgacgggaatggcaacaccagcggcaaccgcggaaataacaacagcggcaacggcggaaataacaacggcggtaacggcgggaacaacaacggcaacaacagcggcggcaataacaatggaaacaacaacggaaacggaactacccccaaccttccgcccgcaactccgttacattcaaaatggccgttttatgtgggagcagccgctcccgccggagcatttaacacaagcgacggacagtattctttgcttgggcattttaatgtgctggttgcggaaaatgatatgaaacctgaatctgtaatgccaagcggatggcagaattcggcgtcatctcccgcttacaatgcatcccaatcataccgttggacagaagccgataaattggttaattacgctcaggcgaataacacaaaaatacgcggtcatgttcttttctggcatgaacagactcccgcagtcttttttaagacaggtaatttaacaagcgcttatgtttcaaaggaagtgttttatacccgaatggaacagcatgtaaaaaccgtttttcaaaaatacggcgacaaagttctctggtgggacgtagccaacgaaactgtaggagatgacggcaatcccagagttacaggcggagccaatgtcgcgggcagtgacggcaaatcgggttttacagcggtcatggaagcgtcgggtcttactggcgataaccgctatgagtggatagtaaacgcttttaaatatgcccgaaaatatgccgatgaaaacggaggacaaaatgtaaaactcttccttaccgaatacgatattgaaaaaagttag

SEQ ID NO: 52860 - protein, 299 aa, Unknown
  Obtained from environmental sample
  SIGNAL (1)...(23)
  DOMAIN (81)...(299): Glycosyl hydrolase family 10
  misc_feature (1)..(299): Xaa is any amino acid
MKNIIKQICVIAFVAIIGFSFFACGGDDGNGNTSGNRGNNNSGNGGNNNGGNGGNNNGNNSGGNNNGNNNGNGTTPNLPPATPLHSKWPFYVGAAAPAGAFNTSDGQYSLLGHFNVLVAENDMKPESVMPSGWQNSASSPAYNASQSYRWTEADKLVNYAQANNTKIRGHVLFWHEQTPAVFFKTGNLTSAYVSKEVFYTRMEQHVKTVFQKYGDKVLWWDVANETVGDDGNPRVTGGANVAGSDGKSGFTAVMEASGLTGDNRYEWIVNAFKYARKYADENGGQNVKLFLTEYDIEKS

SEQ ID NO: 52861 - DNA, 693 bp, Unknown
  Obtained from environmental sample
  misc_feature (1)..(693): n is a, c, g, or t
ttgacaggagcggaggcaaaaacaacttattatttctggattaaagcgaaaaatccttttggaactagtgatttttcacctgtaggaaaagggaaaacatttctaaagcaaaattggaatgcaggattaaagactgatgctgtgtcttcaactggaatacttttatcgtgggctcagcaaagcgtggatttttcgctcgaatatacttatcatctttattgctctgttgatactcaggataattttaaagttgtacaatatggtaccccttcatatcctaaagcgggagtttctgcttcaccaaatacaacatattatttctacgttacacttgcacataaaggtagtaatgatccgagttatatttcagaaactataatggttagaaccggttcaccgccgcccccgccgccgcctacaccgccgacgccgcctcctgcggctgcatcaacgccgccctcaggaggaggttcgggagaaaaaatgtgttcttcatgtgtcggcagcggaatgtgtaattattttacgaatgggtgtagttccggaaaagttaagtgtactacatgtcgcggttcattttcaaaaatagatactaaagattgtaaaacttgtaatggttccggagatgttacatgcggaatatgtagtggttccggtaaatgcaaagtttgtaaagggtcaggttatcgttaa

SEQ ID NO: 52862 - protein, 230 aa, Unknown
  Obtained from environmental sample
  misc_feature (1)..(230): Xaa is any amino acid
MTGAEAKTTYYFWIKAKNPFGTSDFSPVGKGKTFLKQNWNAGLKTDAVSSTGILLSWAQQSVDFSLEYTYHLYCSVDTQDNFKVVQYGTPSYPKAGVSASPNTTYYFYVTLAHKGSNDPSYISETIMVRTGSPPPPPPPTPPTPPPAAASTPPSGGGSGEKMCSSCVGSGMCNYFTNGCSSGKVKCTTCRGSFSKIDTKDCKTCNGSGDVTCGICSGSGKCKVCKGSGYR

SEQ ID NO: 52863 - DNA, 2115 bp, Unknown
  Obtained from environmental sample
  misc_feature (1)..(2115): n is a, c, g, or t
gtgtttctcgcctataatgcattaaggcgcgtccgcgccctcgctttggtattgctgttcgcgtccgcgacggcgtctcaagaggcgctcgcggaaagcgatagcgttatcataattgacggcgacgattttgaaataactgtcaaacaacgcgccgccgccacgctctctccgtcgtcccggattataaaagcctcggagttccgcggtaagttcgccgacctgccgtccgtgttggaatcggtttccggcgtggagatacggtctaccggcgggtacgggcagtacgccgagagcgcgatacgcgggtcgtcggcgctcggaacgcgtgtttatcttgacggcttgctgctcaatagcgcctcgaccggggctgtggatttgagcaagattccgcttgacaggataaccgaaatccgcgttaccaagagtacgtccggcctccgtcagatgggggccgggatgggcggggtcattgaactgtttacggcggacggaggcacggggcaaaacatcatcggtatagatattgaagccggaagtttcggtttgctaaagggcggggcgataatcaagtattcagacaaaaaaactggattgcttcgtcgctctgctcctcgcaatgacgtcattgcgagcgtagcgaagcaatccagaaagccacatttactaaaaacaacccatcaaataaacatagacgtatcaaaaagcgacaacgactacccgttcatccacgacaacggcactaccctatccacattgcgcgatccggaccctgcgtgggacgatacgggtatgcgtaagagtaataattactacaggtcgatagacgcggcgtacagtttatccgcggatatatctgaaagccatagaatcacccagcaaataagcgcaggagcgtacggccaagggttgttcgcctatcattacaaggataatcagagcggttcgacaagcgggaatactatcacgtatagtattgattatcggggcgatatttctaatcgtctgaccgtgggcggcgaggcgagcggaattgtgaggcgctctgtgttgagcgaccccgacgcgcatttcgggcttggcggggcgaaggagattgagtccggcggggtcacggcggattttttgcttgacgcgcggtattcgttcacggagaatttttatgcggcgggattaaccggcgcgcggtacgacggttacgcccaagagagcaaagagcggagtgagaagcctcggatgagcaggtgcgagtacagggcgggggcggaggcggtagtcaaggcgttgatcggagagtcttcagaaacggaaacggcgttacgcgccgtatataaatatgaaattgacacatcaagcgcagcgtttaatcagtggtcgtccgcgccgcaaaattatcatctcggctatccggtcgccgaagcggtttttaagatgggcgtcaatccgataaccgttcagttcagcgccgccgcgtctaagcgcagtcccacgttcttcgagcgtttcggctggagcagcggttttatctcgaatccggatttgagggaggagacgcgcttggaagccgacgccggggtgtcaatagatatgggtgaatacggcgcgtccgcgtcgatcttcgccggaaaggcggacgacaagattaagagcattccgtatagcaacagtttcgtcaaggtgatgaacttcgccgacacgagattttacggagcggaacttgacgttaacgcgaaaccgtcgcgtttcttcacggcggaattgagcgtcgcgtatctgagaagtattatttacggagcgaaagacccgagttggataggtaagatagaaccgtttattcctgagctttcgggatttttgaagacggaaatcgacgtatggaaaatcagtgtcggtcacggtatcaaatatgaaagcgagtgttatttgaacatagagaacatcgtaaaacgcccgcgacagagtgaattaagcgcgtgggcgtcgtataaaatgtatggatttttgtcgttgcgttaccgtgtcgataattatctcaacaccgcgaatttcgattttctcgataacccgaagccgaaaaggacgcacgcagcgtcggcggctttaaacttttaa

SEQ ID NO: 52864 - protein, 704 aa, Unknown
  Obtained from environmental sample
  SIGNAL (1)...(27)
  DOMAIN (51)...(159): TonB-dependent Receptor Plug Domain
  misc_feature (1)..(704): Xaa is any amino acid
MFLAYNALRRVRALALVLLFASATASQEALAESDSVIIIDGDDFEITVKQRAAATLSPSSRIIKASEFRGKFADLPSVLESVSGVEIRSTGGYGQYAESAIRGSSALGTRVYLDGLLLNSASTGAVDLSKIPLDRITEIRVTKSTSGLRQMGAGMGGVIELFTADGGTGQNIIGIDIEAGSFGLLKGGAIIKYSDKKTGLLRRSAPRNDVIASVAKQSRKPHLLKTTHQINIDVSKSDNDYPFIHDNGTTLSTLRDPDPAWDDTGMRKSNNYYRSIDAAYSLSADISESHRITQQISAGAYGQGLFAYHYKDNQSGSTSGNTITYSIDYRGDISNRLTVGGEASGIVRRSVLSDPDAHFGLGGAKEIESGGVTADFLLDARYSFTENFYAAGLTGARYDGYAQESKERSEKPRMSRCEYRAGAEAVVKALIGESSETETALRAVYKYEIDTSSAAFNQWSSAPQNYHLGYPVAEAVFKMGVNPITVQFSAAASKRSPTFFERFGWSSGFISNPDLREETRLEADAGVSIDMGEYGASASIFAGKADDKIKSIPYSNSFVKVMNFADTRFYGAELDVNAKPSRFFTAELSVAYLRSIIYGAKDPSWIGKIEPFIPELSGFLKTEIDVWKISVGHGIKYESECYLNIENIVKRPRQSELSAWASYKMYGFLSLRYRVDNYLNTANFDFLDNPKPKRTHAASAALNF

SEQ ID NO: 52865 - DNA, 402 bp, Unknown
  Obtained from environmental sample
  misc_feature (1)..(402): n is a, c, g, or t
gtgataatgggaaacggaaaaaaatcaaaagataaattccgtcttgtggatcttcttgttatcctgatctgtctttttggagcgttctacagcgttaacatgttttggagtgatctgtttcaaaccctcaatgggcaaaacaaaacgcccattggcactgtttccgtaaaaaagaatatcgtacaacgccgtatgtcggacagggtagtatgggacaggctgattagggaatctcccgtatattccaacgacttaatccgtgtgggagataattcagagatcgaccttcatgtaggtggaaacagcctaaatataaatgaaaatacgcttcttcgtcttcattacgacaatgaaacgggcgaatttcaaattgatctgaactccggcagtataggggcttga

SEQ ID NO: 52866 - protein, 133 aa, Unknown
  Obtained from environmental sample
  misc_feature (1)..(133): Xaa is any amino acid
MIMGNGKKSKDKFRLVDLLVILICLFGAFYSVNMFWSDLFQTLNGQNKTPIGTVSVKKNIVQRRMSDRVVWDRLIRESPVYSNDLIRVGDNSEIDLHVGGNSLNINENTLLRLHYDNETGEFQIDLNSGSIGA

SEQ ID NO: 52867 - DNA, 480 bp, Unknown
  Obtained from environmental sample
  misc_feature (1)..(480): n is a, c, g, or t
atgatgatgagggatatgttgaaaaaaaggaataaaaaccggaaagaagaaaacgtaggatcaccgcctatcggtataggttgcggcattaacacgggcattgttacagccggacaaataggctccgacctccgcatggaatacaccgtcataggcgatccggttaacctcgcttcccgtgttgaggcgcttaacaaacctttgggcactgatattcttatcaccgaaaatacatataatctggtaaagaaattttttatcaccgaagaaatgcccccggtaacggtaaaaggaaaagaaaaacccatacgcctctttgccgtagtaaattttaatttttccgcaatgaatataagccccgccgcttcggaacctgtgactcttgcacaagtgcgaaagattttgggaatagagacaaaggatatttcaaaggcgaatgttaacgccgaagaaattaagtataaaattggcggtaagtga

SEQ ID NO: 52868 - protein, 159 aa, Unknown
  Obtained from environmental sample
  DOMAIN (1)...(110): Adenylate and Guanylate cyclase catalytic domain
  misc_feature (1)..(159): Xaa is any amino acid
MMMRDMLKKRNKNRKEENVGSPPIGIGCGINTGIVTAGQIGSDLRMEYTVIGDPVNLASRVEALNKPLGTDILITENTYNLVKKFFITEEMPPVTVKGKEKPIRLFAVVNFNFSAMNISPAASEPVTLAQVRKILGIETKDISKANVNAEEIKYKIGGK

SEQ ID NO: 52869 - DNA, 1191 bp, Unknown
  Obtained from environmental sample
  misc_feature (1)..(1191): n is a, c, g, or t
atggagagatgccgcttttttcttanccaaccgccgatgccgcgttgtcaacatggtatttgtcacgagcggttttttcttacgcggggaattgatacaaaacttatgaatgttttccgcgaaaacagtgtaaaagagcgggaaaacgccgaaatggggcagacaatacttatcaacgcttcgcctatatttaacaaagcgcaaagctcaatctctcttgcggcgatttttttccccatacaggaaggaagcggctgcgttttgttctctaccgaaaacctgaacgaaagtttcggtatgggcgttaatacgtctttccttattaactccacaggagacattatagcggacgccgacatagaaagggtaaaaacttatgtgaatctgtcgaaacaggaaattatcaaacaaatttttaacagctccgaaagaaataagcaaatgttagccgaacttgatgttcagctaacgcaaaattacccgtcttcttcctcttttttttcatatttgtgggagaaaataagcaaaaacgacaagcataaagaaacaaaaaaagcccgccactaccttgcctatacgaggctgaacacggcggggtgcgttgtaatcaccacaatcgaatacgacaaggtttttgaaggcataaacgccaccacccggcgcaacctctaccttaccgccgcgattttatttatctcaataatgtgtatctggtttttcgccaaaagtatttccgtgccgcttaaagctctggcggaagcggcgcatatgatagaaggcggcgtttttgacattgaacttcatccggcaagccgcgatgaaattggagtattaacgtccagttttaaaaaaatgtgttccgcgttgaatatcttcggcaagtttaccaaccgtgacattgcggtacaggcgatgcggggagaaattaaaccgggtggaatgtccaaacacgccacaatgtttttttctgatatacggggctttagggaaaaatctgaaaatttggtaaagacattcgtcagtgaagtttccgatagtatcgttttttggcttaacgattatttatcaaatatggtttactgcgtagaaaagaccagcggcattattgacaaattcatcggggacgccgtaatggcgcattggggaacggccaccacatcgggaagtccgcagaaagaggcttttagatga

SEQ ID NO: 52870 - protein, 396 aa, Unknown
  Obtained from environmental sample
  DOMAIN (222)...(291): HAMP domain
  misc_feature (1)..(396): Xaa is any amino acid
MERCRFFLXQPPMPRCQHGICHERFFLTRGIDTKLMNVFRENSVKERENAEMGQTILINASPIFNKAQSSISLAAIFFPIQEGSGCVLFSTENLNESFGMGVNTSFLINSTGDIIADADIERVKTYVNLSKQEIIKQIFNSSERNKQMLAELDVQLTQNYPSSSSFFSYLWEKISKNDKHKETKKARHYLAYTRLNTAGCVVITTIEYDKVFEGINATTRRNLYLTAAILFISIMCIWFFAKSISVPLKALAEAAHMIEGGVFDIELHPASRDEIGVLTSSFKKMCSALNIFGKFTNRDIAVQAMRGEIKPGGMSKHATMFFSDIRGFREKSENLVKTFVSEVSDSIVFWLNDYLSNMVYCVEKTSGIIDKFIGDAVMAHWGTATTSGSPQKEAFR

SEQ ID NO: 52871 - DNA, 435 bp, Unknown
  Obtained from environmental sample
  misc_feature (1)..(435): n is a, c, g, or t
ttgattgcgaggggcggcattaaagtgaccgcagtttctacgcttgccgaaattacaaaacagggaacaagcggctatgacgcaataattcttcccggcggaatgcccggcactgcaaatttggcggcttcaaaagagacaggcgcgctcgttaaagaaatggcggcaaacggaaaactggtctgcgccatttgcgccgcccccgctcttgtacttgctccgcttggcttgcttgacggcaaaaaatttacctgctatccgggcatggaagaaaaagcaacaaacgggaaatggtcggacgaccgagttgtaacggacggaaatttcatcacaagccgaggcgcgggaacagcgggcgaatttgccgctgcgataattgaaaaattacttgataaagccgcagcgcagaagctggcggagacggttttactttaa

SEQ ID NO: 52872 - protein, 144 aa, Unknown
  Obtained from environmental sample
  DOMAIN (2)...(130): DJ-1/PfpI family
  misc_feature (1)..(144): Xaa is any amino acid
MIARGGIKVTAVSTLAEITKQGTSGYDAIILPGGMPGTANLAASKETGALVKEMAANGKLVCAICAAPALVLAPLGLLDGKKFTCYPGMEEKATNGKWSDDRVVTDGNFITSRGAGTAGEFAAAIIEKLLDKAAAQKLAETVLL

SEQ ID NO: 52873 - DNA, 663 bp, Unknown
  Obtained from environmental sample
  misc_feature (1)..(663): n is a, c, g, or t
atgaaatatcaagttatttatgcggatccgccatgggcatatttatggggaactggaaaagatggtggtaattttgcccctgaaaaacactacaaaactatgtctacagacgagatttgttctgtcgatgtaaaatcgctgcgagacaaaaattgtgccttgtttctatggtcaacaatgccaactttacctgatggtattaaagttatggaagcatggggatttaaatataaaacatgtgcttttgcatgggtaaaaacaaaaaaagatggtatgcctcttgctggaatgggtagttatacaaagtcgaatattgaggtttgtttacttggtatgcgtgggcatattaagtcagtagataaaacaattccacagattgttatgcacgaaagaataggacactctgtaaaaccacctgttgttcgagaaagaattgaaaaattatttggtgatgttggtcgaattgaattatttgcgcgccaaaaaattgatggatgggatgccatcggttacggaattgatggaataagtattgacgaaagaataaagcagatcaataatccagaatatgttttttcacatattgaaacaaatgaacggataactggtgtaaaacactataacaacaaccaaaatttttattctcataaggaattattttaa

SEQ ID NO: 52874 - protein, 220 aa, Unknown
  Obtained from environmental sample
  DOMAIN (3)...(172): MT-A70
  misc_feature (1)..(220): Xaa is any amino acid
MKYQVIYADPPWAYLWGTGKDGGNFAPEKHYKTMSTDEICSVDVKSLRDKNCALFLWSTMPTLPDGIKVMEAWGFKYKTCAFAWVKTKKDGMPLAGMGSYTKSNIEVCLLGMRGHIKSVDKTIPQIVMHERIGHSVKPPVVRERIEKLFGDVGRIELFARQKIDGWDAIGYGIDGISIDERIKQINNPEYVFSHIETNERITGVKHYNNNQNFYSHKELF

SEQ ID NO: 52875 - DNA, 492 bp, Unknown
  Obtained from environmental sample
  misc_feature (1)..(492): n is a, c, g, or t
gtgttagtgatggtcagttttcatactcccatgcttcttgcaatggcagtaatggggattgttttttttgcagtttcaaaaattcatttgtctgatgtcgcctttatcgtcaaaatgatggccttgtttctcgccctgaacctgatagcagtttatctcttttcacctgaagagggggtaaaaatctacgggaccagaaatgccattgccgaaggagtcggacgcttcaccttagtatgggaacagctcttttatgaattncatatatttttaaagtacgtcacgatcatctttcctgccatactccttatcgttacaacacacccaagcgaattgccctcgtccctgaatctcataggtgttccctacaccgccgcatattcggtgagcctgacactgcgctacatacctgacattcagagggactttgaaacaatacccaggctcagcaggcacgcggcctggagctatccaaaaaagcctcgtggttaa

SEQ ID NO: 52876 - protein, 163 aa, Unknown
  Obtained from environmental sample
  SIGNAL (1)...(24)
  misc_feature (1)..(163): Xaa is any amino acid
MLVMVSFHTPMLLAMAVMGIVFFAVSKIHLSDVAFIVKMMALFLALNLIAVYLFSPEEGVKIYGTRNAIAEGVGRFTLVWEQLFYEXHIFLKYVTIIFPAILLIVTTHPSELPSSLNLIGVPYTAAYSVSLTLRYIPDIQRDFETIPRLSRHAAWSYPKKPRG

SEQ ID NO: 52877 - DNA, 354 bp, Unknown
  Obtained from environmental sample
  misc_feature (1)..(354): n is a, c, g, or t
atggtacttgatgagcccacggcgggacaggattaccgtcattacaccgaattcatggaattccttctcggcctcaacagtaagcatcaaatctccctttttctaatcacgcacgacatgcaccttatgcttgagtatacttccagggcggtggttctttccgacgggctctgcgttgccgaccaggaaccgttccaggttctcaccgacgacggcatcatcgaaaaggcaagcctgaagaggacaagcctttacgatcttgcccttaaagccggccttcccgatcccaggggctttgtagggcggcatatcgcctgtgacagaagaaacaggaggaaaaggctcgaaacatga

SEQ ID NO: 52878 - protein, 117 aa, Unknown
  Obtained from environmental sample
  misc_feature (1)..(117): Xaa is any amino acid
MVLDEPTAGQDYRHYTEFMEFLLGLNSKHQISLFLITHDMHLMLEYTSRAVVLSDGLCVADQEPFQVLTDDGIIEKASLKRTSLYDLALKAGLPDPRGFVGRHIACDRRNRRKRLET

SEQ ID NO: 52879 - DNA, 303 bp, Unknown
  Obtained from environmental sample
  misc_feature (1)..(303): n is a, c, g, or t
gtgcaggccgattatcttcataatttagccccaaaagaacggtttatagaagcgattgcctgccttggcgcggttggaaattcagacacaacttccatacttggcttgcaacttgggcttattaatgttaaaacggaaagaacaggatcgtatgacgcggaaataacattggcggttgttcgggcgcttgggaatattggctctaacgccgcatttgatcaattattatatgttgaaaatttatcgtacaccgaagatattcaagctgcggcaagggaggcggttgatcgccttaaatggtaa

SEQ ID NO: 52880 - protein, 100 aa, Unknown
  Obtained from environmental sample
  misc_feature (1)..(100): Xaa is any amino acid
MQADYLHNLAPKERFIEAIACLGAVGNSDTTSILGLQLGLINVKTERTGSYDAEITLAVVRALGNIGSNAAFDQLLYVENLSYTEDIQAAAREAVDRLKW

SEQ ID NO: 52881 - DNA, 1272 bp, Unknown
  Obtained from environmental sample
  misc_feature (1)..(1272): n is a, c, g, or t
atgaaatatattaactttgataaaacgggcgcgtataagaaactttcaaagcaggcggaaaaggcttttctttttaaagataagcttgactcgaaaagggtgggggagtgccttgtcccgatggcggcggggcttaagtattcatgggcggcaaaagccgttgacgagcagaccgttaaattattgcaggagcttgcggacgagcaggagcttatagcgaaatacaaagcccttcttgacggcgaaatgatgaacacgggcgagaaacgtaaagtgcttcatcatctgtcgcgcggacagcagggacagcccgtaattgaaaacggaaaagatatcggggaattttaccgcaaagagcttgcgaggttctgcgattttgcctccgcggtgcatagcggaaaatacaaaggctccacaggcaaggattttactacggtagtgcagataggtatcggcggctccgaccttggtccgcgcgccatgtatattgctctgnataactgggcggtcaaggaaggcaaaaagaaacttgacgcgaaatttatttccaatgttgaccctgatgacgcttcagcggtaatcgcgtcctgcaatcttgaacagtgcctgttcattttagtttccaaaagcggcacgactcaggaaaccttggccaatgaactttttgtaaaagacaaacttaaaaaaatgggtcttcacccaagcaaacagatgatcgccgtaacaagcgagacaagccctcttgctcgtaacagcgagtatcttgactctttttacattgacgactatgttggaggccgttattcgtcatcatcagccgtcggcggctgtgttctgtccctcgccttcggtcctgatgtgtttagggagttccttgccggagccgccgaagcggataaaatggctttagaaaaagatattcttaaaaacgccgcccttcttgacgctctaatcggtatctgggaatgcaactttttaatgtacccgtacacggcggtcttaccgtacagtcaggctttatcacgtttccccgcgcacttgcagcagatggacatggaatcaaacggcaagcgtgtaaaccgctttggggaacctgtcaaatacggtaccggccccgttatttttggcgaaccgggaacaaacggccaacattcattttatcagcttcttcatcagggcacgggcattgtcccgcttcaatttatcggctttttcgaaagccagagaggcgatgacgtgaccgtggacggttcagtcagtcagacaaagtaa

SEQ ID NO: 52882 - protein, 423 aa, Unknown
  Obtained from environmental sample
  DOMAIN (51)...(423): Phosphoglucose isomerase
  misc_feature (1)..(423): Xaa is any amino acid
MKYINFDKTGAYKKLSKQAEKAFLFKDKLDSKRVGECLVPMAAGLKYSWAAKAVDEQTVKLLQELADEQELIAKYKALLDGEMMNTGEKRKVLHHLSRGQQGQPVIENGKDIGEFYRKELARFCDFASAVHSGKYKGSTGKDFTTVVQIGIGGSDLGPRAMYIALXNWAVKEGKKKLDAKFISNVDPDDASAVIASCNLEQCLFILVSKSGTTQETLANELFVKDKLKKMGLHPSKQMIAVTSETSPLARNSEYLDSFYIDDYVGGRYSSSSAVGGCVLSLAFGPDVFREFLAGAAEADKMALEKDILKNAALLDALIGIWECNFLMYPYTAVLPYSQALSRFPAHLQQMDMESNGKRVNRFGEPVKYGTGPVIFGEPGTNGQHSFYQLLHQGTGIVPLQFIGFFESQRGDDVTVDGSVSQTK

SEQ ID NO: 52883 - DNA, 780 bp, Unknown
  Obtained from environmental sample
  misc_feature (1)..(780): n is a, c, g, or t
gtgcatcttcttggaataatcaacgatgttctggatatgtcaaaaatcgaagcgggaaaattcgatcttgaaaaagttccgatgaatattgaaaaaatgctgatgaaggtaagcaatatcattattgataacattgaaaagaaaaatcaaaaacttaatgtaaacctggcaaaaggcattgatttggattatatcgccgacgatttaaggctgtcgcaggtaataacgaatctgctgtcgaacgccgtgaagtttacccctgaaaaaggggagatcactctcgccgttgaaaaaatcagaagcaaagggaattttaacacccttcgtttttcagtaaccgatacgggcataggaatgacagaagagcagatcgcgcggctgttcaacgcgtttgagcaggcggacggcagtatctcgcgcaagtttggcggcaccggacttgggcttgccatttccaaaaatatcgttgagaagatggacggccgtatttgggtagaatcgaaagcaggcgcgggctccagttttatttttgaggtagaccttgaacgcgcccctctccgggaggggactgcgcagaaatcgcctgaaataaaggcggaggcaactgttgaaacgccggatttgtccggggtaaatattattcttgccgaggatatggagattaatcgtgaaatctttattgcgcttctggaagatacccatattgccattgactgcgcggaaaacggcctgatcgcgtttctaaattcagggaaaaccccgaaaaatacgaccttataa

SEQ ID NO: 52884 - protein, 259 aa, Unknown
  Obtained from environmental sample
  DOMAIN (66)...(182): Histidine kinase-, DNA gyrase B-, and HSP90-like ATPase
  misc_feature (1)..(259): Xaa is any amino acid
MHLLGIINDVLDMSKIEAGKFDLEKVPMNIEKMLMKVSNIIIDNIEKKNQKLNVNLAKGIDLDYIADDLRLSQVITNLLSNAVKFTPEKGEITLAVEKIRSKGNFNTLRFSVTDTGIGMTEEQIARLFNAFEQADGSISRKFGGTGLGLAISKNIVEKMDGRIWVESKAGAGSSFIFEVDLERAPLREGTAQKSPEIKAEATVETPDLSGVNIILAEDMEINREIFIALLEDTHIAIDCAENGLIAFLNSGKTPKNTTL

SEQ ID NO: 52885 - DNA, 1236 bp, Unknown
  Obtained from environmental sample
  misc_feature (1)..(1236): n is a, c, g, or t
atggcatatgacgaagccatgttaaggctacgaattgcagcaatgcttccggaattaaatgaacgccaacgacggctataccttgcgaccgaagcgaaatcaatagggtatggaggggttacaagagtttccagaatatcaggcatatcaagggtaacaataaaccaagggctaaatgaattagaggacaacgccgccgacaacaatgaaataatcctatgccgaaggcgcggcggcggaaggaaaccagcagaattaaagcagccaggcattaggaaggcgctaaaaaacctggttgaagcgcataccaaaggggatccgacagcgccgctaatctggacaagtaaaagcgtccgcaatctgtcgacggcgcttaacggtaaagggtatacagccagccatgtgctggtttcaacaatgcttaaagaaatggggtacacgttacaggctgatcgaaaagacataacgataagcagccagcaccctgaccgtaacgcgcaattcgaatacatcaatgaacaagcgaaattgttttttctgaaaggcgcgcccgttctgtctatcgacgcgaaaaagaaagaaaagataggcaattttgcaaataaagggcgtgaatattacaaaaaaggggaagggccaaaagtgcttgaccatgatttccccataaaggaattagggagcgccgttccatacggcgtatatgacatattcaggaaccacggatttgtgagcgtaggcattagcgccgacacggcagagttcgcagtccagacaataagaaaatggtggcaattagtcggttcaatctcatatcctaaagcccgggagttattaataactgccgacagcggcggaagtaacggataccgaatacgtttatggaaagcgcggctgcagattctggctgacgagctgggaatagaaataacggtattgcatttccctcctggaaccagcaagtggaataagattgaacacaggctgtttgcgttcataagcaaaaactggcgcggcagaccgttaatctcattggcattgatcgttaatctgattagttcgacaaagataggagacggaaagaaagtagagtgtgtaattgacaggcataaatacgagcgtggcatagaaatatcagaggaggaatttgacgcaataaatattaagcatcataaatttcatggtgaatggaattataagattatgcctcatataaaaaatagaagaaaaaagttgtaa

SEQ ID NO: 52886 - protein, 411 aa, Unknown
  Obtained from environmental sample
  DOMAIN (92)...(403): Rhodopirellula transposase
  misc_feature (1)..(411): Xaa is any amino acid
MAYDEAMLRLRIAAMLPELNERQRRLYLATEAKSIGYGGVTRVSRISGISRVTINQGLNELEDNAADNNEIILCRRRGGGRKPAELKQPGIRKALKNLVEAHTKGDPTAPLIWTSKSVRNLSTALNGKGYTASHVLVSTMLKEMGYTLQADRKDITISSQHPDRNAQFEYINEQAKLFFLKGAPVLSIDAKKKEKIGNFANKGREYYKKGEGPKVLDHDFPIKELGSAVPYGVYDIFRNHGFVSVGISADTAEFAVQTIRKWWQLVGSISYPKARELLITADSGGSNGYRIRLWKARLQILADELGIEITVLHFPPGTSKWNKIEHRLFAFISKNWRGRPLISLALIVNLISSTKIGDGKKVECVIDRHKYERGIEISEEEFDAINIKHHKFHGEWNYKIMPHIKNRRKKL

SEQ ID NO: 52887 - DNA, 453 bp, Unknown
  Obtained from environmental sample
  misc_feature (1)..(453): n is a, c, g, or t
ttgtctggattactggagcttgcagataaagagtttttaggtatcagaaatttattatctaaatataaagattatgtttctagtaatatcgataaacatgatgaagaaatattacttgataaagtatctcttgtagagtttataaacacaaatcatcaattaaagcaacttaatcaaaaaattgctgatttatgtaaaattaaattaattgaatatatatacgatcaaagagacttaaaatatttgcaattgttagagataaaaacggtaaaagaattgaatgttgccatttcagaagataaggatttagcctgctatattgctcaaaaaatacttagtaatgaaaagcactcaacatttaatccggcaataggattattttacctcttctatgcacgtatttcaaaaaaaacagatcagaatgaaatattttcaatattaagggactgttaa

SEQ ID NO: 52888 - protein, 150 aa, Unknown
  Obtained from environmental sample
  misc_feature (1)..(150): Xaa is any amino acid
MSGLLELADKEFLGIRNLLSKYKDYVSSNIDKHDEEILLDKVSLVEFINTNHQLKQLNQKIADLCKIKLIEYIYDQRDLKYLQLLEIKTVKELNVAISEDKDLACYIAQKILSNEKHSTFNPAIGLFYLFYARISKKTDQNEIFSILRDC

SEQ ID NO: 52889 - DNA, 684 bp, Unknown
  Obtained from environmental sample
  misc_feature (1)..(684): n is a, c, g, or t
atgggcaaagccaaaccaaagtgggatgaaattttttccgctcttgaaaaatggcgagaggaaattattaccgaaaaaggagcggaagacccttccgtaacgactgtagcggaacagtaccgccgtgatccgtgggctgtgctggtttctacgattataagtttgcgtacaaaagatgaagtaaccattgttgcgtcaaagaggcttttagagaaggccggcaatccgaaagaattaaacgcaatgaaagcggaaaaaatagaaaaattaatttatcctgcgggattttacagaaacaaagcggcttcgcttaaaaaaatcgcttctattctgcttgaacaatatggcggcaaagtaccgtcatcaatggaagaactgcttgctctcccgggtgtcggcagaaaaacggcgaaccttgtgcttaccgaagctttcgatcttgacggcttatgcgtggatatacacgttcatagaatttccaaccgctgcggatggttaaacacaaaaactcccgaagacacggaaacggcattaagagaaatactgcctcgtaattattggaaacgtattaattatttgcttgttctttacggacagaaactatgccgtcctgtaagcccgttctgttctcaatgcgtaataaaaaaacattgttcgcataacggcatagtaaagtcaaggtaa

SEQ ID NO: 52890 - protein, 227 aa, Unknown
  Obtained from environmental sample
  DOMAIN (114)...(143): Helix-hairpin-helix motif
  misc_feature (1)..(227): Xaa is any amino acid
MGKAKPKWDEIFSALEKWREEIITEKGAEDPSVTTVAEQYRRDPWAVLVSTIISLRTKDEVTIVASKRLLEKAGNPKELNAMKAEKIEKLIYPAGFYRNKAASLKKIASILLEQYGGKVPSSMEELLALPGVGRKTANLVLTEAFDLDGLCVDIHVHRISNRCGWLNTKTPEDTETALREILPRNYWKRINYLLVLYGQKLCRPVSPFCSQCVIKKHCSHNGIVKSR

SEQ ID NO: 52891 - DNA, 588 bp, Unknown
  Obtained from environmental sample
  misc_feature (1)..(588): n is a, c, g, or t
gtgaggggaataacagaaaccaattatgaagaagctgtaaatttaatgaatgaagccggatataaaaacggcgccggaacacccgctcttgttattcgcataacgccaggccgcgatgccgagcgtgttggttcattaatggccaaagcatggaaagaaaagttaggtttgaatgtgcgcgtagaggtaattccttccggcaggtattttcaatccatgaaagaaagcgggtacaccgttggttctacgacatggataggagattttgccgacccttacgcgtttttacagctgttcaggtgcgattcaaatttaaatgatgcgaaattagatgatgccgattatgaagcgttaatcgatcaatcaatgatagaagaagggaaaatccgtttggaaaccttggccaaggcggaaaaacttttattggacagaggtgtagtgctgcccgtctttttcaatcctgctgtaaatattattgatacaggagaattggacggatggtatcctaatgcgttggacattcatccgtttaaatatatggcttttaaagcattccgccctctgcccggcgttgctcttgtaaaatga

SEQ ID NO: 52892 - protein, 195 aa, Unknown
  Obtained from environmental sample
  misc_feature (1)..(195): Xaa is any amino acid
MRGITETNYEEAVNLMNEAGYKNGAGTPALVIRITPGRDAERVGSLMAKAWKEKLGLNVRVEVIPSGRYFQSMKESGYTVGSTTWIGDFADPYAFLQLFRCDSNLNDAKLDDADYEALIDQSMIEEGKIRLETLAKAEKLLLDRGVVLPVFFNPAVNIIDTGELDGWYPNALDIHPFKYMAFKAFRPLPGVALVK

SEQ ID NO: 52893 - DNA, 2223 bp, Unknown
  Obtained from environmental sample
  misc_feature (1)..(2223): n is a, c, g, or t
ttgctggatgggtatgatcagaagcgtcattacggtaattgccaaaacagaaaaagagggttaacaataatgactgaaattttaaccattggcggtatgcactgcgccgcctgttccgcgcgcattgaaaaagcgttacgtaaattagaaggaattgaaaccgcctcggtaaaccttgccactgaaaaagcgatggttgtttttaatccgcaaaccttgcgcctttcggaaatcaaaaaagccatcatcaatacagggttcaaggtaattgaaacgtcaaaaaatactttagaccagtacaagatccgcaaagaaaaagaaataaaaacgctgtggaaaaaatttattgtcgctgcggttttggggcttcccctgctgtatatagcgatggctccaatgattaagcggatcaccctcccctttccgaaaattttgtctccgatggattttcctcttatttacgccgccgtacaatttgcattagtcatcccgattataattgcgggctataaattttataccattggttttaaaaatctttttcaacgcagtcccaacatggactcacttatcgctattggaactacatctgcggttgtttacagcgtttacaatttgtttcagattatcatgggtaattttcacgcggttgaatctttatactttgaaaccgccggtgttattatcgccctgattcttttgggcaagtcccttgaagcggcttccaaaagcagaacaagcgaggcgataaaaaaactcatgggtttgactcccaagaccgccataattatcgtcaacagcggttcaggaggaatatcggaaaaagaaatccacattgacgaagtagttgtcggcgacattatcatggtaaaacccggcgcgaaaatccccgtagacggagttgtaaccgaggggcaaagcgcggttgacgaatccatgctgacaggtgaaagcatgccggttgacaaaaagccgggcgatcctgtttacggagccaccattaacagcaatggcgttatccgttttaaggcggaaaaggtaggaaacgaaaccgcacttgcgcagatcataaaactggttgaagacgcgcaaggctccaaagcgccgattgcgcaaatggcggatattgtatcaggttactttgtgccggtagtctgcgccatcgcgcttgccgcaggcgcggcgtggtttatcgcggcttctttcggcgttgtcattttgcccgacggaaaatccgcaacagaattcgccctgacgatttttatttccgtactggtcatcgcctgcccctgcgctttgggactcgcaacacccacagcgatcatggtagcgaccggcaaaggagcggaaaacggcatcttgatcaaaggcggcgaagcgctggaaaccgcagggaaaattcaaacgattgtatttgacaagacaggtacgattaccgaaggcaagccggaagtaacggatatagttattagcagagagtggatagcaggtagtgaagaacaaaaggaggaattttttcttcaacttatcgccgcggttgaaaaaaattcagagcatccgcttgcttccgccattgtgcgcgaagcggagaaacgcgagcttacactgccgtctgtaactaattttaaagccatacccggcagaggcatagaagcaaaaatctcctctctctctctatccactactgactattcactgccaactaccaactaccaactgcctatcctcgtaggaaaccgcaaactcatggatgagcggagtatttcatttaccgaacttgaagccgcttccgacaggcttgccggtgagggaaagaccccgatgtttgccgctcttgacgacaaggctgctggaattgtggcggttgccgacgtgcttaaaccttcaagcaaaacggctcttgaaaagcttcacaaaatggggatacaaaccgcaatgatcacgggggacaataaaaaaacggcggacgctatcgcaaaacaggtggggatagaccgcgtgcttgcggaagttttgccgcaggacaaatccgccgaagtaaaaaaattacaggatgaaggacataaagtttcttttgtgggagacggcattaacgacgctccggcgctggcgcaggcggacataggaatcgccataggaagcgggacggacgtggctatggaatccgccgacatagtgcttatgcgctccgaccttggcgacgttcccacggctgtaatttaa

SEQ ID NO: 52894 - protein, 740 aa, Unknown
  Obtained from environmental sample
  DOMAIN (27)...(91): Heavy-metal-associated domain
  misc_feature (1)..(740): Xaa is any amino acid
MLDGYDQKRHYGNCQNRKRGLTIMTEILTIGGMHCAACSARIEKALRKLEGIETASVNLATEKAMVVFNPQTLRLSEIKKAIINTGFKVIETSKNTLDQYKIRKEKEIKTLWKKFIVAAVLGLPLLYIAMAPMIKRITLPFPKILSPMDFPLIYAAVQFALVIPIIIAGYKFYTIGFKNLFQRSPNMDSLIAIGTTSAVVYSVYNLFQIIMGNFHAVESLYFETAGVIIALILLGKSLEAASKSRTSEAIKKLMGLTPKTAIIIVNSGSGGISEKEIHIDEVVVGDIIMVKPGAKIPVDGVVTEGQSAVDESMLTGESMPVDKKPGDPVYGATINSNGVIRFKAEKVGNETALAQIIKLVEDAQGSKAPIAQMADIVSGYFVPVVCAIALAAGAAWFIAASFGVVILPDGKSATEFALTIFISVLVIACPCALGLATPTAIMVATGKGAENGILIKGGEALETAGKIQTIVFDKTGTITEGKPEVTDIVISREWIAGSEEQKEEFFLQLIAAVEKNSEHPLASAIVREAEKRELTLPSVTNFKAIPGRGIEAKISSLSLSTTDYSLPTTNYQLPILVGNRKLMDERSISFTELEAASDRLAGEGKTPMFAALDDKAAGIVAVADVLKPSSKTALEKLHKMGIQTAMITGDNKKTADAIAKQVGIDRVLAEVLPQDKSAEVKKLQDEGHKVSFVGDGINDAPALAQADIGIAIGSGTDVAMESADIVLMRSDLGDVPTAVI

SEQ ID NO: 52895 - DNA, 561 bp, Unknown
  Obtained from environmental sample
  misc_feature (1)..(561): n is a, c, g, or t
gtgaaaatggacgaaagactggcgcaaattcccggcaggattaaagaattgagggaaatccttgagatcagcgtgatagatatggctaacgatattcatatcccgcttgaaacctacaaaaaatatgaaaacggcgaacaggatattccgatcagcgtattgaacaacatagccggcaggctcggcatagacatgaccgtgattataaccggcgaagaccccagaatgaaaagcgccgccgtgtgccgcaggggaaaaggcgttcagatcgaacgttacccgggctatgaattttccagcctcgcctacaattttcagggcaggacaatggagccgcttctggtgctgctcgattcctcacgcccgcccgcagcgcaggtgtcacactcagggcaggagttcaactatgtggtcgagggcagtatgaaggtcaccgtgggcaaggcggaatatatacttgccgaaggcgattcgatttactttgacgcgacgctgccccacggccagagcgcggtaaacggttttgcccgttttatcacgatcattcaggaatggacctaa

SEQ ID NO: 52896 - protein, 186 aa, Unknown
  Obtained from environmental sample
  DOMAIN (14)...(68): Helix-turn-helix
  misc_feature (1)..(186): Xaa is any amino acid
MKMDERLAQIPGRIKELREILEISVIDMANDIHIPLETYKKYENGEQDIPISVLNNIAGRLGIDMTVIITGEDPRMKSAAVCRRGKGVQIERYPGYEFSSLAYNFQGRTMEPLLVLLDSSRPPAAQVSHSGQEFNYVVEGSMKVTVGKAEYILAEGDSIYFDATLPHGQSAVNGFARFITIIQEWT

SEQ ID NO: 52897 - DNA, 1500 bp, Unknown
  Obtained from environmental sample
  misc_feature (1)..(1500): n is a, c, g, or t
ttgcccgttttatcacgatcattcaggaatggacctaatataatgaacgaaatactatcacgatactgcccccggacggaatttgacagctatgaggatttttacgccaactaccgctgtaatgtgccggatgattttaattttgcccgcgacgtggttgacgaatgggcgcggctgcatccggaaaaacccgccctcctgtggaccgacgattccggggcgatgaagtcgttcacctttgccgacattaaacggctgtccgacaaggcggcgaacgcgcttgtcgcgctgggtattaaaaaaggcgatgtggcaatgctgatactcaagcagcggccggaagtttgggtgatgatgtgcgcccttgaaaaaataggcgcggtctgcataccgggcacataccagctgacggcaaaagatttggaataccgctgcaacatagccgaggttaagctgctggtgacggttgacgaccccgcggtgttagctgtcattgaagccgcgcgccccaaatgcggcaagcttgaacacatagccgttgtgtacgacgaggaaaagcgtgtacgtacacgcaatgattatattgacttgcaagctgaaacagaaaaggcaagcgaaaatttcaagtacattgcgacaaaaaccgaagagcccatgctgatatatttttcatccggcaccaccgggatgccaaagatggtgctgcacaaccacagcctccncctggggcatattgtcaccgcaaaatattggcagtgcgtggaagacggcaaggttcacctgacccagaccgattccggctgggcgaagttcgcctggggaaaaatctacggccagtggatctgcggcgcggctatcggcgcctatgatacggaaaaatttaccccacaggggatgctggacgcgttacagcggttaaaaccaacgactttttgcgcccccgcgacgattttccgttatctgataaaagaagacctttccggctatgacttcagttttatccgccacacttcggtcgcgggcgaacccttaagcccggaagtatacaataaattaaaatcgttaacaggccttgaaatccgcgaaggcttcggccagtcggaaacttcggtaatggcggcggtgttcaagtggcttccggtaaggcccggttccatggggaagcccgcccccctgttcaggcttgctctgctagacgaagacggcggcgcctgtgatgacggcatgatcgggaacatgagcatcaccgcggcgggcaaaaatatgtacgagcctggatatacggcgcccggcacggggcttcccgtaatcggcccttcggaatttcccgggcttttcaggggttactggaaagacaaggatagtacatcttcttcatggaacaacggaattttaaaacaggcgacatggcatggcgcgacggcgaggggtacttgtggtttgtgggcaggaacgacgacggatcaaatgctccggtactcgcataggcccctagagtga

SEQ ID NO: 52898 - protein, 499 aa, Unknown
  Obtained from environmental sample
  DOMAIN (79)...(479): AMP-binding enzyme
  misc_feature (1)..(499): Xaa is any amino acid
MPVLSRSFRNGPNIMNEILSRYCPRTEFDSYEDFYANYRCNVPDDFNFARDVVDEWARLHPEKPALLWTDDSGAMKSFTFADIKRLSDKAANALVALGIKKGDVAMLILKQRPEVWVMMCALEKIGAVCIPGTYQLTAKDLEYRCNIAEVKLLVTVDDPAVLAVIEAARPKCGKLEHIAVVYDEEKRVRTRNDYIDLQAETEKASENFKYIATKTEEPMLIYFSSGTTGMPKMVLHNHSLXLGHIVTAKYWQCVEDGKVHLTQTDSGWAKFAWGKIYGQWICGAAIGAYDTEKFTPQGMLDALQRLKPTTFCAPATIFRYLIKEDLSGYDFSFIRHTSVAGEPLSPEVYNKLKSLTGLEIREGFGQSETSVMAAVFKWLPVRPGSMGKPAPLFRLALLDEDGGACDDGMIGNMSITAAGKNMYEPGYTAPGTGLPVIGPSEFPGLFRGYWKDKDSTSSSWNNGILKQATWHGATARGTCGLWAGTTTDQMLRYSHRPLE

SEQ ID NO: 52899 - DNA, 1314 bp, Unknown
  Obtained from environmental sample
  misc_feature (1)..(1314): n is a, c, g, or t
atgtaccatgaccgggagatcatcaggcatcgggtgatcgcgaggctcgggtgcggcttagaggattacgacgacgagaagcggctctccgagtacgcggaggaggcgctgaatcgggagaaacccgtcgggccggtgctcaccgtgctcgatttggcgtgcaactcctgcgtgcgctcccacttcatggtgaccaacgcttgtcaggcctgcctcgcccgcccgtgcttggtgaactgcggcaagaaagcgattgagatcaagaacggcagggcgtgcatcgacagcgagaagtgcgtcagttgcggtctgtgcctgcaaaactgcccctatcacgcgataataaaaatccccgtgccgtgcgaggaggcctgtccggtgggggctatctccaaaggcgagaacggcagggagcatattgattacgacaagtgcatatcttgcggcaactgtatgcgcgaatgccctttcggcgcgatgatcgacaagagccagcttgtcgacgtcattaagcacatgatgaataacaaaaaagtggtcgccctgtacgcacccgccgcggcggcccagttcaggatcgaacccgggcggcttgacggggcgctgctcgcggccggcttctcaaacgtggtcgaggtcgctttgggagcggatattacggcgaagaacgaagccgccgaatttgcggagcggatggcaaagggcgagaagatgatgaccacctcctgctgccccgcgtacgtgcgggccgtccgcgaacacgttcccgaactcgtgagctgcgtttccgacacccgcacccccatgcactacgcggcggagatcgccaagaaagagttccccgactgcgtcaccgtgttcataggcccctgcctcgccaagcggcgtgagggtctggacgacgacttggtggattacgtcatctccattgaggaattgggcgcgctgttcgtggcgaggggcatagacgtcacaaaggcggtcccggcgccggggaaaaagataccctcccccgaggggaggaacttcgccaaatccggcggcgtggcccaagcggtaaaggcgtttctcaaggatacgtcaatactgaaagaggcggtcatagacgggcttgacaaggcgggcatgaagcgcctcgccgagttcggcaagataaacgccgggacgctcccgcatacggacgacactcccaacctcattgaggtgatggcctgtcagggcggctgtatcgccggaccgtcggtgatcaccaatccgaaagtcgccctgtcgcagttgacgaaatacgcggaggcgggggcgcgggccacttaa

SEQ ID NO: 52900 - protein, 437 aa, Unknown
  Obtained from environmental sample
  DOMAIN (167)...(413): Iron only hydrogenase large subunit, C-terminal domain
  misc_feature (1)..(437): Xaa is any amino acid
MYHDREIIRHRVIARLGCGLEDYDDEKRLSEYAEEALNREKPVGPVLTVLDLACNSCVRSHFMVTNACQACLARPCLVNCGKKAIEIKNGRACIDSEKCVSCGLCLQNCPYHAIIKIPVPCEEACPVGAISKGENGREHIDYDKCISCGNCMRECPFGAMIDKSQLVDVIKHMMNNKKVVALYAPAAAAQFRIEPGRLDGALLAAGFSNVVEVALGADITAKNEAAEFAERMAKGEKMMTTSCCPAYVRAVREHVPELVSCVSDTRTPMHYAAEIAKKEFPDCVTVFIGPCLAKRREGLDDDLVDYVISIEELGALFVARGIDVTKAVPAPGKKIPSPEGRNFAKSGGVAQAVKAFLKDTSILKEAVIDGLDKAGMKRLAEFGKINAGTLPHTDDTPNLIEVMACQGGCIAGPSVITNPKVALSQLTKYAEAGARAT

SEQ ID NO: 52901 - DNA, 801 bp, Unknown
  Obtained from environmental sample
  misc_feature (1)..(801): n is a, c, g, or t
atgccgcaaaacaaactcacagatatcaacgaacaaatacaagaggccgccgccgtcatccgctgcggcggggtggtcgcttttcccaccgagacggtgtacgggcttggcgccaacgcgtttgacgccaaggcggtggcgcgcgtctttgaggttaagcggcggccctattttgatccgttgatactgcatgtctgcgaaaaagattggctcggtgacttggcggttgatgtcccaacgtccgcccaaaagttgatcgacgcgctgtggccggggccgctgaccgtcgtccttccaaagaagccagccgttcccgatatcgcgacctccggtctgccgggcgtcgcgctgcgtctgccgtcaaacgagatcgcccgcgaactgatacgcgccgccggcgttccaatcgccgctcccagcgcgaatctgttcggttccgtgagccccactgcggcggagcatgttagggcgcagctcggcggggcggtggatatgattatcgacgggggggagtgctcggtggggatagagtccaccatcatctcgtttatgggcgatcagcctatgctgttgcgtccgggcggtgtggcgcttgaggatatagaggcggttttgggaaaggtggcgataccggataatgatgaattggtcaaccaatcccccggacggagcgggacgcactacgccacgcgcacgccgttggtgcggataggcggggttgatgggattagtagtatcaataatgacgatagtatcaatacggcacgtatcaacccatcaggcctatgcaaaatcgagtga

SEQ ID NO: 52902 - protein, 266 aa, Unknown
  Obtained from environmental sample
  DOMAIN (17)...(194): yrdC domain
  misc_feature (1)..(266): Xaa is any amino acid
MPQNKLTDINEQIQEAAAVIRCGGVVAFPTETVYGLGANAFDAKAVARVFEVKRRPYFDPLILHVCEKDWLGDLAVDVPTSAQKLIDALWPGPLTVVLPKKPAVPDIATSGLPGVALRLPSNEIARELIRAAGVPIAAPSANLFGSVSPTAAEHVRAQLGGAVDMIIDGGECSVGIESTIISFMGDQPMLLRPGGVALEDIEAVLGKVAIPDNDELVNQSPGRSGTHYATRTPLVRIGGVDGISSINNDDSINTARINPSGLCKIE

SEQ ID NO: 52903 - DNA, 375 bp, Unknown
  Obtained from environmental sample
  misc_feature (1)..(375): n is a, c, g, or t
atgatggtggactctatccccaccgagcactcccccccgtcgataatcatatccaccgccccgccgagctgcgccctaacatgctccgccgcagtggggctcacggaaccgaacagattcgcgctgggagcggcgattggaacgccggcggcgcgtatcagttcgcgggcgatctcgtttgacggcagacgcagcgcgacgcccggcagaccggaggtcgcgatatcgggaacggctggcttctttggaaggacgacggtcagcggccccggccacagcgcgtcgatcaacttttgggcggacgttgggacatcaaccgccaagtcaccgagccaatctttttcgcagacatgcagtatcaacggatcaaaatag

SEQ ID NO: 52904 - protein, 124 aa, Unknown
  Obtained from environmental sample
  misc_feature (1)..(124): Xaa is any amino acid
MMVDSIPTEHSPPSIIISTAPPSCALTCSAAVGLTEPNRFALGAAIGTPAARISSRAISFDGRRSATPGRPEVAISGTAGFFGRTTVSGPGHSASINFWADVGTSTAKSPSQSFSQTCSINGSK

SEQ ID NO: 52905 - DNA, 300 bp, Unknown
  Obtained from environmental sample
  misc_feature (1)..(300): n is a, c, g, or t
atggagcttgtgttgcatataattaaagtgcgttccattaaactgcgacctgtgcgagggtcaatttgctctggaaattctttcaatgtttccacaacttcgccagcacgttcgccgcaagctgcgataatcacaatatccacttctgcgtggcgagcggttaattgctggagcaccgttttgcctgcgccaaaaggtccaggaacgcagaaaactccgcctctgttcacggggaagaaggtatctacaattctctgttttgttattaaaggttctgttgggcgaagcctctctgcatag

SEQ ID NO: 52906 - protein, 99 aa, Unknown
  Obtained from environmental sample
  misc_feature (1)..(99): Xaa is any amino acid
MELVLHIIKVRSIKLRPVRGSICSGNSFNVSTTSPARSPQAAIITISTSAWRAVNCWSTVLPAPKGPGTQKTPPLFTGKKVSTILCFVIKGSVGRSLSA

SEQ ID NO: 52907 - DNA, 690 bp, Unknown
  Obtained from environmental sample
  misc_feature (1)..(690): n is a, c, g, or t
gtgttaaaatcttcttctttcaaacacctcgatgttattgcgtcattttttgtctctattctcgttatcagcaacattgcgtcttcggcgaaaattgtcgatgttggcataacgctgtttactattccgcttgcttttgacggcggcacccttctgtttcctttggtttatgtgttaggcgacgtgcttacggaggtttacggtttcaggacggcgcggcgcgttatcctgattggctttgcggtgatggttcttgccgtgctggtttttttcgtgctgggaattttgccgccggaagcgggctgggaagcggagacaggcggaaacgacgctttcaacgcgatactcggcggaatgagctacggcggcattgttcttgcaagccttgcggcgtatcttgccggggaattatccaattcgctgattctttcaaaacttaaagtaataatgaaggggcggcttctttgggtacgtacaataggttctacccttgtcggcgaattgcttgattctttgatttttattttgattgcctcacttacgggagttttcccctgggaaattttttggtctcttgtgataacgaattatatattaaagtgcgccatagaagccttggtaacgcctttcacatattggctttccgctttcttaaaacggaaagaagggatagatgtttacgatatgtaa

SEQ ID NO: 52908 - protein, 229 aa, Unknown
  Obtained from environmental sample
  DOMAIN (39)...(201): Uncharacterized ACR, YhhQ family COG1738
  misc_feature (1)..(229): Xaa is any amino acid
MLKSSSFKHLDVIASFFVSILVISNIASSAKIVDVGITLFTIPLAFDGGTLLFPLVYVLGDVLTEVYGFRTARRVILIGFAVMVLAVLVFFVLGILPPEAGWEAETGGNDAFNAILGGMSYGGIVLASLAAYLAGELSNSLILSKLKVIMKGRLLWVRTIGSTLVGELLDSLIFILIASLTGVFPWEIFWSLVITNYILKCAIEALVTPFTYWLSAFLKRKEGIDVYDM

SEQ ID NO: 52909 - DNA, 522 bp, Unknown
  Obtained from environmental sample
  misc_feature (1)..(522): n is a, c, g, or t
atggataaaattgatgaaggactgtatgaagcagatagggcagtccatgtccagccaccgtatgttgatggattactcgacaatttttatttcccggcgcttaaaaactaccgccgtttcagcaaagacggctatgccgaagccaaatcgttggcggcttatttcaacaaactgcagcagtcatggggcaacctgaaaattgtcaaaattgaatccaacgcaaaacctgttatgcaccgcggcgacactctttccgttaccgctcacatcgatcttggcaatattttgccggaagaagtgcaggtggaactctatcacggcacggtttccagccagaacaaggaatttgccaacgcggccaagaccgaaatgaagtgggtaaagaccgacggaaatttgaatttattccaggttcgcgtggaatgtgttgataccggaatgcaggggcatacagttcgtatactgcccaagcatgacgcgttgattcacccctacaggcccggattcgtcaagtgggcttag

SEQ ID NO: 52910 - protein, 173 aa, Unknown
  Obtained from environmental sample
  misc_feature (1)..(173): Xaa is any amino acid
MDKIDEGLYEADRAVHVQPPYVDGLLDNFYFPALKNYRRFSKDGYAEAKSLAAYFNKLQQSWGNLKIVKIESNAKPVMHRGDTLSVTAHIDLGNILPEEVQVELYHGTVSSQNKEFANAAKTEMKWVKTDGNLNLFQVRVECVDTGMQGHTVRILPKHDALIHPYRPGFVKWA

SEQ ID NO: 52911 - DNA, 984 bp, Unknown
  Obtained from environmental sample
  misc_feature (1)..(984): n is a, c, g, or t
gtgggtttccagcggttgctggaactgcttgaccgctactttggtccccatttcgaggacaagcccaccgatctggcaatttgggatcgtatggaccggataagcgatgaagagctatggcgcacccatgaacgccgccgcgagcggatggtggcctttgtccgtgaacgtgtccggcagcaatataaacgcaccggcgcggtagaacgccgtgtccggcaggcggaagatgttctgtcgccttatgcctttaccctgtgctttgcccgccgttttgccacatataagcggggcaatctgctgttgcgcgatcctgaacggctgttaaaactggtcaaaaacaatgaccaccccattcagcttattttcgcgggcaaggcccatccccacgatatgccgggcaaagaccttatccgtgaacttatccattttgccgaaaaatatgatgttactagccgtatcgtgtttgttgaaaattacgacatgaccgttgccaaataccttacatcaggcggcgatatatggcttaacacaccccggcggccaatggaagcgtccggtaccagcggcatgaaagccgcaatgaacggcgttcttaactgttctattatggacggctggtgggatgaagcgtataaccccgaagtaggctgggctatcggccacggcgagcagtatgtagacgaacatcttcaggacgatgtggaaagcaaagctctctacgatcttcttgaaagagatattgttcccctgttttaccagcgcggcagggacggccttccccgcgaatggataaaattgatgaaggactgtatgaagcagatagggcagtccatgtccagccaccgtatgttgatggattactcgacaatttttatttcccggcgcttaaaaactaccgccgtttcagcaaagacggctatgccgaagccaaatcgttggcggcttatttcaacaaactgcagcagtcatggggcaacctga

SEQ ID NO: 52912 - protein, 327 aa, Unknown
  Obtained from environmental sample
  misc_feature (1)..(327): Xaa is any amino acid
MGFQRLLELLDRYFGPHFEDKPTDLAIWDRMDRISDEELWRTHERRRERMVAFVRERVRQQYKRTGAVERRVRQAEDVLSPYAFTLCFARRFATYKRGNLLLRDPERLLKLVKNNDHPIQLIFAGKAHPHDMPGKDLIRELIHFAEKYDVTSRIVFVENYDMTVAKYLTSGGDIWLNTPRRPMEASGTSGMKAAMNGVLNCSIMDGWWDEAYNPEVGWAIGHGEQYVDEHLQDDVESKALYDLLERDIVPLFYQRGRDGLPREWIKLMKDCMKQIGQSMSSHRMLMDYSTIFISRRLKTTAVSAKTAMPKPNRWRLISTNCSSHGAT

SEQ ID NO: 52913 - DNA, 630 bp, Unknown
  Obtained from environmental sample
  misc_feature (1)..(630): n is a, c, g, or t
atggtttatggttatatacgggtcagcacggacaaacaaacagttgaaaatcagcgttttgaaatcacacgattctgtaaagcgcaaaagttagaaatcgaagaatggatagaagagaaaatcagcggcacaaaagcgcctgaaaaaaggcaattgggtaaactgttaaaacttgtgcatgaaggggatactataatctgctctgaattgtctcgtcttggaagatcgttttttatgataatgtcgattctttcaggctgtatggaacgcggcgtaaagatttggacaataaaagataactatcgtttgggcgatgacatacagagcaaggtacttgcttttgcatttggcttatccgccgaaatagagcgcaatttaatcgcacagcgtacaaaagaggctcttgcccgttgtaaggcagagggtaaaattttaggccgaaagccgggaagagctatcaatgtgagattaacgggtcatgagaaagagatacggaaaatgcttcgtgaagggaaaaataatgtcgaaatagggaaacggtttggagtacataggcagactgtgagatattttatccgtgaaaggcttacaaagtggaaattaaagaagttgttcccccctgcgacataa

SEQ ID NO: 52914 - protein, 209 aa, Unknown
  Obtained from environmental sample
  DOMAIN (2)...(144): Resolvase, N terminal domain
  misc_feature (1)..(209): Xaa is any amino acid
MVYGYIRVSTDKQTVENQRFEITRFCKAQKLEIEEWIEEKISGTKAPEKRQLGKLLKLVHEGDTIICSELSRLGRSFFMIMSILSGCMERGVKIWTIKDNYRLGDDIQSKVLAFAFGLSAEIERNLIAQRTKEALARCKAEGKILGRKPGRAINVRLTGHEKEIRKMLREGKNNVEIGKRFGVHRQTVRYFIRERLTKWKLKKLFPPAT

SEQ ID NO: 52915 - DNA, 1101 bp, Unknown
  Obtained from environmental sample
  misc_feature (1)..(1101): n is a, c, g, or t
atggataacgtacaaacgataaataaatatgttcccgactatttagtcactccgggggaggttcttgaggattaccttgggaacgcggggatcacgcaagccgcgcttgcggataggacgggtttgtcaaaaaagacgataaacgaaatattaacggcaaaatcagctattactgctgaaaccgcgttgttgtttgaacggacactaggtcgccccgcgcatttctggagtaaccttgaacggcaataccgggaagataaagcgcgccttgccgatacaacgcgattagaaaaagacctacaatggcttgagatgtttccgataaatgcaatggcaaaatatggctggatagaaaaatataagaataaggttttacaactcgatgcgttactacgcttttttgccattgcgtcaccacagcggtggaaagcaatatgggaccatgaattgcaaaccgcttttcgcaaaaatgagcgttctcccaaggacaccgctttgatttccgcatggttacgcaagggagaaattgttgcgcaacagctacgttgccagtcgtttgacaagatgaagtttttgaatagccttgccgaaatccgttcccttacaacaatcgaagaacctaggattttggtcccaaaacttgaatcaatttgcgctgacgccggaattgccgttgtctttgttcccgctctgcccaaacttggcatttacggcgcgacacgtcggcttaatggcaagtatatcatgcagttaagtttaaacggtaataaaagcaatgatcaactctggttcactttttttcacgaggcttgccacattattaaacattcgcacagggaactttatattgaaggtcatgggccagaagatgaaaaagagaatgaagctaatgcctttgcgtgggatatgttaataccgccaaaagaattatcaagctttcttgtatctgcttctaacccgacactactaccgataagaagatttgccgcacagataggtatcgcgcctggtattattgtgggcaggttgcaacatgataaattattgcccatgagttggggaaatgatcttaaaattcggtatgagtgggtagaggggtag

SEQ ID NO: 52916 - protein, 366 aa, Unknown
  Obtained from environmental sample
  DOMAIN (218)...(344): Domain of unknown function (DUF955)
  misc_feature (1)..(366): Xaa is any amino acid
MDNVQTINKYVPDYLVTPGEVLEDYLGNAGITQAALADRTGLSKKTINEILTAKSAITAETALLFERTLGRPAHFWSNLERQYREDKARLADTTRLEKDLQWLEMFPINAMAKYGWIEKYKNKVLQLDALLRFFAIASPQRWKAIWDHELQTAFRKNERSPKDTALISAWLRKGEIVAQQLRCQSFDKMKFLNSLAEIRSLTTIEEPRILVPKLESICADAGIAVVFVPALPKLGIYGATRRLNGKYIMQLSLNGNKSNDQLWFTFFHEACHIIKHSHRELYIEGHGPEDEKENEANAFAWDMLIPPKELSSFLVSASNPTLLPIRRFAAQIGIAPGIIVGRLQHDKLLPMSWGNDLKIRYEWVEG

SEQ ID NO: 52917 - DNA, 396 bp, Unknown
  Obtained from environmental sample
  misc_feature (1)..(396): n is a, c, g, or t
atgcgggaaataatgtgctttatcaggatgaacaaggtcaacgacaccaagagggcgctcgctgaacacggcttccccgcgttcacctgccgcaagtgtttggggcgcggcaagaagagcatcgaccccgaactgctcaacgccgtcatagcggccggcgaaatgccgctgtcgccggtcggcgagaacctgacggagtcggcgcggctaatagccaaacggttcttcacgctagtcgtggacgacaaagacgtgaagaaggcggttgacgtgattatagccgcgaatcagacgggcaatcccggcgacgggaaaatttttgtcttgccgattacggagacgttctccgtaaggacgggcgagggacacactgaaatatcaaagggaggcgtatga

SEQ ID NO: 52918 - protein, 131 aa, Unknown
  Obtained from environmental sample
  DOMAIN (4)...(120): Nitrogen regulatory protein P-II
  misc_feature (1)..(131): Xaa is any amino acid
MREIMCFIRMNKVNDTKRALAEHGFPAFTCRKCLGRGKKSIDPELLNAVIAAGEMPLSPVGENLTESARLIAKRFFTLVVDDKDVKKAVDVIIAANQTGNPGDGKIFVLPITETFSVRTGEGHTEISKGGV

SEQ ID NO: 52919 - DNA, 909 bp, Unknown
  Obtained from environmental sample
  misc_feature (1)..(909): n is a, c, g, or t
atgagttcagacgatataaagagcgcggcgaaagggccgactcctcatataaaagagaaagtgctggataactactccgcgaaggtttacaagaatcgcaaggagcacgtcgtgcagctcgaagagggcgtcgagaatcagactatcgccgccaacacgcgcaccatccccggcattatgacggctcgcgggtgctgttacgcgggttgcaagggcgttgtggtcggcccgcttaaggacgtgtgcgtcattacgcacgggcctatcggttgcggcttctacagttggggcacgcggcgcaacagggcaaagccagacgaacacaccgacaagaacttcgtctcttactgcttttcctctgatatgcaggagccggatattgtcttcggcggcgagaagaaattggagaaggccattgaagaggctatggaactcttcagtccaaagtgcataatgatatgttccacttgccccgtcggcctaatcggcgacgacgtgcaggccgtggcgcggcgcaccgaggagaagtacggcataaaggcgataggctactcttgcgaaggttacaaaggcgtgtcgcagtcgggtggccaccacatagcgaataacgggcttatgcgctacgttataggcactggcgacaaaaagcccaaaaccaaattcgcggtcaacatcttgggcgagtacaatatcggcggcgacgggtgggaagaggttcgcatcctanagcgctgcgggatagaggtactgaacctgttcaccggtgacgcgtctgtcgagtcgctcaagagcgcccacttggcgcaccttaacttggtgatgtgccaccgcctccatcaactacatagccgagatgatgaagacgaagtacggcttggactggctgaaggtgaacttcatcggagttga

SEQ ID NO: 52920 - protein, 302 aa, Unknown
  Obtained from environmental sample
  DOMAIN (57)...(302): Nitrogenase component 1 type Oxidoreductase
  misc_feature (1)..(302): Xaa is any amino acid
MSSDDIKSAAKGPTPHIKEKVLDNYSAKVYKNRKEHVVQLEEGVENQTIAANTRTIPGIMTARGCCYAGCKGVVVGPLKDVCVITHGPIGCGFYSWGTRRNRAKPDEHTDKNFVSYCFSSDMQEPDIVFGGEKKLEKAIEEAMELFSPKCIMICSTCPVGLIGDDVQAVARRTEEKYGIKAIGYSCEGYKGVSQSGGHHIANNGLMRYVIGTGDKKPKTKFAVNILGEYNIGGDGWEEVRILXRCGIEVLNLFTGDASVESLKSAHLAHLNLVMCHRLHQLHSRDDEDEVRLGLAEGELHRS

SEQ ID NO: 52921 - DNA, 768 bp, Unknown
  Obtained from environmental sample
  misc_feature (1)..(768): n is a, c, g, or t
ttgaaactccgcggcaacaccgctatggggcttgcattgatggcgatccaaaagggatacagcctaaaggccgttgtcagggatcgcaccagcaaagaaaaattggaccagcttaaaatactgggcgtggacatccacaaagttgacgccagcctgccgcccagccacccagacagctacaacaacatcacgccgcgccttgcaagggaactgccgaactgctatttccccgaccagcacaataatagggaaaacaatgaggcccattatcgattcacgggtcctgagatatgggagcagatggaaggccaattagacgcattcgtcgctggcatgggcacgggggggacgatagccggcgtggggcggttcttgaaagaaaaaaatccaaacatcaagattgtcggcgttgacgtcgaggggtctatttttacggaatactttaggacaggaaaagtctgcgaaccccgcccctacctgcttgaaggccttggggacgaatttttgatagggacggcagatttttctgtaattgatgaaatggtgcaagtctcagaccgcgccgcatttctggccgctagggaactagcaaagcgtgagggccttttggcgggggggtcgagcggcgctgccattttcgccacgctgcaaattgccaagggcctgccgccaggctccacagtcgtgaccctcttcccggatagcgcaagcaggtacttgagcaccatctacaacaacgactggatgagagaaaaggggttcatgtaa

SEQ ID NO: 52922 - protein, 255 aa, Unknown
  Obtained from environmental sample
  SIGNAL (1)...(23)
  DOMAIN (1)...(235): Pyridoxal-phosphate dependent enzyme
  misc_feature (1)..(255): Xaa is any amino acid
MKLRGNTAMGLALMAIQKGYSLKAVVRDRTSKEKLDQLKILGVDIHKVDASLPPSHPDSYNNITPRLARELPNCYFPDQHNNRENNEAHYRFTGPEIWEQMEGQLDAFVAGMGTGGTIAGVGRFLKEKNPNIKIVGVDVEGSIFTEYFRTGKVCEPRPYLLEGLGDEFLIGTADFSVIDEMVQVSDRAAFLAARELAKREGLLAGGSSGAAIFATLQIAKGLPPGSTVVTLFPDSASRYLSTIYNNDWMREKGFM

SEQ ID NO: 52923 - DNA, 1194 bp, Unknown
  Obtained from environmental sample
  misc_feature (1)..(1194): n is a, c, g, or t
gtgcccattaacgcaacaacatcctacgtgtccaaggattgcgcacaggcagctgggaggtttgcccttactgagggtggcaacatttacactcgcttgatgaacccaacctcggatgtgtttgagcagcgcatagcggctcttgaagggggcgtaggtgctttggcaacctcttcgggagcggcggcggtgacttatgctatacagaacattgccacagcggggcacaatatagtatccgataaacgcatctatggcggaacctataaccttttcgcccacaccttgcccgacttaggtataaccacaacattcgtagatggtagcgaccctaagaattttgaaaaggcgattaacgaaaaaactagggcattatttgtggaatcacttggaaatccacattccaccatagttgatttagatgcgcttgcggcgattgcacacaagaatggcattccgctaattgttgataataccttttcgccaccaaacttgttccgccccattgagcacggtgctgatgtggttgtgcattctgccaccaaattcataggcggtcacggaacggttataggcggtgtgatagtggattctggaaagttcaactgggcggcaaacgataaattcccgggtttgtctaaaccgaacccaagctatcacggcgtagtcctcaccgaggcggttgggaatctcgcatatataataaagattcgggttaccttgatgagagacacaggtgcgaccataagccctttccactcatttcttttcctccaaggattggaaaccctctctctgcgtgtggaacgtcacgtggagaatgcgctcaaagtggtggaatatctgcgcaagcatccgcaggtggaatctcttaatcatccctctttgccagaacatcctgataatgccttgtataaaaaatatttcccaaagggtgcaggctcaattttcacttttgaaataaagggcggtgcggagcaggcaaagaaattcattgacaagctggagttgttctcccttctcgccaatgtggcagataccaaatctttggttatacatccggcaagcacaacgcattcccagctcaccggagatgaacttttggaacagggcgtaaagccaaataccattcggctttccattggcattgagcatattgacgatattattgccgacttggagcaggcgttttag

SEQ ID NO: 52924 - protein, 397 aa, Unknown
  Obtained from environmental sample
  DOMAIN (13)...(394): DegT/DnrJ/EryC1/StrS aminotransferase family
  misc_feature (1)..(397): Xaa is any amino acid
MPINATTSYVSKDCAQAAGRFALTEGGNIYTRLMNPTSDVFEQRIAALEGGVGALATSSGAAAVTYAIQNIATAGHNIVSDKRIYGGTYNLFAHTLPDLGITTTFVDGSDPKNFEKAINEKTRALFVESLGNPHSTIVDLDALAAIAHKNGIPLIVDNTFSPPNLFRPIEHGADVVVHSATKFIGGHGTVIGGVIVDSGKFNWAANDKFPGLSKPNPSYHGVVLTEAVGNLAYIIKIRVTLMRDTGATISPFHSFLFLQGLETLSLRVERHVENALKVVEYLRKHPQVESLNHPSLPEHPDNALYKKYFPKGAGSIFTFEIKGGAEQAKKFIDKLELFSLLANVADTKSLVIHPASTTHSQLTGDELLEQGVKPNTIRLSIGIEHIDDIIADLEQAF

SEQ ID NO: 52925 - DNA, 420 bp, Unknown
  Obtained from environmental sample
  misc_feature (1)..(420): n is a, c, g, or t
atgtccaaaatatacgtattagatgcttgtgcaattatagcatcacttaaaaacgaagatggctctgaaaaggtagagaatatatttatatctcaaaaaaaatacaatgatataaagattgttatgcacaagataaatttgttggaagtttattatgatgttgtaaaaagatgtaatgaaactgttgcgaaaagcgttctttccgaaataaaaaggaatccaataaaaataatttctccaatttctaactcagtattttttgaagccggaaaattgaaggcaaaatacaaaatatcattagctgattctattgctttatctacgtcatatttattaaaaggaatgctggttacatcagatcatcacgaatttgatattatagaacaaaaagaaaaaatttctttttgttggataagataa

SEQ ID NO: 52926 - protein, 139 aa, Unknown
  Obtained from environmental sample
  DOMAIN (5)...(127): PIN domain
  misc_feature (1)..(139): Xaa is any amino acid
MSKIYVLDACAIIASLKNEDGSEKVENIFISQKKYNDIKIVMHKINLLEVYYDVVKRCNETVAKSVLSEIKRNPIKIISPISNSVFFEAGKLKAKYKISLADSIALSTSYLLKGMLVTSDHHEFDIIEQKEKISFCWIR

SEQ ID NO: 52927 - DNA, 315 bp, Unknown
  Obtained from environmental sample
  misc_feature (1)..(315): n is a, c, g, or t
atgtttatattctgtattttgttaaatttccttgttctcacgcaaaacgcacagggcgaggtttttgagtataagcataaagcgggcgaccgttacaggattctttccgttgtaaaagaagacgtatatataaaccgcattttaagccaccgcgcggaaatacttaaccgtattgccgtagaggtgacggatgtaaaagacggaaaaggacagcacaaagcggtttttcaaacttcggaacgacttgtttttgattccgccaaccgcgaagtgcagcaggccgtagctgcattcgagtgtctcggccgattctga

SEQ ID NO: 52928 - protein, 104 aa, Unknown
  Obtained from environmental sample
  SIGNAL (1)...(19)
  misc_feature (1)..(104): Xaa is any amino acid
MFIFCILLNFLVLTQNAQGEVFEYKHKAGDRYRILSVVKEDVYINRILSHRAEILNRIAVEVTDVKDGKGQHKAVFQTSERLVFDSANREVQQAVAAFECLGRF

SEQ ID NO: 52929 - DNA, 876 bp, Unknown
  Obtained from environmental sample
  misc_feature (1)..(876): n is a, c, g, or t
ttgccgcgggacctttgccggaagcggaggaggaagaaaatgaagattgattttcatgttcatattacgccgcctgaaattattaagaattggaaaaaatacgcaaaaaaagaaaaatactttgccctgctcgcaaaaaatcctcataataaatacgcctgcgccgaagatattgtttccgcccttgacgaatccggctttgatcatgcggtagtcttcggctttgcttttaaggatcaggggatgtgccgttttgtaaacgattatgtaatagaaaaaatcaagcaatatcccggcaaacttacgggatttatcgcagtatcgcctaacgaaaagggagcagaaaaagaaatagaacgctgttttgccgcgggcctcaagggagtcggcgaattatatcccgatgggcagggattcaatattgacaataaaaaggaaacccgcgctgttacgggcgcgtgtattgagcggaacatccccttgatccttcacgttaacgaacctgtcgggcacgattatatagggaaaaacaatatttcattaaaaaaaatagaaaagtttgttattaacagccaaaatctgaaaattgttcttgcgcatttcggcggaggcattatcttttatgaaactatgaaagaagtaagagaaaatttccgcaatgtgtactacgataccgccgccgccccgtttctctacgattcacgcatatacggcgccgttaaagccctcggcctttgcgaaaaaatcctctttggcagcgattttccccttcttccgccttcacgttatatgccaagcatcgaaaaaggcggggtttcaaccgaagaaaagcggtttatacttggcgaaaacgcggaaaaactgttaaaatattag

SEQ ID NO: 52930 - protein, 291 aa, Unknown
  Obtained from environmental sample
  DOMAIN (16)...(291): Amidohydrolase
  misc_feature (1)..(291): Xaa is any amino acid
MPRDLCRKRRRKKMKIDFHVHITPPEIIKNWKKYAKKEKYFALLAKNPHNKYACAEDIVSALDESGFDHAVVFGFAFKDQGMCRFVNDYVIEKIKQYPGKLTGFIAVSPNEKGAEKEIERCFAAGLKGVGELYPDGQGFNIDNKKETRAVTGACIERNIPLILHVNEPVGHDYIGKNNISLKKIEKFVINSQNLKIVLAHFGGGIIFYETMKEVRENFRNVYYDTAAAPFLYDSRIYGAVKALGLCEKILFGSDFPLLPPSRYMPSIEKGGVSTEEKRFILGENAEKLLKY

SEQ ID NO: 52931 - DNA, 735 bp, Unknown
  Obtained from environmental sample
  misc_feature (1)..(735): n is a, c, g, or t
atgacttcgatagaaaaacaaaaaatagctgacttcttggatatagcgcaggattttaatacctcaggttacagaagtgaaaagaaagaatatcattttgaaaacgatgctcctgcggctcaaaaaggaacaagtaatattgatacggcagataaaaccgatagtatcgaaaaaatcgcgggagaaataagggcttgttataattgcggacttggcaagacaagaaccaacgccgcgcccggagagggagtattgcagccgcttgtcctggttataggagagggaccgggcgcggatgaagacgcgcagggacggccatttgtcggcaaggccggacagcttcttgacaagatgctcggagctataaatctttcgcgtaacacaaattgttttatcgccnatgtggtaaagtgcagaccgcccaataaccgcgatccttacccggaagaaaccatagcctgcgcgcattttcttgaaaggcagattaccctgttaaaaccaaagttcatacttatagtcggaagaatagcgatgcagtcactgttaaaaacaaccgaggcgattggcaaaaggcgcggaaaaataacggaattgaccgtaggagacgtaacttatccgctccttattacataccatccctccgccattttacgcaacatagagttaaaacgccccgcatgggaagatttaaaacttcttcgctcaaaactggatgaattagaagggggcatttaa

SEQ ID NO: 52932 - protein, 244 aa, Unknown
  Obtained from environmental sample
  DOMAIN (80)...(235): Uracil DNA glycosylase superfamily
  misc_feature (1)..(244): Xaa is any amino acid
MTSIEKQKIADFLDIAQDFNTSGYRSEKKEYHFENDAPAAQKGTSNIDTADKTDSIEKIAGEIRACYNCGLGKTRTNAAPGEGVLQPLVLVIGEGPGADEDAQGRPFVGKAGQLLDKMLGAINLSRNTNCFIAXVVKCRPPNNRDPYPEETIACAHFLERQITLLKPKFILIVGRIAMQSLLKTTEAIGKRRGKITELTVGDVTYPLLITYHPSAILRNIELKRPAWEDLKLLRSKLDELEGGI

SEQ ID NO: 52933 - DNA, 1806 bp, Unknown
  Obtained from environmental sample
  misc_feature (1)..(1806): n is a, c, g, or t
atggccgagacagcttccgatttaatccgcaacttctgcataatcgcccacatcgaccacggcaagtccacgctcgccgaccggtttcttgaacttacgggcacggtcaacaaggaaaagatgcaagatcaggtgctcgacgacatggacttggagcgcgagcgcgggatcaccataaagtcgcacccggtacgaatggcctacgccgccgcggacgggaagacgtaccagttcaacctgatagacacgcccggccacgtagacttctcctacgaggtttcgcgttctctcgccgcttgcgagggggcgatcctcgtggtcgacgcctctcagggtatagaggcgcagacgctgaccaatatatatttggcgctcgacaacgatctggccataattccggtgatgaacaaggtcgacctgccctccgcccgccccgacgagatccgccggcagataagcgagctcttgggcgtgccgccggagagcgtcctctcgtgcagcgcgaagacgggcgagggcgttccggcgctactcgaacgggtgatcgccgacgtaccgccacccaagggccttatcggctcgccgctgaaggcgctgatcttcgactcgaagttcgacgccttccggggcgcggtagcctacgtgcgcgtcgcggacggggcgctctgcaagggccagtccgtgcgatttttcgaaacggggcgagagtacgacgtcgacgaagtcggtttcttccgtatggggcgcgtaccctcgcccaagcttcgcgccggcgaggtgggctatgtcatcgccaatataaagaccgtctccgacatcagcatcggcgacacgataaccacgcgcatcggcggcgcctccgagccgataccgggctacaaggaggtgaagccaatggtcttcagcgggatatatcccgttgacaaaggggaatacgaggatctccgcacggcgcttgaaaaattgcggctaaacgactcctccatcacctacgaaccggaaacctccacggcgctcggcttcggtttccgcgccggattcttggggctgctgcacatggagatcatccaagagcggttgctgcgcgagttcaatgtcgacatcatcacaacagtccctaacgttgagtacgagatacacctgaagaacggcgaaacgctctacatagacagccccgccgcactgccgtcgggacaggagaccgaatacatctgcgaacccatatcgcgagtgcagctcatcacgcccacggagttcgtgggcaccataatgaaactctgcgacgagaaacgcggcaagctcgtcaacatggagtatctggaaacgacgcgggtctgcctgaactaccacctgccgctcgcggagttgatcatagacttcttcgacaggttgaaaggatgttccaagggttacgcctcgatggactacgagttctccggttatcaacgcgacgatttgataaagcttgacatactgataaacggcgcccccgtagacgccttctccaccatcatccaccgcgacaactcctactcctacggccagatgatcacctccaaactcaaggaactgatcccgcgccaacaatacgaagtggccatccaagccgccataggcagcaaggtcatagcgcgcacaaccgtaaaagccttccgcaaagacgtaaccgcaaaatgttacggcggcgacataacacgtaaacggaaattattagaaaaacaaaaagagggcaaaaaacgaatgaagcaaataggcaacgtagaggttccccaggaggcgtttttagcaatattaagcagggattaa

SEQ ID NO: 52934 - protein, 601 aa, Unknown
  Obtained from environmental sample
  DOMAIN (10)...(139): GTPase of unknown function
  misc_feature (1)..(601): Xaa is any amino acid
MAETASDLIRNFCIIAHIDHGKSTLADRFLELTGTVNKEKMQDQVLDDMDLERERGITIKSHPVRMAYAAADGKTYQFNLIDTPGHVDFSYEVSRSLAACEGAILVVDASQGIEAQTLTNIYLALDNDLAIIPVMNKVDLPSARPDEIRRQISELLGVPPESVLSCSAKTGEGVPALLERVIADVPPPKGLIGSPLKALIFDSKFDAFRGAVAYVRVADGALCKGQSVRFFETGREYDVDEVGFFRMGRVPSPKLRAGEVGYVIANIKTVSDISIGDTITTRIGGASEPIPGYKEVKPMVFSGIYPVDKGEYEDLRTALEKLRLNDSSITYEPETSTALGFGFRAGFLGLLHMEIIQERLLREFNVDIITTVPNVEYEIHLKNGETLYIDSPAALPSGQETEYICEPISRVQLITPTEFVGTIMKLCDEKRGKLVNMEYLETTRVCLNYHLPLAELIIDFFDRLKGCSKGYASMDYEFSGYQRDDLIKLDILINGAPVDAFSTIIHRDNSYSYGQMITSKLKELIPRQQYEVAIQAAIGSKVIARTTVKAFRKDVTAKCYGGDITRKRKLLEKQKEGKKRMKQIGNVEVPQEAFLAILSRD

SEQ ID NO: 52935 - DNA, 627 bp, Unknown
  Obtained from environmental sample
  misc_feature (1)..(627): n is a, c, g, or t
ttgcgagggggcgatcctcgtggtcgacgcctctcagggtatagaggcgcagacgctgaccaatatatatttggcgctcgacaacgatctggccataattccggtgatgaacaaggtcgacctgccctccgcccgccccgacgagatccgccggcagataagcgagctcttgggcgtgccgccggagagcgtcctctcgtgcagcgcgaagacgggcgagggcgttccggcgctactcgaacgggtgatcgccgacgtaccgccacccaagggccttatcggctcgccgctgaaggcgctgatcttcgactcgaagttcgacgccttccggggcgcggtagcctacgtgcgcgtcgcggacggggcgctctgcaagggccagtccgtgcgatttttcgaaacggggcgagagtacgacgtcgacgaagtcggtttcttccgtatggggcgcgtaccctcgcccaagcttcgcgccggcgaggtgggctatgtcatcgccaatataaagaccgtctccgacatcagcatcggcgacacgataaccacgcgcatcggcggcgcctccgagccgataccgggctacaaggaggtgaagccaatggtcttcagcgggatatatcccgttga

SEQ ID NO: 52936 - protein, 208 aa, Unknown
  Obtained from environmental sample
  misc_feature (1)..(208): Xaa is any amino acid
MRGGDPRGRRLSGYRGADADQYIFGARQRSGHNSGDEQGRPALRPPRRDPPADKRALGRAAGERPLVQREDGRGRSGATRTGDRRRTATQGPYRLAAEGADLRLEVRRLPGRGSLRARRGRGALQGPVRAIFRNGARVRRRRSRFLPYGARTLAQASRRRGGLCHRQYKDRLRHQHRRHDNHAHRRRLRADTGLQGGEANGLQRDISR

SEQ ID NO: 52937 - DNA, 501 bp, Unknown
  Obtained from environmental sample
  misc_feature (1)..(501): n is a, c, g, or t
ttgaaagaggcgggtctgcccgtgacgagcaagaccatgctccgcgacggcaggaccggcgaatattttgtaaacccgattttctgcggggtaatttacttcctcaaactccatcatcttgttgatgataaaatgcacgcccgcagcaccggcccctattcgctggttacccagcagcctcttggtggcaaggcccagttcggcggccagcgcctcggagagatggaagtctgggctttggaagcgtacggcgcggcgcatacgctgcaggaactgctgacgatcaagtcggacgacatgacagggcgttccaaaatttacgaagccattgtaaagggagagccttccactacggcgggcattcctgaatcgtttaacgttctggtgcaggaactgagggggcttgcgctggatcttgccatatttgacaacaacagcaaacaaattcctcttaccgagaaagacgaagagcttatagccaagtcgaagagtaatttctaa

SEQ ID NO: 52938 - protein, 166 aa, Unknown
  Obtained from environmental sample
  DOMAIN (68)...(144): RNA polymerase Rpb2, domain 7
  misc_feature (1)..(166): Xaa is any amino acid
MKEAGLPVTSKTMLRDGRTGEYFVNPIFCGVIYFLKLHHLVDDKMHARSTGPYSLVTQQPLGGKAQFGGQRLGEMEVWALEAYGAAHTLQELLTIKSDDMTGRSKIYEAIVKGEPSTTAGIPESFNVLVQELRGLALDLAIFDNNSKQIPLTEKDEELIAKSKSNF

SEQ ID NO: 52939 - DNA, 936 bp, Unknown
  Obtained from environmental sample
  misc_feature (1)..(936): n is a, c, g, or t
gtgatccggcttgacttgagcaccggaagatacttgaaagggacgacggaattggacgaggtgctgcgcgtcgggttggagtctgaggcgtacaagtatggaatatcgctcgcgcacacggatcatcccgtcagcaggttcaagtacctcatagaaaaagcgcacgaaaagaccggtgaaaagtccgtcgtgattatcgacgagtacgacagcccgctgacaggtactctgaccaaacgagatgtccatattgaactgcgggacgaactcagggcgttctacagcgtcctcaaatcttgcgacgcccacctgagcttcatattcctaaccggcattagcaagttctcccaagtaagcgtcttttccgccttgaaccaactctccgacctaacgcttgacccgcgctacgcggacatctgcggtctgacccaagaggagttggaggcgaatttcgggccggagattgatggcgttttggaaagtacggggagcagccgcgaggaatacattgacaaactgcgtcgcttctacaacggctaccgcttctccgagaacccgctcacggtatacaatccattcgggatactcaatcatttcgaaaataacggaaaattcaggccgtattggtatagaaccggcacgcccacgctcctgaccgacctgattaacgaccggaacatcgacatcttgaacctgaacaatacgcgggtcgggtacgaggatttcgaccggtttgagatagacaatatggaaccggagccgttattgtaccaaaccggttatctcactataacggattacgacgaaagccgcaggagttgttttcacgctcgattatcccaaatttggaggtgcgcaaacgcctttttcacatcgcttgctgcgcactgcatgaagacctctttgagagagtcaaccgcgtatgcgataagttga

SEQ ID NO: 52940 - protein, 311 aa, Unknown
  Obtained from environmental sample
  DOMAIN (1)...(311): Protein of unknown function (DUF1703)
  misc_feature (1)..(311): Xaa is any amino acid
MIRLDLSTGRYLKGTTELDEVLRVGLESEAYKYGISLAHTDHPVSRFKYLIEKAHEKTGEKSVVIIDEYDSPLTGTLTKRDVHIELRDELRAFYSVLKSCDAHLSFIFLTGISKFSQVSVFSALNQLSDLTLDPRYADICGLTQEELEANFGPEIDGVLESTGSSREEYIDKLRRFYNGYRFSENPLTVYNPFGILNHFENNGKFRPYWYRTGTPTLLTDLINDRNIDILNLNNTRVGYEDFDRFEIDNMEPEPLLYQTGYLTITDYDESRRSCFHARLSQIWRCANAFFTSLAAHCMKTSLRESTAYAIS

SEQ ID NO: 52941 - DNA, 663 bp, Unknown
  Obtained from environmental sample
  misc_feature (1)..(663): n is a, c, g, or t
atgctcaagattggccgagggggtcgcgtacgaagcaaacaggactatgatagggcaattgcggattataatcaggctatacaaattaaccccaattacgctgatgcctattacaaccgtggtaacgcgtactatgccaaacaggacaatgatagggcaattgcggactataatcaggcgataaattttaattccaataatgctgatgtctattacaaccgtggtgccgcatacggaaacaaaaaagacttcgatagggcaatcgcggactataatcaggcgatacagcttaatcccaataatgcggatgcctatgtcaaccgtggcatcgcgtataaaaacaaacaggactacgatagggcaatcgcggactataatcaggcgatacagcttaaacccaatgacgcggttgtctataacaataggggcaatgcgtacagaaacaaacaggactatgatagggcaatcgcggactataaccaggctataaagcttgaccccaaatatgcaaccgcttatgtcaaccgtggaactacgtatgaagactacaaaaacgacctcaaccgcgccattgccgattatgaagccgtgttaaaaataaatccaaatgacgccaacgtaaaacagtatcttgacgcggccaggcaaaaacggggaagataa

SEQ ID NO: 52942 - protein, 220 aa, Unknown
  Obtained from environmental sample
  DOMAIN (34)...(67): Tetratricopeptide repeat
  misc_feature (1)..(220): Xaa is any amino acid
MLKIGRGGRVRSKQDYDRAIADYNQAIQINPNYADAYYNRGNAYYAKQDNDRAIADYNQAINFNSNNADVYYNRGAAYGNKKDFDRAIADYNQAIQLNPNNADAYVNRGIAYKNKQDYDRAIADYNQAIQLKPNDAVVYNNRGNAYRNKQDYDRAIADYNQAIKLDPKYATAYVNRGTTYEDYKNDLNRAIADYEAVLKINPNDANVKQYLDAARQKRGR

SEQ ID NO: 52943 - DNA, 825 bp, Unknown
  Obtained from environmental sample
  misc_feature (1)..(825): n is a, c, g, or t
atgcgaaaccgcgataaggcggaaaacttaaaaaagataacgtcgccttttcttctaaggcgcgttaaaacagacaaaaaaatcattaaagacctgcctgaaaaaattgttaccaatgaatacgccgtgctggaaaaagagcaagccgccctgtacgagagcgttgttgctgagtcaattcaaaaatcggaaaaagccgaagcacaggaacgttccgcattgattctttcaatgctcactgccctgaaacagatatgcgatcatccgcgggtgttcgacaaggaaagccccgccgttccgcagttgtcaggcaaggcgcagcttcttgttaccctgcttgaagaaatgctggcaaaccgcgagaaagtgttaattttcagccagtatgtggagactcttgactgtctgcggttaattattaaaaaagaactgggcgaggcggcgcttgtctaccacggcgggcttggacagaatacccgcttaagccttgtagatcaatttcaaaatgacgcatctgcgcggataatgcttgtcagtttaagggcgggaggtcttggcctcaatctgacagccgcaagccgcgttatccattatgatctgtggtacaatcccgccgttgaaaatcaggcgacagaccgcgcattccgtatcgggcagaaacgcaatgtctttgtccaccgttttataactaaaaacagttttgaagaaaaaatagacgcgatgatctccagcaagcaagaattggccgacatgaccgtcaactccggagaatcatggctagcccgcatgagtcatgatgagttaaaagcgctgtttgaacggtaa

SEQ ID NO: 52944 - protein, 274 aa, Unknown
  Obtained from environmental sample
  DOMAIN (140)...(218): Helicase conserved C-terminal domain
  misc_feature (1)..(274): Xaa is any amino acid
MRNRDKAENLKKITSPFLLRRVKTDKKIIKDLPEKIVTNEYAVLEKEQAALYESVVAESIQKSEKAEAQERSALILSMLTALKQICDHPRVFDKESPAVPQLSGKAQLLVTLLEEMLANREKVLIFSQYVETLDCLRLIIKKELGEAALVYHGGLGQNTRLSLVDQFQNDASARIMLVSLRAGGLGLNLTAASRVIHYDLWYNPAVENQATDRAFRIGQKRNVFVHRFITKNSFEEKIDAMISSKQELADMTVNSGESWLARMSHDELKALFER

SEQ ID NO: 52945 - DNA, 849 bp, Unknown
  Obtained from environmental sample
  misc_feature (1)..(849): n is a, c, g, or t
gtgatgtccatgaaggaatttgaaaaacttgtcagacagaaacgcgcccttgtacgttttaaagacggttttgtcagaatgaatcctgaagaattttcccgattgttaaaaaaatcaaaagacgcccagcccggttttaatgattttttaaaagcgcatttttcaggcgactctgttcttgcctttgacgcgcgcgaaacaatcgacaacattttccgcgagcagaaattttcaattccggcggcgcttaaagctcaattaaggccgtaccaaaaacgcggttttaactggatatgctctcttttattctccggtttcggctgcatacttgccgacgatatgggtcttggaaaaaccgttcagtctatcgcctccatgctgcggcttaaagaagaggggcttttaaaaaacaactgtcttgttgttgcgcccgccgccctccttgccaactgggaaagggaattgaagcgttttgctccctcccttcgcgtatcccgctatcacggtaaccgccgcgttattgataaaaagcacgatatattcctcaccacatatcaaaccgccgtgcgcgacgcggaaaaattaaggaacgaagcgttctccatgttaattattgacgaagcccacttaatgaaaaacgcggatacccgcatttcacgcacgataaaacagcttcgttcccaataccgccttgcgctttcgggaactcccgtagaaaaccgtcttgaagacttacgttccctttttgattttatccttcccggttatcttggagacaccgcgcaattaaaaaacagtaccgcatacccattgaagttatgcgaaaccgcgataaggcggaaaacttaa

SEQ ID NO: 52946 - protein, 282 aa, Unknown
  Obtained from environmental sample
  DOMAIN (88)...(245): DEAD/DEAH box helicase
  misc_feature (1)..(282): Xaa is any amino acid
MMSMKEFEKLVRQKRALVRFKDGFVRMNPEEFSRLLKKSKDAQPGFNDFLKAHFSGDSVLAFDARETIDNIFREQKFSIPAALKAQLRPYQKRGFNWICSLLFSGFGCILADDMGLGKTVQSIASMLRLKEEGLLKNNCLVVAPAALLANWERELKRFAPSLRVSRYHGNRRVIDKKHDIFLTTYQTAVRDAEKLRNEAFSMLIIDEAHLMKNADTRISRTIKQLRSQYRLALSGTPVENRLEDLRSLFDFILPGYLGDTAQLKNSTAYPLKLCETAIRRKT

SEQ ID NO: 52947 - DNA, 1446 bp, Unknown
  Obtained from environmental sample
  misc_feature (1)..(1446): n is a, c, g, or t
ttgaatctgtcgcctggttcaatgagaccgcgggaggatttacctgtgtttgagaacatcatagcgcaggcggcggcaggccagctaaaagcggatattctttcaaacaagcttgcgccctccatgcttttttttggacctacagcgtcgggaaaaggcagcgccgcaatggagcttgcgcgttccctctcatgcgagaagggggatgccgtttggaactgtccctgtccttcctgcgtccgccatcgatcccttatccacgccgatcttgcgatgattgggcctcgcagttttacggcagagatagccgcttcccgcgctgctttcctgagagacccctcgttgtccgcaggtcgatcccttttcatccgttctttgagaaaactgcttgcgcgtttcgctccctctgtctgggagtacgagccgaaatcaaacaaacttaaccccttgccccttcttcattcgctggaagaggaacttgacgagtttgaagcagtgacggttgatctgtcatcaagcgatcctttgaatgacaatgtacaggacaagaacaacgcgcttaataatctcactgattcccttgttaagaacgctgtcaaacttgatgaatgtatcagcgaggctgtccccatagcgcaggtacgcaaggccgcatactgggccaggctttccccgtcaggaaaacgcaaaacattgatcattgagaacgccgaccgtatggaagaaaaggcgcgaagcgccctgctcaaactgcttgaggaaccgcctgaatcgatcagcattatcctcaccgccctcaggcgggaggctgtcatgccgacgattctgtcacgccttcggccctatcgttttacagccagaagcccacttgaggaaaaagaaattctccgcagggtttttagggatccccgctggacacaggattctgcgccttctggagaaaacgcatcgactaacgcttccggccttatcgggacatatcttgaatcctttcttccgcagccttcggacaagttgttacctcttgcggcgttctttgttgccgctgtcgcgcgctcggctgtggtttttcagaaaagccgcggcataaccgaaataccggaaaccgtcgccgctttgggaagctattgcgccagaatagcggaatcagccggtttggaacgccctgttgacgccaaagaaaccatttcctctttgctgtcccagagcagcgattttgaaggacgttctttcccgcgttttctggcccttgttcttgatcttgtgtcgtggtcgcttgagcagtgcgcttccaatccggatgtcgtggcttgcagggaaacatggaggctgcggatcagggaagcgtacgcggcttattctgtctggaaccaaaggccggagaccgcgcttgaatcgctgtttttccgtctcagggaagaagccgcgggagcggcgttgacatga

SEQ ID NO: 52948 - protein, 481 aa, Unknown
  Obtained from environmental sample
  misc_feature (1)..(481): Xaa is any amino acid
MNLSPGSMRPREDLPVFENIIAQAAAGQLKADILSNKLAPSMLFFGPTASGKGSAAMELARSLSCEKGDAVWNCPCPSCVRHRSLIHADLAMIGPRSFTAEIAASRAAFLRDPSLSAGRSLFIRSLRKLLARFAPSVWEYEPKSNKLNPLPLLHSLEEELDEFEAVTVDLSSSDPLNDNVQDKNNALNNLTDSLVKNAVKLDECISEAVPIAQVRKAAYWARLSPSGKRKTLIIENADRMEEKARSALLKLLEEPPESISIILTALRREAVMPTILSRLRPYRFTARSPLEEKEILRRVFRDPRWTQDSAPSGENASTNASGLIGTYLESFLPQPSDKLLPLAAFFVAAVARSAVVFQKSRGITEIPETVAALGSYCARIAESAGLERPVDAKETISSLLSQSSDFEGRSFPRFLALVLDLVSWSLEQCASNPDVVACRETWRLRIREAYAAYSVWNQRPETALESLFFRLREEAAGAALT

SEQ ID NO: 52949 - DNA, 1137 bp, Unknown
  Obtained from environmental sample
  misc_feature (1)..(1137): n is a, c, g, or t
gtgccgggaactccttgtatcggcttcgcaggaatcttccgtcttgacaccgtgcttgactctctgccctgcggcatactggtatgcgatgaaaaacaccgcctgctcatggcgaataaagccgcactgcgttttctgcccatcagccacgcggaaggcgaacttttgtgggaactaatccccgatgagcgcatagcaaatttttttcaacaggcgttaaaacgcggtgacaggctgctggaacaggaactggatctccaaacgcaagggccgccgggcccgaaccgcctgctctcgatcagcgtacacccgcttgtcgagaaaaggcatataacaggttccctcgtctatattgaagatataaccgagaaaaggggcagagaggtccgtcttcgccgcgctgaaaatcttgccagccttaccacgcttgcggcaggcgtcgcccacgagataaagaacccactgggggctatttcgattcatcttcagcttatgcgaaaagccctcaataaaaaggaaaaacaacaggaacctgcggcaacagatgcgttaatcgataaatatttctccgtgttaaacgaagaagtagaccggctgaacggcatagttatcgactttttatttgccgtgcgccccatgtccctggaactctgcgagggagacctcaacgcgatgattaacgggcttggcgaatttatccgcgctgaactggagcagtccaatatacggctcctgcttgaactggatgataaactcccccccgtgctttttgacgagcgttatatgaaacaggttttgcttaacctgattaaaaacgcccaggccgcaatgccaaagggagggctgttaaccattgccacctttggaacggacagcgaaatacggataagcgtatgcgacacgggcacggggattagccaggaaaatcttaaaaaaatatttgaaccttattntacgacaaaaagcagcggcacgggtcttgggctgacccttgtatataaaataatcagggagcatcagggcgaaatgtcggttgattcgagggaaggggaaggaacggattttgagatcatcctccctgtctaccagaaagatcggcgtttgataaattattcaggagcaaaaaatgaaatttaa

SEQ ID NO: 52950 - protein, 378 aa, Unknown
  Obtained from environmental sample
  DOMAIN (13)...(121): PAS fold
  misc_feature (1)..(378): Xaa is any amino acid
MPGTPCIGFAGIFRLDTVLDSLPCGILVCDEKHRLLMANKAALRFLPISHAEGELLWELIPDERIANFFQQALKRGDRLLEQELDLQTQGPPGPNRLLSISVHPLVEKRHITGSLVYIEDITEKRGREVRLRRAENLASLTTLAAGVAHEIKNPLGAISIHLQLMRKALNKKEKQQEPAATDALIDKYFSVLNEEVDRLNGIVIDFLFAVRPMSLELCEGDLNAMINGLGEFIRAELEQSNIRLLLELDDKLPPVLFDERYMKQVLLNLIKNAQAAMPKGGLLTIATFGTDSEIRISVCDTGTGISQENLKKIFEPYXTTKSSGTGLGLTLVYKIIREHQGEMSVDSREGEGTDFEIILPVYQKDRRLINYSGAKNEI

SEQ ID NO: 52951 - DNA, 513 bp, Unknown
  Obtained from environmental sample
  misc_feature (1)..(513): n is a, c, g, or t
atgtttgcaaattgtcaggaattttatattctgatgcgggcaggggttcccagcatcgcctcgcatattttgtcaaatcattacaacaataccaggactgagtactaccggcagctgcaaaacgcttctgaaacaggggatttgagcgcgtttattcaatatgcagttgaaggattccgtgacggcctggaaacaacgattgaaataatccataaaaaccagacagagctaacctggaacaattttgtccatgatattaccgtaaaaatgcaggacgagggtaaaaaccggaatgttctgcggcgcatacgccagctggcgtataatatacccgctgaccggttttatagtcttgatgaaatagcgattctcaatctggaaattttaggcatataccgagagcttagccaaatgaccctgcgccgcgatttggatcttttggcggggaaagaactgcttaagattgaaaaaaataaataccgcgccaattatgggctgctgcacgacctttag

SEQ ID NO: 52952 - protein, 170 aa, Unknown
  Obtained from environmental sample
  misc_feature (1)..(170): Xaa is any amino acid
MFANCQEFYILMRAGVPSIASHILSNHYNNTRTEYYRQLQNASETGDLSAFIQYAVEGFRDGLETTIEIIHKNQTELTWNNFVHDITVKMQDEGKNRNVLRRIRQLAYNIPADRFYSLDEIAILNLEILGIYRELSQMTLRRDLDLLAGKELLKIEKNKYRANYGLLHDL

SEQ ID NO: 52953 - DNA, 615 bp, Unknown
  Obtained from environmental sample
  misc_feature (1)..(615): n is a, c, g, or t
ttgggttatccaccgataattgtaaagaataaaatgaaagctgtcatagcggtggcgctccttatacttattatcggaaatatctgggcggtcgatatagattcttaccaatttattgaccatctcaggagcctttccaagcctgggcagcctgaaatcttcgaggacggggtgctttttaccgcttctgcatccaatcgcagagtgggtatttcttttgcccacgaaggctacgctaaggtttactggtttaagcagctttttataccaagggatcccgccgaactttacatcgacggcaaacggcaaaagggggtcgatcccaatgttgattcggggatactgttccacatcgagacaattcccgcaaatctaaaaaacctggattacaggctgataattgacggcctttggacaacggatccggcaaaccccatcactgttacaggcccctccggcattttggaatcgcgtttccctctgccggaaaaacccaaacctcatctggacgccgtccagcccggaacctacaggttcgtctactgttcagatcccggcgaattagttaccgttgccggaagctttaataactgggacccttcatgtacgaactaa

SEQ ID NO: 52954 - protein, 204 aa, Unknown
  Obtained from environmental sample
  misc_feature (1)..(204): Xaa is any amino acid
MGYPPIIVKNKMKAVIAVALLILIIGNIWAVDIDSYQFIDHLRSLSKPGQPEIFEDGVLFTASASNRRVGISFAHEGYAKVYWFKQLFIPRDPAELYIDGKRQKGVDPNVDSGILFHIETIPANLKNLDYRLIIDGLWTTDPANPITVTGPSGILESRFPLPEKPKPHLDAVQPGTYRFVYCSDPGELVTVAGSFNNWDPSCTN

SEQ ID NO: 52955 - DNA, 633 bp, Unknown
  Obtained from environmental sample
  misc_feature (1)..(633): n is a, c, g, or t
atgctttcatcggaactaaaatcaggaaaatcatccatgcccctattagtttcgtcaggagtggcggcttctcctgaaccatctgcggcagtttcatctgcgggaagcccaaagtcatccaggttaaaatcgggaaggcctgagtcctggtcttcttgcccctgttccggcagaccaagatcgcctaaatctgaaaaatcttcgtttgaaaaatcactatcgcttatttcattttcagcgccctcttcccccgaagaggcccgttcagcctcaatttcatcggcaaaaccgtttaaaaggtctgggggagtgctttcttcgccgtttgagatatcaatatccggggtaatatcatccggtattgtatcaatggaattgcctaaatcagtttccgttggagtttcatcaacaggaagatcggccgttcctcctcctaacaggtcgccaagatcgccgaaaaggtccattccgcctgtgggttcaccgtcaggcggggaatatggttcgccggctgcttccgccgacgcatctcccgtgccttcgctctcggcggctaaagcaggcccgctctccggctctctatccggcaggggaagatcatcaaaaggcagatccagatcccttaaggtttga

SEQ ID NO: 52956 - protein, 210 aa, Unknown
  Obtained from environmental sample
  SIGNAL (1)...(23)
  misc_feature (1)..(210): Xaa is any amino acid
MLSSELKSGKSSMPLLVSSGVAASPEPSAAVSSAGSPKSSRLKSGRPESWSSCPCSGRPRSPKSEKSSFEKSLSLISFSAPSSPEEARSASISSAKPFKRSGGVLSSPFEISISGVISSGIVSMELPKSVSVGVSSTGRSAVPPPNRSPRSPKRSIPPVGSPSGGEYGSPAASADASPVPSLSAAKAGPLSGSLSGRGRSSKGRSRSLKV

SEQ ID NO: 52957 - DNA, 921 bp, Unknown
  Obtained from environmental sample
  misc_feature (1)..(921): n is a, c, g, or t
atgccggtgcccaagccgcctttcccggcgaataaaggcctttggggaaagcctaccattataaacaatgtggaaacccttgcgaatatcccggttattaccgccaagggcggggcatggctcgcgagacttggaaccgaaaaatccaagggaaccaaggttttcgcgcttaccggaaaggtcaagaactccggcctcgtggaagttccgatgggaaccaccctgcgggaaatcatctttgaaatcggcgggggcatcaagaacggaaagaaattcaagggcgtacagacaggcgggccttcaggcggtattcttaccgagaagtcccttgatttgcccattgactttgacactcttacagctaacggctccatgatgggttccggaggcatgatcgtcatggacgaggacgactgcgtcgttgacgtcgcgcgtttctacatggacttctgcgttgacgaaagctgcggcaaatgttccccctgccgcatcggcaccacgcagatactgcgccttttggaaaaaatcgccaatggcaacggcgaggacgaggatctcgccaagcttgaagagatcggcgttgccatgacaaaggcaagcctctgtatgctcggcggctcggcggcaaacccgacgctgtccacgatcaaaaatttccgcgacgaataccttgagcatatccatgacaagaaatgccgcgccggcaagtgcaaaaaactactgcgcttcatgattaacacggacaagtgcattggctgcgggatgtgcgcgaagaaatgtcccgcaaactgcataacggcgctggatccggcgaaatatccgggcaagaaaaagccgccttacgcgattgatcagaacgcctgcgttaaatgcggcgaatgtatgaagaattgcaaattcagcgcggtttcgcggggttaa

SEQ ID NO: 52958 - protein, 306 aa, Unknown
  Obtained from environmental sample
  DOMAIN (1)...(100): Respiratory-chain NADH dehydrogenase 51 Kd subunit
  misc_feature (1)..(306): Xaa is any amino acid
MPVPKPPFPANKGLWGKPTIINNVETLANIPVITAKGGAWLARLGTEKSKGTKVFALTGKVKNSGLVEVPMGTTLREIIFEIGGGIKNGKKFKGVQTGGPSGGILTEKSLDLPIDFDTLTANGSMMGSGGMIVMDEDDCVVDVARFYMDFCVDESCGKCSPCRIGTTQILRLLEKIANGNGEDEDLAKLEEIGVAMTKASLCMLGGSAANPTLSTIKNFRDEYLEHIHDKKCRAGKCKKLLRFMINTDKCIGCGMCAKKCPANCITALDPAKYPGKKKPPYAIDQNACVKCGECMKNCKFSAVSRG

SEQ ID NO: 52959 - DNA, 636 bp, Unknown
  Obtained from environmental sample
  misc_feature (1)..(636): n is a, c, g, or t
atgataaacttaaaaataaacggcgttccgatccaggttgaggaaggaaccacgattcttgaagccgccaggaaggcgaatattatcattccctcgctttgttacaatcccgatcttccggcatgggcttcctgcggcatctgcatagtccgcgtggccggcagccccaagctgatccgcgcctgtacgaccccggttgacaggagtctggaaggcaaggatattatcactcatgacggcgagatcatcgcgacccggcgcgtcgtgctggaattgatcctttccaaccatcccaatgactgtctgcaatgcccccgcaacaataactgcgagctgcagacccttgccgcggaattcggcatacgcgaatctccctacaagaaggtaacggaggggctccccattgacgattccaacccggcgattatccttaaccccgagaaatgcattcgctgcggcaggtgcgtcaaggtctgccaggacgtgcagaatgtctgggcgcttgaattcctgggacgcggcatcaggggaaagattgccagcgccgcggacgttccgttaggcgaaggccccctgcatcaagtgcggccagtgttccgcccactgccctgtcggcgcgatttacgagcgcgatga

SEQ ID NO: 52960 - protein, 211 aa, Unknown
  Obtained from environmental sample
  DOMAIN (142)...(165): 4Fe-4S binding domain
  misc_feature (1)..(211): Xaa is any amino acid
MINLKINGVPIQVEEGTTILEAARKANIIIPSLCYNPDLPAWASCGICIVRVAGSPKLIRACTTPVDRSLEGKDIITHDGEIIATRRVVLELILSNHPNDCLQCPRNNNCELQTLAAEFGIRESPYKKVTEGLPIDDSNPAIILNPEKCIRCGRCVKVCQDVQNVWALEFLGRGIRGKIASAADVPLGEGPLHQVRPVFRPLPCRRDLRAR

SEQ ID NO: 52961 - DNA, 351 bp, Unknown
  Obtained from environmental sample
  misc_feature (1)..(351): n is a, c, g, or t
atgcaaaacgatttagtttcacgccttatgagcctacctgccaagcccggtgtttatttgatgaagaactccaaaggcgagattatttatataggcaaggctaaacttttgagcaagagggttcgcagctattttgacggaagggaaaaagaagggcatagagccgcaaagctcatacttccgcacatagaggatatagagtggataataaccgaaacggaatcggaagctcttattttagaggcaaatttaatagcacagcacccagccatattacaatgttcgccaaaaagacaacaagcattttccatatttaatgctgaaaatgcaagagaaattcccacgccttag

SEQ ID NO: 52962 - protein, 116 aa, Unknown
  Obtained from environmental sample
  DOMAIN (15)...(99): GIY-YIG catalytic domain
  misc_feature (1)..(116): Xaa is any amino acid
MQNDLVSRLMSLPAKPGVYLMKNSKGEIIYIGKAKLLSKRVRSYFDGREKEGHRAAKLILPHIEDIEWIITETESEALILEANLIAQHPAILQCSPKRQQAFSIFNAENAREIPTP

SEQ ID NO: 52963 - DNA, 903 bp, Unknown
  Obtained from environmental sample
  misc_feature (1)..(903): n is a, c, g, or t
gtggtctatataaccaaatggcgggtcatcgccaaaaacggcaacttgcaaaaaaccgcgttttattattatttcaagcccattcggttctttttttccgcaaccaatagcaaaaaaagccaaggccaaaacaagcgtgcagagtttaagtttgcccataagtgcaaatatagtaataatttttctatatttatagaccctagtatggaaaacgacactgtagaagttatagcaatagacggacctagcgccaccggcaaaagcaccacggcgaaattggttgccaaagagcttggctatacttatttagataccggagctatgtatagagcggttgcttatttagctgaaagcggagagcttcgggtggagaatagcttgaatttaaatgagataagaatttcttttgataaaaataatcaaattttgataaatggcgttaatagagaaggtgaaattagagaccctaaaataagcacggtggttagcaaatacagtgctatgccatacatcagggaagcactaacggcacggcaaagggaaattggctctgggcagccttgtgttttagacgggcgcgatattgggactgttgtgtttcccaatgcaaaatacaagttctttttaaccgcggattatggcacacgtgctgctaggcggctgctagagctacaggctgcgggtaaggctctgggtgagacccttgaaagcgtagagaaaaatttaagagaaagggataaggcagattctgagagagaaatagcccctcttgtgaaagctaaagatgcaattgaaatagacacctcgcacatcacaatccaacaacaagttcagaaaattttgcagagcgtaggcgaggtggcgcgttgcaaatattctctgggcgcaacccgaacaggttaa

SEQ ID NO: 52964 - protein, 300 aa, Unknown
  Obtained from environmental sample
  DOMAIN (124)...(282): Cytidylate kinase
  misc_feature (1)..(300): Xaa is any amino acid
MVYITKWRVIAKNGNLQKTAFYYYFKPIRFFFSATNSKKSQGQNKRAEFKFAHKCKYSNNFSIFIDPSMENDTVEVIAIDGPSATGKSTTAKLVAKELGYTYLDTGAMYRAVAYLAESGELRVENSLNLNEIRISFDKNNQILINGVNREGEIRDPKISTVVSKYSAMPYIREALTARQREIGSGQPCVLDGRDIGTVVFPNAKYKFFLTADYGTRAARRLLELQAAGKALGETLESVEKNLRERDKADSEREIAPLVKAKDAIEIDTSHITIQQQVQKILQSVGEVARCKYSLGATRTG

SEQ ID NO: 52965 - DNA, 717 bp, Unknown
  Obtained from environmental sample
  misc_feature (1)..(717): n is a, c, g, or t
atggatatacataatatttcggaggacaatgtaatcaatgcggtgcaggatatttttgacactgtaaaaaaagaaggtaatccggataaattgtgtctttgcgaacagtgtaaactggatacaatttgttatacgcttaaccgcgttgagccgaggtatatagtttccaacagggggcttacccgcgttgatcgggatggttcggaacggcatcagatgcacgccgacattaccgccctggtttacaaaggactgcagcaggttaatcataacctgcgtccaaccgccaaccatgacggcaccttacccgaagagataataaagaaactttcttttgatattcccaccatcgtggggaggctctttgacggcgaaacctttgcccctatttccggggttacggtgaaattatactggaacggcgagttagttcccatgcggaacacaaattggcagaacccctatacccttgtcgcgaatactccgggagcgtttacattctggcctgcccctgtacccgccgcaatggtagacatgcatcaaatcttcgagtattcgctaattatagaatccgaaaagtatgacgccttaacccacttcttcaagatacccactgtcagcgctttccagaccgagcagacctattttatgaacagaaccttcaagcttccggatctctatctgttcagccccggggaagcggaacaaaatggctaa

SEQ ID NO: 52966 - protein, 238 aa, Unknown
  Obtained from environmental sample
  misc_feature (1)..(238): Xaa is any amino acid
MDIHNISEDNVINAVQDIFDTVKKEGNPDKLCLCEQCKLDTICYTLNRVEPRYIVSNRGLTRVDRDGSERHQMHADITALVYKGLQQVNHNLRPTANHDGTLPEEIIKKLSFDIPTIVGRLFDGETFAPISGVTVKLYWNGELVPMRNTNWQNPYTLVANTPGAFTFWPAPVPAAMVDMHQIFEYSLIIESEKYDALTHFFKIPTVSAFQTEQTYFMNRTFKLPDLYLFSPGEAEQNG

SEQ ID NO: 52967 - DNA, 1257 bp, Unknown
  Obtained from environmental sample
  misc_feature (1)..(1257): n is a, c, g, or t
atggcttcattcttgtccgtattaagcgaaagattctcatgccctgtaagggatgtcctgtggggtcatgtgtattttaccccggaaatttccgcgcttgccgaatccccgccctttatgcggctgcaccgcattttgcagcttggcccggtacaccagatctatccgggcgcgacccatacccgcgccagccactcaatcggggtctatcacatagggcggcggctgctgcaaaatctggtggaacgcggcgcctcggactgggtcagccgggagggggtaatggcctttctctgcgcctgcctgcttcacgaccttggccattttccctttacccattccctgaaggaactgcccctgcgctcgcacgaatcgcttactggttcaataatcctttcggagccaataaaaagtctggttgccgcctgcggcgcggatccggcgctgacagcggcgatagtagacaaagaactccccgccacagataaagaattgtttttctaccgaaaactcctttccggatgccttgatccggacaaactggactatttaaaccgcgatgcccggtactgcggcgtcccttacggggtacaggacgttgatttcatactttcacgcctcatccctgaccaaaacaggggcgccgacatcgattcccggctaattcccaacgtggaagccatacttttcgcaaaatacctgatgtaccggacggtctactggcaccggcaggtacgcgcggctacatccatgatcaaaaaagcgctgctggaaggcatggaaaaagggttaatagccggtgaagagctgtacgaccttgacgatcagagcctgtttttcctgttaaaggacaaaaaacccggaagcgcgcttgcgcaaggggtatggaacggcagactctattccacagccgcggaaattccctttaaccaacaggatcacgccccattgaaggacattgccaaaagatccctccacgaggaacggcttgccggggaattccgccgcgccggtgtcccgcttggcgataaggatcttatcattgacgtgcctgagccggtctcgtttgagacaggccttttcgtactggacgaaaaacgcaattttgcggatagttccagcgccttcaagacgacaacgctggattcctttgtaaaaacactgtatacgatcaggatttttattagcccggatttttgcgaanaagtagagacattgcctgaactatctgctatactgaatttggagaatttatga

SEQ ID NO: 52968 - protein, 418 aa, Unknown
  Obtained from environmental sample
  DOMAIN (62)...(160): HD domain
  misc_feature (1)..(418): Xaa is any amino acid
MASFLSVLSERFSCPVRDVLWGHVYFTPEISALAESPPFMRLHRILQLGPVHQIYPGATHTRASHSIGVYHIGRRLLQNLVERGASDWVSREGVMAFLCACLLHDLGHFPFTHSLKELPLRSHESLTGSIILSEPIKSLVAACGADPALTAAIVDKELPATDKELFFYRKLLSGCLDPDKLDYLNRDARYCGVPYGVQDVDFILSRLIPDQNRGADIDSRLIPNVEAILFAKYLMYRTVYWHRQVRAATSMIKKALLEGMEKGLIAGEELYDLDDQSLFFLLKDKKPGSALAQGVWNGRLYSTAAEIPFNQQDHAPLKDIAKRSLHEERLAGEFRRAGVPLGDKDLIIDVPEPVSFETGLFVLDEKRNFADSSSAFKTTTLDSFVKTLYTIRIFISPDFCEXVETLPELSAILNLENL

SEQ ID NO: 52969 - DNA, 411 bp, Unknown
  Obtained from environmental sample
  misc_feature (1)..(411): n is a, c, g, or t
atgataacatacatagcactgtttgaatatgaacaaggaaaacaaggttttagcgttgtttttcctgatttttctggcttaataagcgcaggagatacgtatgaagatactttgcaactggctcacgaagctcttgcagggcatatagaagttttgcaagattacaacgagcggatacccgaaccgagaacaatagagcaaatacagaaaacttgggaagattggaaagaatgggaagagaattatacgtttcttgttgttccaataacggtattttcacggagcaaaaagcctaaggttgtaaatgttgaacttgatgaatctttgctggaacgaatagatatggtaacttctaatcgctcagaatttataaatcgtgccttggaacattcttttgagttgagaacctaa

SEQ ID NO: 52970 - protein, 136 aa, Unknown
  Obtained from environmental sample
  DOMAIN (3)...(51): Uncharacterised protein family (UPF0150)
  misc_feature (1)..(136): Xaa is any amino acid
MITYIALFEYEQGKQGFSVVFPDFSGLISAGDTYEDTLQLAHEALAGHIEVLQDYNERIPEPRTIEQIQKTWEDWKEWEENYTFLVVPITVFSRSKKPKVVNVELDESLLERIDMVTSNRSEFINRALEHSFELRT

SEQ ID NO: 52971 - DNA, 699 bp, Unknown
  Obtained from environmental sample
  misc_feature (1)..(699): n is a, c, g, or t
atggattggaggtcaagaaattttggagaagccaaaatgagaaaatgtgttgttctcgcatgtattttcttcgctacggttcttttcaccctaggtgtttttgaaatatcttttccagatgtttttagcttgacgaattttgattttgttttgaataaatttccgcgagcttggaaatatggcttgcatataggcattgcagaagtggtgctaggagcattgctcattattcctgcttggaaaataaataaaagtttaacagaaaagattcttgaaattctgattaggcttggcattggcggaatgtttatttttgctagtgtttttaagataacagaccccaaaggctttgctgttttaattgctcaatatcagtttttgccgcataacttggtgaatttatgggcattgattttgccgcaggttgaattttggtttggactcgctttgattgtcactccctttgtaaaagagtgcgttttggtgattttagcattgtttgccagttttataatagcacttgtgtgggcacttgctcttgaccttggcataacttgcgggtgttttcaaatagacggggcacagtcaaaagcagaggcttggacagctcttattcgcgaccttattttgctggggncaacagcttggcttttgactagggagaataatttatatttttcgttgttacctggggggtaa

SEQ ID NO: 52972 - protein, 232 aa, Unknown
  Obtained from environmental sample
  misc_feature (1)..(232): Xaa is any amino acid
MDWRSRNFGEAKMRKCVVLACIFFATVLFTLGVFEISFPDVFSLTNFDFVLNKFPRAWKYGLHIGIAEVVLGALLIIPAWKINKSLTEKILEILIRLGIGGMFIFASVFKITDPKGFAVLIAQYQFLPHNLVNLWALILPQVEFWFGLALIVTPFVKECVLVILALFASFIIALVWALALDLGITCGCFQIDGAQSKAEAWTALIRDLILLGXTAWLLTRENNLYFSLLPGG

SEQ ID NO: 52973 - DNA, 1419 bp, Unknown
  Obtained from environmental sample
  misc_feature (1)..(1419): n is a, c, g, or t
atgcgcgaagctattggggatgagtctgtttttctgcggattgccgaattcaaaaacggcttgatacaatttactgattccactaacgccatgtggcttattaaggagcatgggcgggatattcggtataatgccgcatggaaaaaatgggtagtctggaacggtaggtattgggaaatggacgagggcagcgttttagttcatgaaaaagggcttgaaatggtgcggaatatctatgacgaccttctgaaaacagccgattacagggagcgtattgacattgaaaaagcggcgataatgagcgagagcgtaagacggcgcaaggcttttgtggaggcggctacctgggtttccgctttacggattaaaactgacgagcttgaccctaatccgtggctgttgaatgtcaggaatgggacgattgatattttaagcggcgaattcagggagcacaggcaagaggacatgatgacgaaaattgccaatgtggaatatgaccctgacgccgactgcccgatgtggaagcagtttgtccgtgaaatcatggattataaagccgatttgataaagtttgtccagactgcggcggggtggtctttatcaggcgatatttcagaacaaacgatgttcattttgtacggaacaggcgcgaacggaaaatcaacgtttttgaatacgataatgtacctgctcggcgactatgccacctcaacgcccaccgaaacttttatgaaaaaatcgggggataattactcaaacgatgttgcgcgtctgcggggtacacggtttgtaaccactacggaagttgagcaggggcggcggctgtccgaacctttgataaaaaagataaccggcaatgatgaaatgactgcccgcttcctgtacggggaattttttaattttaagccgactttcaaaatttggatggcgaccaatcacaagcctgtcatcaaggggactgatcacggaatatggcggcggattaaacttatcccgttcaacaccaggattacggaagaaaagcaggatagacatcttgaattgaaactgcgggaagaagcaagcggaattctcaactggcttttggaagggatggcggtttggaagctggaaaaactgaaaacgccgaaggccgtgttatttgccactgacgaatacaggggcgaaatggacgtaatcggtaatttcatcaaagaaaaatgtgtccaggaaaaagaaatgaccgtaacgattaaaaggttatacaagacttattctgactggtgcgatgaaaaccacgaacatcctgtaagcgagagattttttactctgcggcttaaagaaatggggtttgtgcaggacagaacggctacggaaaggttttggtcggggataaaaattnacaatttagcaattaacaatgagcaaatagcaaagtaa

SEQ ID NO: 52974 - protein, 472 aa, Unknown
  Obtained from environmental sample
  DOMAIN (134)...(445): Poxvirus D5 protein-like
  misc_feature (1)..(472): Xaa is any amino acid
MREAIGDESVFLRIAEFKNGLIQFTDSTNAMWLIKEHGRDIRYNAAWKKWVVWNGRYWEMDEGSVLVHEKGLEMVRNIYDDLLKTADYRERIDIEKAAIMSESVRRRKAFVEAATWVSALRIKTDELDPNPWLLNVRNGTIDILSGEFREHRQEDMMTKIANVEYDPDADCPMWKQFVREIMDYKADLIKFVQTAAGWSLSGDISEQTMFILYGTGANGKSTFLNTIMYLLGDYATSTPTETFMKKSGDNYSNDVARLRGTRFVTTTEVEQGRRLSEPLIKKITGNDEMTARFLYGEFFNFKPTFKIWMATNHKPVIKGTDHGIWRRIKLIPFNTRITEEKQDRHLELKLREEASGILNWLLEGMAVWKLEKLKTPKAVLFATDEYRGEMDVIGNFIKEKCVQEKEMTVTIKRLYKTYSDWCDENHEHPVSERFFTLRLKEMGFVQDRTATERFWSGIKIXNLAINNEQIAK

SEQ ID NO: 52975 - DNA, 1263 bp, Unknown
  Obtained from environmental sample
  misc_feature (1)..(1263): n is a, c, g, or t
atgcatccagcgattgaaaatttgaaggcgcggggcttctttcagcaatgcaccgacgcacagagactctcggaattaatgaacgagagtccggtaacgttttatattggctgcgatcccaccgggaacagcctgcatatcggccacatggttccctttttcgcctaccgccatctgcgcgaggcgggtcagaagggtattgcccttatcggaggcggcaccgcgcgcataggcgatccttccggaaagtcggaaatgcgtaagatgctgagttacgagcagcttgattccaatgccgcgtctattgaggcgcagcttgaccgcttcatcggttttgacggcgataccgcccgtacggcaaacaacaaggactggcttgccacgcttaactacattgactttctgcgggagataggaagccatttttccgtgaaccgcatgttgagttttgaggcctataagatgaggctggagactggactttctttcattgagtttaattaccagctcctgcaaagttttgacttcctggaactgtaccgccgccacggctgccgcctgcaaattggcggcgatgaccagtggggcaatatcgtcgcgggcgtggagcttgtccgccgcgttgaaggagcggaagttttcggcatgaccttccctctgatcaccactgccgacggcaaaaaaatgggcaagaccgagaaaggggcgcttttccttgatccggcgctgaccggcgcctacgattttttccaatactggcgcaatgtgcaagacgctgacatacgccgctttttgcttatgtttacctttctgccaatcggggaatgtgaggcgctgaccgcgcctgacaaaaaccccaacgaggccaaggagcgcctcgcctgggaggtgaccgccctgatccacggcaaacaagaagccgacaaagcgttggccggcgcgaaagcggcttttggcgccgccgaggggggggacaagtccgccatgccccatgcctcgctttcccgcgccgcgtttgagaaaggctataacgtggtagacctgttctatgacgccggcttattttcgacaaaaagcgaagcccgccgcctggtagagcagggcggggcgtttgtgtccaattccgacggcgaactggccgccgtcagcaatataacagcgcttatcggcgctgacaggcttaacgccgaaggcgaacttgttttacgcgccgggaagaaaaggtactgccttgtaaaattaggaattaggaatgaggaatga

SEQ ID NO: 52976 - protein, 420 aa, Unknown
  Obtained from environmental sample
  DOMAIN (27)...(319): tRNA synthetases class I (W and Y)
  misc_feature (1)..(420): Xaa is any amino acid
MHPAIENLKARGFFQQCTDAQRLSELMNESPVTFYIGCDPTGNSLHIGHMVPFFAYRHLREAGQKGIALIGGGTARIGDPSGKSEMRKMLSYEQLDSNAASIEAQLDRFIGFDGDTARTANNKDWLATLNYIDFLREIGSHFSVNRMLSFEAYKMRLETGLSFIEFNYQLLQSFDFLELYRRHGCRLQIGGDDQWGNIVAGVELVRRVEGAEVFGMTFPLITTADGKKMGKTEKGALFLDPALTGAYDFFQYWRNVQDADIRRFLLMFTFLPIGECEALTAPDKNPNEAKERLAWEVTALIHGKQEADKALAGAKAAFGAAEGGDKSAMPHASLSRAAFEKGYNVVDLFYDAGLFSTKSEARRLVEQGGAFVSNSDGELAAVSNITALIGADRLNAEGELVLRAGKKRYCLVKLGIRNEE

SEQ ID NO: 52977 - DNA, 918 bp, Unknown
  Obtained from environmental sample
  misc_feature (1)..(918): n is a, c, g, or t
atggggcatggcggacttgtcccccccctcggcggcgccaaaagccgctttcgcgccggccaacgctttgtcggcttcttgtttgccgtggatcagggcggtcacctcccaggcgaggcgctccttggcctcgttggggtttttgtcaggcgcggtcagcgcctcacattccccgattggcagaaaggtaaacataagcaaaaagcggcgtatgtcagcgtcttgcacattgcgccagtattggaaaaaatcgtaggcgccggtcagcgccggatcaaggaaaagcgcccctttctcggtcttgcccatttttttgccgtcggcagtggtgatcagagggaaggtcatgccgaaaacttccgctccttcaacgcggcggacaagctccacgcccgcgacgatattgccccactggtcatcgccgccaatttgcaggcggcagccgtggcggcggtacagttccaggaagtcaaaactttgcaggagctggtaattaaactcaatgaaagaaagtccagtctccagcctcatcttataggcctcaaaactcaacatgcggttcacggaaaaatggcttcctatctcccgcagaaagtcaatgtagttaagcgtggcaagccagtccttgttgtttgccgtacgggcggtatcgccgtcaaaaccgatgaagcggtcaagctgcgcctcaatagacgcggcattggaatcaagctgctcgtaactcagcatcttacgcatttccgactttccggaaggatcgcctatgcgcgcggtgccgcctccgataagggcaatacccttctgacccgcctcgcgcagatggcggtaggcgaaaaagggaaccatgtggccgatatgcaggctgttcccggtgggatcgcagccaatataaaacgttaccggactctcgttcattaa

SEQ ID NO: 52978 - protein, 305 aa, Unknown
  Obtained from environmental sample
  misc_feature (1)..(305): Xaa is any amino acid
MGHGGLVPPLGGAKSRFRAGQRFVGFLFAVDQGGHLPGEALLGLVGVFVRRGQRLTFPDWQKGKHKQKAAYVSVLHIAPVLEKIVGAGQRRIKEKRPFLGLAHFFAVGSGDQREGHAENFRSFNAADKLHARDDIAPLVIAANLQAAAVAAVQFQEVKTLQELVIKLNERKSSLQPHLIGLKTQHAVHGKMASYLPQKVNVVKRGKPVLVVCRTGGIAVKTDEAVKLRLNRRGIGIKLLVTQHLTHFRLSGRIAYARGAASDKGNTLLTRLAQMAVGEKGNHVADMQAVPGGIAANIKRYRTLVH

SEQ ID NO: 52979 - DNA, 501 bp, Unknown
  Obtained from environmental sample
  misc_feature (1)..(501): n is a, c, g, or t
atgagaaaacagcttgtacgttgtaccattaacggcaaagccacagaaaccatggtggacatccgcgcgtcgctgacggatatgctgcgtaatgagtaccgcctgaccagcgttaaaaaaggctgcgaggtaggcgaatgcggcgcctgcaacgtgatcatcaatggggaatgttttaattcatgcatttacctcgcaatctgggctgaaggcaaggagattaccaccaccgaagggcttttaagtgcggacggggaactctccgcgatacagcaggcgttcattgacgagggcgcggtgcagtgcgggttttgcacgccgggctttctgatgagcgccacggaaatcatacgctcggggaaaaactacagtgacgcggaactgcggaaactgctgtccggtcacttatgccgttgtactggttatgagaacatattccgcgcggtaagaaagcttgtcggggccagggccttagatccagaccactcgccggcgccatag

SEQ ID NO: 52980 - protein, 166 aa, Unknown
  Obtained from environmental sample
  DOMAIN (76)...(151): [2Fe-2S] binding domain
  misc_feature (1)..(166): Xaa is any amino acid
MRKQLVRCTINGKATETMVDIRASLTDMLRNEYRLTSVKKGCEVGECGACNVIINGECFNSCIYLAIWAEGKEITTTEGLLSADGELSAIQQAFIDEGAVQCGFCTPGFLMSATEIIRSGKNYSDAELRKLLSGHLCRCTGYENIFRAVRKLVGARALDPDHSPAP

SEQ ID NO: 52981 - DNA, 882 bp, Unknown
  Obtained from environmental sample
  misc_feature (1)..(882): n is a, c, g, or t
atgtatgatatagaagatattttagaggctgaaagtcctgcccatgcggttgaattgctgcagcggtaccccgaagcgaaaattattgcggggggcagcgatgtgttaatcgaaatccgcgagggcaggcttgctgggcgcacattgatgagtatccagaaacttgatgagcttcggggggtaaggctggctgccgacggctctatccgcattggcgcgctgacgagtttttcccatgttgcgggcgacccgatcattcagagaaacattcctgtgcttgcggaagcggtgctgactatcggcgggccgcagctgcgcaacatcggcactataggcgggaatgtctgcaacggggttacgtccgcagacagcgcctcaacattgacggcctatgaggttataatggaataccttggccccaagggcttaaggctggttcccatttccgaacattataagagcgccggtaaaacagccctggcccatgacgagattctgcaggctgttctttgttcaaaggaaagttatgagaattgttttgggcattatatcaaatacgccatgagggaagctctggacatagcgacccttggttgttcggcaaatgtccggctttcaaaagatcgtaaaaccattgacagacttcgtctggcatatggagtcgccgggcctgtccccatgcgtgttcccggcgcggaacaggcggcagccggaaaaccggcaaacgccgaaaccgccgccgccgttgccaaactggtgttaaacgacattaacccacgctcaagctggcgggccagcagggaatttaggttgcatctggcggaagagctcgccaaacgggctattaccgaatcgctgaaacgcgcgggggtatcgttatga

SEQ ID NO: 52982 - protein, 293 aa, Unknown
  Obtained from environmental sample
  DOMAIN (182)...(290): CO dehydrogenase flavoprotein C-terminal domain
  misc_feature (1)..(293): Xaa is any amino acid
MYDIEDILEAESPAHAVELLQRYPEAKIIAGGSDVLIEIREGRLAGRTLMSIQKLDELRGVRLAADGSIRIGALTSFSHVAGDPIIQRNIPVLAEAVLTIGGPQLRNIGTIGGNVCNGVTSADSASTLTAYEVIMEYLGPKGLRLVPISEHYKSAGKTALAHDEILQAVLCSKESYENCFGHYIKYAMREALDIATLGCSANVRLSKDRKTIDRLRLAYGVAGPVPMRVPGAEQAAAGKPANAETAAAVAKLVLNDINPRSSWRASREFRLHLAEELAKRAITESLKRAGVSL

SEQ ID NO: 52983 - DNA, 1812 bp, Unknown
  Obtained from environmental sample
  misc_feature (1)..(1812): n is a, c, g, or t
atgataaacgccatgcgttatgcggattcgttctcatcaatcagaaaacactattttgcgtttcgctcgtctttttttgacatggaaaaatgtttagacgaaaccgaccttgtcctttcccgctgtattaccgaattgggctatctggtcgagatagagaattcataccctgatatgcacgtccccgatccctacgcattttttacaggttaccttgaagacataagctaccttgcccagcagacaagttccggtgtcgcgattctcccgtacaggacggccgcccctgcccctttcgactgtcatatagtcctcggggcaaaccaggactctctctcggctgtgttttcttttctgcccttcctgcccgcaagcaaacgggaagagctcggcataagcgacaatgacgcgtcacaggcttttatcacattgcaccgatttaactcgcgtctgcctgccgcctttttctgctctgagcagacattcactaattatgccatcccgcacagtgcgttaaaaacggaattaaaacccaggtcccgctactgcgatgaccctgaacttggcgttaaattcgccgctgacctttaccgtgaagaaaacgaactttacacatccctttattttcccgcccggaggcaggtagggttggggctgtcagttgggctttctaaaatacattcgaaccagaaacagggttttggtgaatggctgctaagaagaaagcgtcctaatactgccggtgacaacggaaccagccatccgtttgttgaacatattcgcaatcgattcttatataaaggggatgataaagaattggaagataaatacagcgtctcatcctcatcgcttgcgttgtatttcaaatgcccgcttcaatttatcttttcacgggtattagatatcaaaaatattgaaatagaaacaagccttatggccaatgaaacaagcggaatagtttatcacaggataataagtttgtttttacaggaattgaaggaaaaaggagaaacgattgccccgccttttctgaaaggcgcaccttcggcacaatatatgctgccaaaatcatacagagataaattatcggaaaaaacagatattgtttttaattctttcccatatttgtccgatgatgaagacgataaaccggcaatgagtatgctgaccgcccgtctgctgctggcggaaaaagaactgttttttgctcagcttgaaaattttcttattaaatttatttcattctttgccggattttcggttgccgccagcgaaggtaaatatacacttaacaaaaaattttattatcttaacggatatattgactgcgttcttgagaagcaggattctgagaaccaaggttctttggtcatcgtggatttcaaaaccaaatatatgcccgatctttctgattgcatcggctttgaggggcttgcggattttcagcttcccatgtatatccgccttgcggaaaacgaattcggaaaaccagccgccgccgcgctgttcttcagcatagtggacgccaggccggaagtattatttggtgtaatacaggacgtaatacatggcgggatcattccgaaaaaagaacaggatcgcataatgcatggcgacgatgaatacgaacgcatcatgggtgaatttgacaggaaggcggaacaattcgcggcggaaattataaacggcacttttgctttctctccatctcattgggagctgtgccatgaatgcggctataacaggatttgccgcacgctctacaaaatatttcaaggagaaaagcaatggaaccaaacaaagaaaaaataa

SEQ ID NO: 52984 - protein, 603 aa, Unknown
  Obtained from environmental sample
  misc_feature (1)..(603): Xaa is any amino acid
MINAMRYADSFSSIRKHYFAFRSSFFDMEKCLDETDLVLSRCITELGYLVEIENSYPDMHVPDPYAFFTGYLEDISYLAQQTSSGVAILPYRTAAPAPFDCHIVLGANQDSLSAVFSFLPFLPASKREELGISDNDASQAFITLHRFNSRLPAAFFCSEQTFTNYAIPHSALKTELKPRSRYCDDPELGVKFAADLYREENELYTSLYFPARRQVGLGLSVGLSKIHSNQKQGFGEWLLRRKRPNTAGDNGTSHPFVEHIRNRFLYKGDDKELEDKYSVSSSSLALYFKCPLQFIFSRVLDIKNIEIETSLMANETSGIVYHRIISLFLQELKEKGETIAPPFLKGAPSAQYMLPKSYRDKLSEKTDIVFNSFPYLSDDEDDKPAMSMLTARLLLAEKELFFAQLENFLIKFISFFAGFSVAASEGKYTLNKKFYYLNGYIDCVLEKQDSENQGSLVIVDFKTKYMPDLSDCIGFEGLADFQLPMYIRLAENEFGKPAAAALFFSIVDARPEVLFGVIQDVIHGGIIPKKEQDRIMHGDDEYERIMGEFDRKAEQFAAEIINGTFAFSPSHWELCHECGYNRICRTLYKIFQGEKQWNQTKKK

SEQ ID NO: 52985 - DNA, 735 bp, Unknown
  Obtained from environmental sample
  misc_feature (1)..(735): n is a, c, g, or t
ttgcaccagccttaccagtgtaaccatacccaacagcgttaccagtattggggagagcgctttaacggttgcaccagccttaccagaataacaataccaaacagcattaccagcattggaagagaagctttttatcgcaccagccttaccagcataacaatacccaacagcgttaccagtattggggattgggcttttgtctattgtaccagccttacaagtgtaacatttcaaggaacaattactcaggataaattttccggttatgcattcgacggcgacttacgagacaagttttactcagtagccccaaacggaacaccgggaacgtatagaatttcaaatccgggagatgtggtgtggtggaatataaacggcaaaatagaaacgaacatatatgaacccgtcatcaacgaagacagcgaactgattcttgagatgtggtacaaggacgacctaccgcttctatatgatcggctgaacactttgaagctccaagggcttgaccccggagacgcggtacgctttcttatgattgcgcattatgcgggcgcgcagacgccaaacggcggcaaccacttcatcggacccgaaccgtttgccaaaatgggcgtgaacatggatgggatacttgctctacgctacgctgtcaatggttctggcgcgtttgcttcgtccgaaacaatccatgcgttcatattaatggatccggcgtttccaggttcttaccgttag

SEQ ID NO: 52986 - protein, 244 aa, Unknown
  Obtained from environmental sample
  misc_feature (1)..(244): Xaa is any amino acid
MHQPYQCNHTQQRYQYWGERFNGCTSLTRITIPNSITSIGREAFYRTSLTSITIPNSVTSIGDWAFVYCTSLTSVTFQGTITQDKFSGYAFDGDLRDKFYSVAPNGTPGTYRISNPGDVVWWNINGKIETNIYEPVINEDSELILEMWYKDDLPLLYDRLNTLKLQGLDPGDAVRFLMIAHYAGAQTPNGGNHFIGPEPFAKMGVNMDGILALRYAVNGSGAFASSETIHAFILMDPAFPGSYR

SEQ ID NO: 52987 - DNA, 477 bp, Unknown
  Obtained from environmental sample
  misc_feature (1)..(477): n is a, c, g, or t
atgaaaatgaatagaaagctttttatagcacttgcaacattgcttttattcggaatgttggcaggctgtagaaaaaaggaagatccggcaatcgctgaattaaaagcacaaatgcaagcagcggaacagaagcaggaagtcgcaacgacagcgacaacgcaaaccgaagcagaaccagatacttctactgaaacaccaacaaccaccgaagacagatttgagatgatgggaacagtgttgactggttacagtgggacaaatgaaaacataaccataccggacagcgttaccagcattggggagagcgcttttttaggttgcaccagccttactagcgtaacaatacccaacagcgttaccagcattggggattttgctttttacggttgcaccagccttaccagtgtaaccatacccaacagcgttaccagtattggggagagcgctttaacggttgcaccagccttaccagaataa

SEQ ID NO: 52988 - protein, 158 aa, Unknown
  Obtained from environmental sample
  SIGNAL (1)...(25)
  misc_feature (1)..(158): Xaa is any amino acid
MKMNRKLFIALATLLLFGMLAGCRKKEDPAIAELKAQMQAAEQKQEVATTATTQTEAEPDTSTETPTTTEDRFEMMGTVLTGYSGTNENITIPDSVTSIGESAFLGCTSLTSVTIPNSVTSIGDFAFYGCTSLTSVTIPNSVTSIGESALTVAPALPE

SEQ ID NO: 52989 - DNA, 1200 bp, Unknown
  Obtained from environmental sample
  misc_feature (1)..(1200): n is a, c, g, or t
gtgcagggcctgttcgcgcagatagtgctgcaatgcgcgaaattaaagctgataaccggggaaatgttcgcgatagacgggtgcaaactgccgtcgaacgcgtcaaaagaatggtccgggacgatagaggacctgaaaaagaaacgggacaaaatggaaaaatatatagaaagaataataaagcagcaccgggagctggacaaagacgaaaaggcgaaaaagatccaaaagccttacgcgaaaacgatgggaaaagacaaagacaggagggaacggagcatagcgcggcttgagaaaaagcttaaaaagctgaacaaatttttaaaggaggcggaaccgaggaagggtgtggccgcggaagaggtgcagtcgaacgtgacggacaacgagagcgcgctgattaaagggccgcatggatacattcaggggtataacggcatagcgatagcggattccggcagccagataatagtttgcgcggaggttgtgggatcgggccctgaaagcggcagcctcccgaagatgatggacagccttgaagaaaacatgagaacggtaacagggaaagaggacccgctgaagaaatcgttattagtcggggacaccggatatttctcggaagccaatctgcaggaagctgcggaaaagggaataaacgtattgatacctgatcagcagttcaggcagagggatccgtattatgccgaaaagaaggaagagaaagttgaaaagaaaaaatacaaggcggaagattttacatatgatgaaaagaacgacaggtatatatgcccgcgcgggaaagcgctggaatacaaatgcgatataactttgaggaacaacagcggtaagaaatacggcgcgaaaagggccgactgcgcaaaatgcccgttaatagaaaaatgtatagcaggacgtggcggcaagaatcccgccagagtgctttatatagtaaataaaaaatatgaagacaacttatctgaaaagatgagaaagaagatagacaaccccgcgtaccgtgaactgtattcaaggcggatgcagataatagagccgacattctcagatatcacatactgcaaggggatgaacaggtttacgttacggacggaaaggaaagtgggtatacaatggaaattatattgtacggtacacaatatagggaaatgtataaggccattggggatgaaatacggggcatag

SEQ ID NO: 52990 - protein, 399 aa, Unknown
  Obtained from environmental sample
  DOMAIN (126)...(386): Transposase DDE domain
  misc_feature (1)..(399): Xaa is any amino acid
MQGLFAQIVLQCAKLKLITGEMFAIDGCKLPSNASKEWSGTIEDLKKKRDKMEKYIERIIKQHRELDKDEKAKKIQKPYAKTMGKDKDRRERSIARLEKKLKKLNKFLKEAEPRKGVAAEEVQSNVTDNESALIKGPHGYIQGYNGIAIADSGSQIIVCAEVVGSGPESGSLPKMMDSLEENMRTVTGKEDPLKKSLLVGDTGYFSEANLQEAAEKGINVLIPDQQFRQRDPYYAEKKEEKVEKKKYKAEDFTYDEKNDRYICPRGKALEYKCDITLRNNSGKKYGAKRADCAKCPLIEKCIAGRGGKNPARVLYIVNKKYEDNLSEKMRKKIDNPAYRELYSRRMQIIEPTFSDITYCKGMNRFTLRTERKVGIQWKLYCTVHNIGKCIRPLGMKYGA

SEQ ID NO: 52991 - DNA, 759 bp, Unknown
  Obtained from environmental sample
  misc_feature (1)..(759): n is a, c, g, or t
atgcaaaatataggcgatatagcgtatttagaaaaaacgcttgaaagcgttaatgaaaatcttcatcaaaaaacagataacgaagaatccgctccattggattttaatcattccatccgtcttgaaaatattaattttaaatactttaccggaaacgaagttattaacgaaatttcatttactgtaaaaaaaggagaaaaaatcgcaataacaggcgaaagcggaggcggtaaatccacgttaattgacattatcaccggtattcacaaacctgtttcgggaaaaatatatattgacgatacggttttatccgataaaaatatccgttcatggcggaaaaaaatcggctatataccccaaagcatctatctttttgacggaactgtcgctgaaaatgtttcatttggatcaacacccgataatgataaaattaaaaaagctcttcaaagggcgaatatttgggatttcctttccgaaaaagaggggttaaaaacccgcgtaggcgacggcggcattcagctttccggcggacagcaacagcgaatcggcattgcccgcgctttgtacgacgacccggaagtgcttgtccttgacgaagctacttcctcgcttgataacgaaacagaaaagaaaatcatggatgaaatttacagtgtaagcgaaaacaaaacattaatcgtaatcgcccacaggcttagcacggtagaacgctgtgacagaagaatcaggattgaaaacggaagaataattaatgactaa

SEQ ID NO: 52992 - protein, 252 aa, Unknown
  Obtained from environmental sample
  DOMAIN (37)...(251): RecF/RecN/SMC N terminal domain
  misc_feature (1)..(252): Xaa is any amino acid
MQNIGDIAYLEKTLESVNENLHQKTDNEESAPLDFNHSIRLENINFKYFTGNEVINEISFTVKKGEKIAITGESGGGKSTLIDIITGIHKPVSGKIYIDDTVLSDKNIRSWRKKIGYIPQSIYLFDGTVAENVSFGSTPDNDKIKKALQRANIWDFLSEKEGLKTRVGDGGIQLSGGQQQRIGIARALYDDPEVLVLDEATSSLDNETEKKIMDEIYSVSENKTLIVIAHRLSTVERCDRRIRIENGRIIND

SEQ ID NO: 52993 - DNA, 927 bp, Unknown
  Obtained from environmental sample
  misc_feature (1)..(927): n is a, c, g, or t
ttgcagggattaacagagcgccctactctgaattaccgtaccctgtctgactcaaagtggaatattgatgaaacagcggaacacctctggcaaaagcaaaatcttggcatatttcaccctttgttcggtgatttccgcttgagggtttacgggccggaactgtttatgtcaggtaacaccgccgctccttatggccaaaacgacggcgtactgtggcagggacgcggttttaatgcattgttcaaaggcggcgtccggtttgaaggatacggtgttgaattgacgctgttgccacatgccgcgttttcgcagaatgtggaatttgattatatacagccaaacgatcggtatataaaccccgtcaaatacaaagaaacggcagataaatatacagataaagcagaaaaatatggttattacggggtatacggtattgatgcgcctcagcgttttggcggcgaatcatttttcgattgggatttcggtgattcagaatttcgctacacatggaagactctaacggcaggttttgggacacagtcgatttggctcggtcctgctcagcttaatccgattatccattcaaataacgcagcttcttatccaaaacttgatataggattacgccggcagtccatgactattccctggttaaattggtacatcggcgatatagaattccgcgcttggtggggttatctctctgaatcagactggtttgataattacacttccaatgatcataacttgataaccggattctcgtttgcatatagttttccttcttttttgaaaggtcttaccattggcattaacagggttatgctttctaaatgggataccatgaatgttggcgcggtgttcttgttattaataccgtacatgggttatgaatttgcgatgagaaaacgatcacgggcttcctaa

SEQ ID NO: 52994 - protein, 308 aa, Unknown
  Obtained from environmental sample
  misc_feature (1)..(308): Xaa is any amino acid
MQGLTERPTLNYRTLSDSKWNIDETAEHLWQKQNLGIFHPLFGDFRLRVYGPELFMSGNTAAPYGQNDGVLWQGRGFNALFKGGVRFEGYGVELTLLPHAAFSQNVEFDYIQPNDRYINPVKYKETADKYTDKAEKYGYYGVYGIDAPQRFGGESFFDWDFGDSEFRYTWKTLTAGFGTQSIWLGPAQLNPIIHSNNAASYPKLDIGLRRQSMTIPWLNWYIGDIEFRAWWGYLSESDWFDNYTSNDHNLITGFSFAYSFPSFLKGLTIGINRVMLSKWDTMNVGAVFLLLIPYMGYEFAMRKRSRAS

SEQ ID NO: 52995 - DNA, 1011 bp, Unknown
  Obtained from environmental sample
  misc_feature (1)..(1011): n is a, c, g, or t
gtggtcaagttcagtctgcggggacgcatcctgaaagccatacgcgaagtgtcgctggatctgtacaagggtgaaagcctcgcgatcgtgggcgagtctggctcaggaaagtctgtctttgttaaaaccttcaacggtatgctggacgcgaacggatttgtcgatagcggctcaattgtctataacggcatggatttggcaaagttcaaaaaagaaaaggactggctaaaaattcgcggcagtgaaatcgccatggtttttcaggatccaatgacggccttaaaccctcttaaaacgatcagggagcagattgtagaagcgatcacccttcacaacaaggagataagcttagaccaggccagggcgcgcgcgattgagtacatccgcgatgtcggcatagaaaatcccgaaaaacggggcggccagttcccgcacgagttttccggtggaatgcgccagcgcatcgttattgccatagcaatggcgtgtaaccccaaaatactgatttgcgacgaaccgaccaccgctctggatgttacaattcaggcgcagatactgagccttttgaaagacctaaaagaaaaatacaacctgaccattatctacataacccacgacctgggcgttgtggctgcggtggcggacagggtcgccgtaatgtacgccggcgacatagtggagataggcggcgtatgcgaggtgttctacaacccgcagcacccgtatacctgggcgcttctttcctcgcttccgcagttgggcgtaaagggagagaaactgtttacgataaagggcacacccccaaacctttttttcgagatttcaggcgatgctttcgccccgcgcaatcagaacgctctgcgcatagatttcctggaacgcccgccttatttcgcggtagaaggctcaacaacccataaagccaggacatggcttttggacccgcgctcgcccaggattgagccgcctcctgtcattaagtccataggagctcaccgccatgccgtctaa

SEQ ID NO: 52996 - protein, 336 aa, Unknown
  Obtained from environmental sample
  DOMAIN (226)...(290): Oligopeptide/dipeptide transporter, C-terminal region
  misc_feature (1)..(336): Xaa is any amino acid
MVKFSLRGRILKAIREVSLDLYKGESLAIVGESGSGKSVFVKTFNGMLDANGFVDSGSIVYNGMDLAKFKKEKDWLKIRGSEIAMVFQDPMTALNPLKTIREQIVEAITLHNKEISLDQARARAIEYIRDVGIENPEKRGGQFPHEFSGGMRQRIVIAIAMACNPKILICDEPTTALDVTIQAQILSLLKDLKEKYNLTIIYITHDLGVVAAVADRVAVMYAGDIVEIGGVCEVFYNPQHPYTWALLSSLPQLGVKGEKLFTIKGTPPNLFFEISGDAFAPRNQNALRIDFLERPPYFAVEGSTTHKARTWLLDPRSPRIEPPPVIKSIGAHRHAV

SEQ ID NO: 52997 - DNA, 1089 bp, Unknown
  Obtained from environmental sample
  misc_feature (1)..(1089): n is a, c, g, or t
atgaaagaggaaaacaaagcggctgcaaggtatgtgggaatagaccttgggaagcggacctacgaggtagcgattgtaggggcgaacgggaaagtcacgatgagcaacgggaggacgaatgtggaaggacggcagaagctttaccggaaactgacagcgcaggacaaagtagccctggaagcagggaacctgtcgttcatcatggccaaggagctggaggcggcggtgggctgccagatacgggtattaaacccgtcgcatttggcattgatctacgggtcgatgaaaaagacggacaaggaagacgcgcttaagctggcgcacattatcgaggactacaaggacgagcggcttcctgtggtgccgataccgagcgacggggagacgaggcggcggaagatggtgggcagctaccggagggagcagaggattaggtgccaggcgataaaccggctgcacgggctgtttttggcgcagggcataacggacgtggtgaaaagcgacctggcgacggcggacgcgcgtgcggagacggtaaaagccctggccgggcttgagcgggaagaagcggatcatttgttggcctgtcttaaactgtacgaggggcggatagcggcggtagaaaggctgatggagaaggaagcggaaggggacgaggagatagagcggcttaagagcgtgccgggggtggggccgatgatatcgtntgcgttttctgcgcatgtggcggcggagcgttttgagaacgggtcgcaggtaagcaactatctgggattggcgccacgggtgtatatgtccggggatacggtgaggtacggccgcataacgaaacgcgggaacgggtttctgcggggcctgttggtgcaaggcgcatgggcgcttatacggtcgaaggctggagggagcctgaaggaacggtacgaatacatgactgttgagaaagggataagcaagaagaaatcgatagtggcgatagcgcggcggctggcggaattgctgtatgcccttatgagggatgggacgagctacgaagttcgaagattcaaagttggaaatggggaaggggaaaaactggccaagatagcgtaa

SEQ ID NO: 52998 - protein, 362 aa, Unknown
  Obtained from environmental sample
  DOMAIN (197)...(307): Transposase IS116/IS110/IS902 family
  misc_feature (1)..(362): Xaa is any amino acid
MKEENKAAARYVGIDLGKRTYEVAIVGANGKVTMSNGRTNVEGRQKLYRKLTAQDKVALEAGNLSFIMAKELEAAVGCQIRVLNPSHLALIYGSMKKTDKEDALKLAHIIEDYKDERLPVVPIPSDGETRRRKMVGSYRREQRIRCQAINRLHGLFLAQGITDVVKSDLATADARAETVKALAGLEREEADHLLACLKLYEGRIAAVERLMEKEAEGDEEIERLKSVPGVGPMISXAFSAHVAAERFENGSQVSNYLGLAPRVYMSGDTVRYGRITKRGNGFLRGLLVQGAWALIRSKAGGSLKERYEYMTVEKGISKKKSIVAIARRLAELLYALMRDGTSYEVRRFKVGNGEGEKLAKIA

SEQ ID NO: 52999 - DNA, 594 bp, Unknown
  Obtained from environmental sample
  misc_feature (1)..(594): n is a, c, g, or t
atgggggaactctgtacccctacaggcgcggcagtcttgaagcattttgtgaaagaattccgtaaaatgcctgtaatggcagtcacaaagctcggttacggcatgggcaagaaggattttgaaaaggcaaattgtgtcagggcctatattagtaataccgatggcggtaatgaggaagttgtagagcttgtgtgcaatcttgatgacatgacccccgaagccgtggccttcgcccaggggtttttatttgatgaaggcgcccttgacgtgtacaccgtaccaatagggatgaagaaaagccgtgcggggttgagttttacctgtatgtgccgcagcagtgacaaagacaaaatgctgtccctgatttttaagtacacaagcacccttggaatccgggaatatgtaagccgccgctacacactaaagaaagaacaagccgaagttcaaacgaaatacggtacggttaaagtaaaaacatcccagggatacggggtaaaaaaatccaagcccgagtatgatgatgtcgcgaagattgcgcgggagaagaatatatcaatacaggaagtattagcagcaattcaggagggacagtga

SEQ ID NO: 53000 - protein, 197 aa, Unknown
  Obtained from environmental sample
  DOMAIN (1)...(196): Protein of unknown function DUF111
  misc_feature (1)..(197): Xaa is any amino acid
MGELCTPTGAAVLKHFVKEFRKMPVMAVTKLGYGMGKKDFEKANCVRAYISNTDGGNEEVVELVCNLDDMTPEAVAFAQGFLFDEGALDVYTVPIGMKKSRAGLSFTCMCRSSDKDKMLSLIFKYTSTLGIREYVSRRYTLKKEQAEVQTKYGTVKVKTSQGYGVKKSKPEYDDVAKIAREKNISIQEVLAAIQEGQ

SEQ ID NO: 53001 - DNA, 1665 bp, Unknown
  Obtained from environmental sample
  misc_feature (1)..(1665): n is a, c, g, or t
gtgaaagacggggtttacaactaccggatctccgccaccgacaaggcccaaaacagcggagaggcttcccttgaaaacatcattatcagcacgatccggccggcagtatcccttacaattacagatgcgtatttttcccccaacggagacggagtaaaggacgtccaaatctttataccggcggttccggtcagggaagggataacaaattgggaattgcaggtgaaggattcggctggcgttgtacagcggcgcttgaccggaacttccgccgttcctgcaaggctggaatttgacggcagggataaccggggcaaagttcttcccgaggcggtctattccgcaagcctttcggtgcgctaccgcaacggttatctttccacggccaattccccgggcttcaccctggacgtaacgcccccctgggctgccgtacaaattgaagacaaggaccaggggcccggaataccggcggtattttctcccaacaacacaggccacaaggatgagcttatcctgattcaggaaggttccgttgaattggtctggacaggcgaagtacgacgttccggagatcgttcaggagcgcttgtcaggactttcagattttcgggaactccgccaagaaggcatacctggaacggaataaccaatgccggcgctctggccccggacggtttctacacttacgagctttactgtacggatcccgctggcaataccgggcgttcaaatgccgtggagtttgagctgaacactagggatactcccatatttgtctcatcggaccttagggcattttcacctaacggagacgggataaaggacacgattaacctgatacccagcattcaggaaaaagacggtattctgtcatggaagatcgaaatcctcaacctgggggctgccggcgtagcgggcgccgcatctggcggcgcctccggcgtacgcagttttgagggcagggatcaagcccccacttcgacggtatggaacggcagaaccaacgcgggaaccatcgcgcctgacggaagctacgtcgcaaggctggatctggaataccgttccggcaaccggcccagttctctttcaatggcctttaatcttagaactgtgcctccgcaaggtgatatgtcagtgccgtattatatctttgcgcctaacggaaacggaaaccgcgataccctgcccatccgcgtcacaacggagggcaacgacgagtggaatcttgtgatctcctccggcgataacactgctgtcagatcgtggaactggacgggaagggctccggcggtatcgattatctgggacggaaaagacgaagccggaaatgtcgtaaacgacggaacatataacataaccctcagcgctaccgatgacgccggaaacagcacacgcaaaaacataaacaacataattgttgatgccaatgtgccaaagatcttccttacggcatccgcccaggcaatcgctccaaagccgggccaaaccgaagccatgcgctttaacatcatggcaactccgtctgaaggcgtcacttcatggaagctggaattaagggacgataacaacgggcttattaagtctttcccgtcccaggccggcggaaccgggccgctccccacagtcctgccatggaacggcgcgaataaagaaacgaaataa

SEQ ID NO: 53002 - protein, 554 aa, Unknown
  Obtained from environmental sample
  misc_feature (1)..(554): Xaa is any amino acid
MKDGVYNYRISATDKAQNSGEASLENIIISTIRPAVSLTITDAYFSPNGDGVKDVQIFIPAVPVREGITNWELQVKDSAGVVQRRLTGTSAVPARLEFDGRDNRGKVLPEAVYSASLSVRYRNGYLSTANSPGFTLDVTPPWAAVQIEDKDQGPGIPAVFSPNNTGHKDELILIQEGSVELVWTGEVRRSGDRSGALVRTFRFSGTPPRRHTWNGITNAGALAPDGFYTYELYCTDPAGNTGRSNAVEFELNTRDTPIFVSSDLRAFSPNGDGIKDTINLIPSIQEKDGILSWKIEILNLGAAGVAGAASGGASGVRSFEGRDQAPTSTVWNGRTNAGTIAPDGSYVARLDLEYRSGNRPSSLSMAFNLRTVPPQGDMSVPYYIFAPNGNGNRDTLPIRVTTEGNDEWNLVISSGDNTAVRSWNWTGRAPAVSIIWDGKDEAGNVVNDGTYNITLSATDDAGNSTRKNINNIIVDANVPKIFLTASAQAIAPKPGQTEAMRFNIMATPSEGVTSWKLELRDDNNGLIKSFPSQAGGTGPLPTVLPWNGANKETK

SEQ ID NO: 53003 - DNA, 513 bp, Unknown
  Obtained from environmental sample
  misc_feature (1)..(513): n is a, c, g, or t
gtgggccttatcacaagagtcgatctattgaaggccggcccgtcgcccgcgaccacccttgacgtgtacgagattagctatctgctttcaaaactcacggtggacaaggtgatggaaaaaaaagtgataaccgttcaggaaaacgaagttgtggaagaggcggccaggatcatggcggacaacgggattggctgtctgcctgtattgaacggctctcttttaaccggtattattacagatactgacattttccatttttttattaacgcttacggagcgcgccacaagggtattcgtataacgattaacttcaaggaaagacccggccagcttgcggacttcgccgcagcgttagctgaaaagggaggcaatatcgtcgcctttgtcacctccgagggtgatgatatcgcccaccggcgggcgacaagcaaaattaccggcatcagccgcgccgccgtagaggaagccgtcggctctttggaaggcgtggaaattgaggatatacgggaataa

SEQ ID NO: 53004 - protein, 170 aa, Unknown
  Obtained from environmental sample
  DOMAIN (36)...(169): CBS domain pair
  misc_feature (1)..(170): Xaa is any amino acid
MGLITRVDLLKAGPSPATTLDVYEISYLLSKLTVDKVMEKKVITVQENEVVEEAARIMADNGIGCLPVLNGSLLTGIITDTDIFHFFINAYGARHKGIRITINFKERPGQLADFAAALAEKGGNIVAFVTSEGDDIAHRRATSKITGISRAAVEEAVGSLEGVEIEDIRE

SEQ ID NO: 53005 - DNA, 1122 bp, Unknown
  Obtained from environmental sample
  misc_feature (1)..(1122): n is a, c, g, or t
atgacgcgaaaggtttacgttgattacaatgccacaaccccgctcagaccggaagtaaaagccgcaattacggaagatctggatatcttcgggaacgcttcaagcatgcactcatccggtcggctcgcccattcgcgggtggaagaagccagaagctgtgtggaaaaacttattggtgcgggacagcatacggtcttttttacatccggaggctctgaatcaaataacgccgtgtttcagacgatgaagcagcttgcttcagcgcctaacagcagcccgctgaaagagggccgctgcgaattcatcaccagttccatagagcatccctgcgtgctgaactccgcgaaacacctgcaaagcctcggttttaaggttaattttatacaggttgacgaatacggcaaaattgacatgaacgctttcaaaaaagcgttaagcgataaaacccttcttgtgtctataatgatggctaacaacgaaatagggactatacaggacatcaaggaaatagcctcgcttacgaaggactcaggcgcattaatgcacaccgatgctgtacaggcgcttggcaagatgaccgtcaatgttgacgatcttaaagtagattaccttaccgtgtcggcgcataaaatctacgggccaaaagggattggcgctctgtatgtacggaaagactcgccgttgtttcccctgatccacggcggacatcaggaagaaggcctgagagccggaacctataacaacatcggtattcttgggtttggcaaggcggcaaaaatcgccctggacgaacttggtaaatatgggaaggaaatcacgcctctgcgaaaccgccttcgcgatggtcttgtaaaagcgattcccaatataaaaataaacggtcatcctgtggatgtactgccaaatacattaaacgtttcattccccggcgcggaaggagaggcaatcctcctctccatggatctaatcggaatagaggcgtctacgggatcagcctgcgcttcgggcagtcttgaaccgtcccacgttctgatggcgaccggcgtaggaccggaactggcccacggctcgatccgcttcagcctgggctgggggatcacaccgatgatattgattatataa

SEQ ID NO: 53006 - protein, 373 aa, Unknown
  Obtained from environmental sample
  DOMAIN (14)...(311): Pyridoxal-dependent decarboxylase conserved domain
  misc_feature (1)..(373): Xaa is any amino acid
MTRKVYVDYNATTPLRPEVKAAITEDLDIFGNASSMHSSGRLAHSRVEEARSCVEKLIGAGQHTVFFTSGGSESNNAVFQTMKQLASAPNSSPLKEGRCEFITSSIEHPCVLNSAKHLQSLGFKVNFIQVDEYGKIDMNAFKKALSDKTLLVSIMMANNEIGTIQDIKEIASLTKDSGALMHTDAVQALGKMTVNVDDLKVDYLTVSAHKIYGPKGIGALYVRKDSPLFPLIHGGHQEEGLRAGTYNNIGILGFGKAAKIALDELGKYGKEITPLRNRLRDGLVKAIPNIKINGHPVDVLPNTLNVSFPGAEGEAILLSMDLIGIEASTGSACASGSLEPSHVLMATGVGPELAHGSIRFSLGWGITPMILII

SEQ ID NO: 53007 - DNA, 597 bp, Unknown
  Obtained from environmental sample
  misc_feature (1)..(597): n is a, c, g, or t
atgcctgattggctttattcagatacagtaaaagaacattttacccatccaagaaacgttttgttggaagacgaagcttctttttcagcggacgggcgggggcagaccggaaacataaaatgtggcgatcagatgttgatgcttttgaaaataaaggacgatgtcatttctgatgtgcgctggaaaacctacggatgcgccagcgccatcgcttctaccagcatgctttcggaaattatcaaagggatgaacattaaggacgcttattgtatccggccagaggatcttgttgaaaaactgggcggccttcccgattacaaaatccattgttctgttcttggagacaaggccctaagggccgcgattgatgattacctgacaaaacagggcagggcaggggaactaaaggaaacgtcaacggaaatttgccactgtcttggcattagcgacaaggacatagaaaacgctttcaagaacggtgccaatacctgggaaaagctgcaacaggctaccaaaatcggcacggtctgcgggcaatgcaaagaaaaggccatggaacatctccacggccttacccatatttacggaatggcttaa

SEQ ID NO: 53008 - protein, 198 aa, Unknown
  Obtained from environmental sample
  DOMAIN (140)...(192): BFD-like [2Fe-2S] binding domain
  misc_feature (1)..(198): Xaa is any amino acid
MPDWLYSDTVKEHFTHPRNVLLEDEASFSADGRGQTGNIKCGDQMLMLLKIKDDVISDVRWKTYGCASAIASTSMLSEIIKGMNIKDAYCIRPEDLVEKLGGLPDYKIHCSVLGDKALRAAIDDYLTKQGRAGELKETSTEICHCLGISDKDIENAFKNGANTWEKLQQATKIGTVCGQCKEKAMEHLHGLTHIYGMA

SEQ ID NO: 53009 - DNA, 888 bp, Unknown
  Obtained from environmental sample
  misc_feature (1)..(888): n is a, c, g, or t
ttggcttgtggctatgattggccttgggctttggggtttcagagcggcgttgaagcgtcttgtgatacaggggggctgatgaaacgcaataacctcatctacttcagatatttgtccatgagcctgaaggccgtcctcgaataccggctttccgcatggtttgtagccatagcccagactctcaccatgctctttgctttcatcagcctcgacctgatgttccgccgtttcgggagccttgcgggatggagtttcgaggaagccgccctctgcttcggcgtaacctacatggcgttctcgctttcggaatgtgtcgcccgtggttttgattccttttcgcggatggtcattcagggcgaatttgatcgggtactgctgcggcccaggagtaccataattcaggtactgggaacgaaaaccgacatcacccgcctcagcagagttgttttgggcattatcatactctgcgcgattgtcccaaaaacggaaataatctgggatttcccaaaggcaataaccctggcgctgatgatcctgggaggcaccgctgtttttaccggtattttcattctgggggccacggtgtgtttttttacgcttgaaggacttgaggtgatcaacatctttactgacggcggaagggaactcgccagctacccactgccgatttacggcaagtggatcgcccgcttcttcacgtttatcattccctttggctgcatgaactaccttccgcttctttacctcacagaccgcacagcgacccagggcatctttttacctgcctgggtttatatgctcatacccctactgggcttcgtgttcatcctgccctgcgttctcgtctggcgctttggggtaaggcactacagctctgcgggctcctga

SEQ ID NO: 53010 - protein, 295 aa, Unknown
  Obtained from environmental sample
  DOMAIN (57)...(295): Protein of unknown function (DUF990)
  misc_feature (1)..(295): Xaa is any amino acid
MACGYDWPWALGFQSGVEASCDTGGLMKRNNLIYFRYLSMSLKAVLEYRLSAWFVAIAQTLTMLFAFISLDLMFRRFGSLAGWSFEEAALCFGVTYMAFSLSECVARGFDSFSRMVIQGEFDRVLLRPRSTIIQVLGTKTDITRLSRVVLGIIILCAIVPKTEIIWDFPKAITLALMILGGTAVFTGIFILGATVCFFTLEGLEVINIFTDGGRELASYPLPIYGKWIARFFTFIIPFGCMNYLPLLYLTDRTATQGIFLPAWVYMLIPLLGFVFILPCVLVWRFGVRHYSSAGS

SEQ ID NO: 53011 - DNA, 456 bp, Unknown
  Obtained from environmental sample
  misc_feature (1)..(456): n is a, c, g, or t
gtgctgcgctgtttccaattttcatcatcgcgtttcttttgcccgggttcctggggcttccatcttccccgcaaccttcaggccctcgccctgtttattccttccataatccttgccgcctttctcgctgctgccctctccatgatcatctgcctgcttacctttgtttccctgaatccttacggggcaaggctctttgtcggtgtcgccggggaattcctcatgggcgctgccatccccattccttttatgcctcctctgttacagcggataactgccctcctgcctttccgttacactgcggatttccccttccgcatttactccggccatattgccgggactgaggccctgcttggtttggccgcgcagatcttttggcttgtggctatgattggccttgggctttggggtttcagagcggcgttgaagcgtcttgtgatacaggggggctga

SEQ ID NO: 53012 - protein, 151 aa, Unknown
  Obtained from environmental sample
  misc_feature (1)..(151): Xaa is any amino acid
MLRCFQFSSSRFFCPGSWGFHLPRNLQALALFIPSIILAAFLAAALSMIICLLTFVSLNPYGARLFVGVAGEFLMGAAIPIPFMPPLLQRITALLPFRYTADFPFRIYSGHIAGTEALLGLAAQIFWLVAMIGLGLWGFRAALKRLVIQGG

SEQ ID NO: 53013 - DNA, 864 bp, Unknown
  Obtained from environmental sample
  misc_feature (1)..(864): n is a, c, g, or t
atggcagaccgcacactgatttctttcgactacgctgtgaaatacctgctgcgcgaacaagaagactatgtgattctcagcggcttcctcaccgaactcatgggcagaaagatcgaagttatcgaccttatccccgaagaaaccgtcaaatacgaccccaacgaaaaaactaaccgcgttgacctgaaagcgcggatagacggcggcgaaatcgccgtatttgaaatacagttccatcaagaatatgacttcttcggcagggtgctcttcggcgtaagccacgcgataacagaccaagtacgcagcgggaaactgtacaacataaagaaagtctactcgataaacatagcgtactacaacctgaccgcaaaacgcgagtacctattcttcgggaagttcagcggctttcaaggcatccacttccatgaagaatctatcccgtttgcccaaacaacgacccaagactcgaaagaactcatagatatccaccccgaatactatttgatactgccgaatatgtttgacgagacgctgcgcggcaagtttgatgaatggatttacatcctaaaaaactccaaagtccgtgacgacttcaccgccgcagggataaaagaagctacagaaaaactaaacgaattgaccctgccgcccgacaaattagcggcatatcataagtacatggaaaatatcagaagcgtcaatagtcaggctatagcggcagaaataaaaggcaaagcggaaggcaaagaagaaaacctaaaggaaattgttttaaatatgcacgaagcaggttttagtattgcggacattgtaaaggctaccaaactctcggaacaaaaaatcaacgatattttgaatcaatga

SEQ ID NO: 53014 - protein, 287 aa, Unknown
  Obtained from environmental sample
  misc_feature (1)..(287): Xaa is any amino acid
MADRTLISFDYAVKYLLREQEDYVILSGFLTELMGRKIEVIDLIPEETVKYDPNEKTNRVDLKARIDGGEIAVFEIQFHQEYDFFGRVLFGVSHAITDQVRSGKLYNIKKVYSINIAYYNLTAKREYLFFGKFSGFQGIHFHEESIPFAQTTTQDSKELIDIHPEYYLILPNMFDETLRGKFDEWIYILKNSKVRDDFTAAGIKEATEKLNELTLPPDKLAAYHKYMENIRSVNSQAIAAEIKGKAEGKEENLKEIVLNMHEAGFSIADIVKATKLSEQKINDILNQ

SEQ ID NO: 53015 - DNA, 1197 bp, Unknown
  Obtained from environmental sample
  misc_feature (1)..(1197): n is a, c, g, or t
ttgttaaggagaatttatatgctatacacacaagggaaaacagactgtaaacccagtgaagcaggctatgatgaaaaacggcttgacgtgcttaataaccattttcagcgcatcattgaagacggcgaaatccagtgcgcaacttactgtatatcccgcaaaggcaggattttcgctcatggagcaatagggaaaaaatcgttccgcaaagatgataacactccggttcaacccgattccgtcagatatgtggcttctattaccaaagtatttacagccgcagcaataatgaaactggtagaggacggctttacgcggctggatgtgccggtgggcgaaattctgcctcagttcaacactcctccgtacaacggcgttacgctgtttcagcttttaacgcacacctcgggaatgcacacagacgacggatgttttgaaaacaaataccagtccagttactggaaaatgattgacgacgcgtacaagctttgcgatcctgacaaaaaaaatggattcgactggttagccgccgcgctaggcactataggcaacggcttccgtgttaagccggataccgagtgggcttattgtagtttcggctttgtcgtccttggcgctgtcatcgaaaaattgactggcattcacgctcataagtatatcgaagacagtatctgcataccgctgggaatgaaggacactatatttgacataacaaccgaaatggcaaaacgctatatcgtctcggacgagggaatggaaaaagaccttaacaatatgataaacggtattgcccgtgaagaagacggcccctgggagaaatttaaaattccttcgactgccggcggtttgaattcgacagtctacgaccttagccgttttgggaatatggtattgtttggcggaactttcgaaggcgctcgtgtgttgggcagaaaagccgtggaaaaaatgacaacagttgccagcgcccttccaaatttttgctggagcgctaaggaaaaagaacggtactacggcgtaggctttgacatgcgaaacggccccgcctttaccttttcccagggtactttcatgcacgaaggttcaggggcgtgttcgctgtacgttgatcctaaagaagagcttgtcgcggcgtggattgtcccgtttgctaaagaaggctggttttcacgggcgcttttcaatgtgcagaaataa

SEQ ID NO: 53016 - protein, 398 aa, Unknown
  Obtained from environmental sample
  DOMAIN (31)...(396): Beta-lactamase
  misc_feature (1)..(398): Xaa is any amino acid
MLRRIYMLYTQGKTDCKPSEAGYDEKRLDVLNNHFQRIIEDGEIQCATYCISRKGRIFAHGAIGKKSFRKDDNTPVQPDSVRYVASITKVFTAAAIMKLVEDGFTRLDVPVGEILPQFNTPPYNGVTLFQLLTHTSGMHTDDGCFENKYQSSYWKMIDDAYKLCDPDKKNGFDWLAAALGTIGNGFRVKPDTEWAYCSFGFVVLGAVIEKLTGIHAHKYIEDSICIPLGMKDTIFDITTEMAKRYIVSDEGMEKDLNNMINGIAREEDGPWEKFKIPSTAGGLNSTVYDLSRFGNMVLFGGTFEGARVLGRKAVEKMTTVASALPNFCWSAKEKERYYGVGFDMRNGPAFTFSQGTFMHEGSGACSLYVDPKEELVAAWIVPFAKEGWFSRALFNVQK

SEQ ID NO: 53017 - DNA, 669 bp, Unknown
  Obtained from environmental sample
  misc_feature (1)..(669): n is a, c, g, or t
atgattgaatacattgtcccgtcaaatattgacgacagagtgctgacaagggcggcaaaaatgctggaaaccggagcgttaatcgccatccccactgatacaagctggagcatcgtctgttcgttaaaatcgcccgccggaataaaaaaattaagacggctttccggcgaaagggacgagcggcactttacccttctatgttcaagtatttcccaattcgtggaagtgtgcaatttagacaatacccgtttcaggttaattaaccgtctttctcccggaccttatgtattcattttacaaaccctgccgggaacaaaaaaaacactggatatccgccgcccagaagtcggcgtgcgtattcccgattatcccattcccatcagcctgataaaaacaataggccaccctctttactcaataaccgcaaaaaaaagcatggcgggcattgacgaagaagagacagccggcgaccaagaagctgttaccgaactgccgccaatccctgaagataatctttttgagagcggatgggaactggaggatattaaaggagtggacttgattttggactcaggagaagaaagagagcggactttttccacgattttggatatgtgcggggacgagataaaacttctgcgccagggcgcggggaaatggcctgtgtaa

SEQ ID NO: 53018 - protein, 222 aa, Unknown
  Obtained from environmental sample
  DOMAIN (19)...(216): yrdC domain
  misc_feature (1)..(222): Xaa is any amino acid
MIEYIVPSNIDDRVLTRAAKMLETGALIAIPTDTSWSIVCSLKSPAGIKKLRRLSGERDERHFTLLCSSISQFVEVCNLDNTRFRLINRLSPGPYVFILQTLPGTKKTLDIRRPEVGVRIPDYPIPISLIKTIGHPLYSITAKKSMAGIDEEETAGDQEAVTELPPIPEDNLFESGWELEDIKGVDLILDSGEERERTFSTILDMCGDEIKLLRQGAGKWPV

SEQ ID NO: 53019 - DNA, 453 bp, Unknown
  Obtained from environmental sample
  misc_feature (1)..(453): n is a, c, g, or t
atggattatggtataaccaccatgaaaaaaagaggtgaaaatcaggatatatactattacgtcaactggtctccgctttccaaagcggacagatgggaaataaacgcaaaagttcccgctatcgccggaatctttgaaatatactgggtagatgatacaaaacacctgcggatgtacaatgtggggcaaacttattacggcggacttagaagcgaaatccggcggcttaccgacccggaattgtgcgccgacccgcaggcaagagcgtttcttgaagacaaggaaatgtggttccgatatgctccgacaaactccaccgcagatatggcggatgttatctggttttttatgaatacctatttccctgaaaagacacttgttgaacattcgggacgctatcaaaatatttttataaaagagtctgaaccggacaagttaatttgggtgccgtga

SEQ ID NO: 53020 - protein, 150 aa, Unknown
  Obtained from environmental sample
  misc_feature (1)..(150): Xaa is any amino acid
MDYGITTMKKRGENQDIYYYVNWSPLSKADRWEINAKVPAIAGIFEIYWVDDTKHLRMYNVGQTYYGGLRSEIRRLTDPELCADPQARAFLEDKEMWFRYAPTNSTADMADVIWFFMNTYFPEKTLVEHSGRYQNIFIKESEPDKLIWVP

SEQ ID NO: 53021 - DNA, 1119 bp, Unknown
  Obtained from environmental sample
  misc_feature (1)..(1119): n is a, c, g, or t
ttgataatattgcataataacagcatgacagccggaattatcggcgctacaggttatgccggcgctgaattggtaaggctcctttcggggcatcctgaaataaaaaaccttaaactttcctcagtcagttatgaaggtgacgcaatagaaaacatttatcccaactttttaggcagagtctccggccggcttttgaaagcggaggaggttattgccctttcggatgtggttttttcagcccttccccatgcagtaggagagccttttgccgccgcctgtatggaacgaaaaattcattatatcgatctttccgcagattttcgttttgacgatgatcaaaaagtgtacaatgcatggtacggaaaaacataccaatatcccgaactgcataaaaagtcgatttacggtcttcctgagcttaacaggcggaagatgaaggaacttgccgcggagggacctgttattatcggtaatccgggatgttatccgaccggatgctctctcggtgcatttccggcgcttgcaaaaggattgtcgtgcgccgataggccggtcattgtaaattccgttacaggtatttcaggcggcggcagagagccgtcccgttcgtttcactaccctgaatgcgccgattctgtttctccgtacaaagtagggtcgcacaggcattcacctgagatagcgcgtaacatggcggcaatggcggcggcgggagggtatcctgctccgcaggtgatttttactccgcaccttgcgcctgtgaacagaggtattctgagtactgtatacattcccctttctgataaatggcgcataacaccggatgatgccgcgatgcccccttcaaaggaaattgaagagaaaaccgccggtatcagggaactttacgccggtttttacaaggacgaaccttttgtccggattttgccgcttgggcttacggcggcgacgaaccgcgtgcggcagtccaactactgtgatatttcagtgcatatggatttgaacggctcaacattgattattgcgagcgcaattgacaatatgataaagggcgctgccggacaggcaattcagaatatgaatattttatttggttttgatgaaaaatccnggtcttga

SEQ ID NO: 53022 - protein, 372 aa, Unknown
  Obtained from environmental sample
  SIGNAL (1)...(22)
  DOMAIN (175)...(350): Semialdehyde dehydrogenase, dimerisation domain
  misc_feature (1)..(372): Xaa is any amino acid
MIILHNNSMTAGIIGATGYAGAELVRLLSGHPEIKNLKLSSVSYEGDAIENIYPNFLGRVSGRLLKAEEVIALSDVVFSALPHAVGEPFAAACMERKIHYIDLSADFRFDDDQKVYNAWYGKTYQYPELHKKSIYGLPELNRRKMKELAAEGPVIIGNPGCYPTGCSLGAFPALAKGLSCADRPVIVNSVTGISGGGREPSRSFHYPECADSVSPYKVGSHRHSPEIARNMAAMAAAGGYPAPQVIFTPHLAPVNRGILSTVYIPLSDKWRITPDDAAMPPSKEIEEKTAGIRELYAGFYKDEPFVRILPLGLTAATNRVRQSNYCDISVHMDLNGSTLIIASAIDNMIKGAAGQAIQNMNILFGFDEKSXS

SEQ ID NO: 53023 - DNA, 807 bp, Unknown
  Obtained from environmental sample
  misc_feature (1)..(807): n is a, c, g, or t
atgggttacacgcagaaagcaaaaataagcaatcactcaatttacatccgtaccggcgagtacgaagacggcagtctgggcgaaatttttcttgacatgcaccgggaaggcgcggccttccgcgccctccttaacagtttcgccattactgtttcgcttggattgcagtacggcgtgccgttggaagaatacattgacgctttcacttacagccgctttgagccgaacggcgtagttcagggccacgattatgtgaaaatggcaaccagcgtcattgattacattttccgtgatttggcgatcagctatcttaaacgcaccgatcttggccaggtgaagcccgaagacctgctccctaccgctaccaaaagcgaaataccggactcagtcgaatcaaaacaacgcgtcaacgaaaaacagagcgccgggttcaggccttataatcccccggcggccgctacaggcggaggcccgcagacggagcaaaaaacaactcctccggggaccgcttcccccgggctgtccggccgtggggaaactacaaagggactggcgggaagcgccgaggcataccgccagaccgcaaaacccgcggaggacagagcgtcttccacgcagcccgcccagccgcccgttcaagtgcttgcccagccccatccggagcaaaatgaattatacaaaatcgctcaggcccgcataaaaggttacgaaggagacccatgcccgtcctgcggttctttcactttgatacgaaacggaacctgcatgaaatgccatacctgcggcggaacgacaggctgctcttga

SEQ ID NO: 53024 - protein, 268 aa, Unknown
  Obtained from environmental sample
  misc_feature (1)..(268): Xaa is any amino acid
MGYTQKAKISNHSIYIRTGEYEDGSLGEIFLDMHREGAAFRALLNSFAITVSLGLQYGVPLEEYIDAFTYSRFEPNGVVQGHDYVKMATSVIDYIFRDLAISYLKRTDLGQVKPEDLLPTATKSEIPDSVESKQRVNEKQSAGFRPYNPPAAATGGGPQTEQKTTPPGTASPGLSGRGETTKGLAGSAEAYRQTAKPAEDRASSTQPAQPPVQVLAQPHPEQNELYKIAQARIKGYEGDPCPSCGSFTLIRNGTCMKCHTCGGTTGCS

SEQ ID NO: 53025 - DNA, 1170 bp, Unknown
  Obtained from environmental sample
  misc_feature (1)..(1170): n is a, c, g, or t
atgatgaggctgccacgcgtgccccgtgcacgcaaagagtcgctgccggatgtgaacgacctagaccaagaggcggtcaacgagcttgtggactacgccgtcgcgcacggcgtgaactactttgacacctcgcccgtctactgcaagggtttctccgaacgcgccaccggaatcgctttgagccgccacccgcgcgacaaatattttatcgccacgaagatgtccaaccaacgcgccagaagccgcgaagagtcgctggccatttaccgaaagtcgtttgaggagttaagggtggattatattgattactacttattgcactccgtcggcagccgcgctaatttcaaggagcgttacttagacaacgggatgctcgattttttgttgaaggagcgcgaggcggggcgcatacgcagcctcggctggtcgtttcacggcgagggagatctttttgagtatttgatgtcggaatacaagtgggattttaccatgatacaggtgaactatttcgattggcggatggcggcggggacgaaccgcagcgatatgggggcaaggcgtcagtatgagatattggccgagaagggcgtcccggcggtaataatggaaccgctcttgggcggcggtttggctatgccgcactacaaggcgcgggccaaaatgatgcaggccgaccccgacgcgagcgcggcgtcgtgggccttccgctttgccggtagcctccccaacacgctgaccgttttgagcggcatgacctttatggatcacctgcaagacaatattcgcacgtattcgccgctcgtgccgctctccgatggcgacaacgccatgctagacgaggtcgcgaaagtcatgcttgagtatcgcaacctcacttgtacaaaatgccaatactgtatgccctgtccctacggccttgacataccggaaatattcgcgcacttcaaccgcagcctaaacgagggaaatttccctgaagacaagcaagacccggattacaaacgggctcgccgcgcgtttttggtagggctggacagaagcgtctctcccatacgtcaagcgaacagatgcacgggttgcgggatatgcgtaaaggactgtccgcaacgtatagatattccgtctcagatgcagcgtattgataaatttatagagactatgaaagtgtga

SEQ ID NO: 53026 - protein, 389 aa, Unknown
  Obtained from environmental sample
  DOMAIN (350)...(373): 4Fe-4S binding domain
  misc_feature (1)..(389): Xaa is any amino acid
MMRLPRVPRARKESLPDVNDLDQEAVNELVDYAVAHGVNYFDTSPVYCKGFSERATGIALSRHPRDKYFIATKMSNQRARSREESLAIYRKSFEELRVDYIDYYLLHSVGSRANFKERYLDNGMLDFLLKEREAGRIRSLGWSFHGEGDLFEYLMSEYKWDFTMIQVNYFDWRMAAGTNRSDMGARRQYEILAEKGVPAVIMEPLLGGGLAMPHYKARAKMMQADPDASAASWAFRFAGSLPNTLTVLSGMTFMDHLQDNIRTYSPLVPLSDGDNAMLDEVAKVMLEYRNLTCTKCQYCMPCPYGLDIPEIFAHFNRSLNEGNFPEDKQDPDYKRARRAFLVGLDRSVSPIRQANRCTGCGICVKDCPQRIDIPSQMQRIDKFIETMKV

SEQ ID NO: 53027 - DNA, 1107 bp, Unknown
  Obtained from environmental sample
  misc_feature (1)..(1107): n is a, c, g, or t
gtgattatgctgtacagggaatacggacagacaggcaagaaagtgtcgctgttgggttttgggggaatgcgttttgcccatattgacgatcatgacgaatgcgtccgcgttatgaccgctgccgcggaaggcggagttaattattttgataccgcgcccggttattttgagaccaaaagcgaaacagtttttggcaaaggctttgcggaactcaggcggagaaaaattccctactattgcgcgaccaagactttcgcttccgggccggatgatatccgccgcgagatagaagcgcagttaaagcgcatggatattcccgctattgatttctaccatatatggtgcatcaccagcctggaaaactggcggagccgcaaacaaaacggcattttgcaaactttcaggaaactcaaagaagaggggcttatccgccacatctgcgtctccagccacctgatcaaagacgagataaaggaactccttatggagcagggtgaagttgagggagtgctgttcggctattcgttgtataacttccagacaaggcaggccgcctttgacgcgatacggaaaaacaaacttggcgcggtggtgatgaatcctctgggcggcggcgttatcccgcagaaccctgagaaatttaattttttatgccgcccaggcgaaagcgctgtaacggctgctttgcgctttatctgggatcacccggatataagttccacccttgtcggctttgaaaatacagagcaggtgcaagaagcccttactgccatggaaacgtataaacccagaacggaagcggaactggaagcggtaaaatcccgcgccctttcttctgttgaggggatatgcacaggctgcggctattgtgaaaactgcccgcagggtattcccatttcaaaatacatggacgcgtacaaccagaagatcctcaatgaggaaggcgatgacgatcccatagcaagccggctgcgctggcactggaacattgacagctcatacgccggtgattgcaccgcttgcggccagtgtgagaaggcctgcacacagcatctgaatattattgacagattaaaagaaatcgcagcgccgaaggcggctaaatga

SEQ ID NO: 53028 - protein, 368 aa, Unknown
  Obtained from environmental sample
  DOMAIN (9)...(277): Aldo/keto reductase family
  misc_feature (1)..(368): Xaa is any amino acid
MIMLYREYGQTGKKVSLLGFGGMRFAHIDDHDECVRVMTAAAEGGVNYFDTAPGYFETKSETVFGKGFAELRRRKIPYYCATKTFASGPDDIRREIEAQLKRMDIPAIDFYHIWCITSLENWRSRKQNGILQTFRKLKEEGLIRHICVSSHLIKDEIKELLMEQGEVEGVLFGYSLYNFQTRQAAFDAIRKNKLGAVVMNPLGGGVIPQNPEKFNFLCRPGESAVTAALRFIWDHPDISSTLVGFENTEQVQEALTAMETYKPRTEAELEAVKSRALSSVEGICTGCGYCENCPQGIPISKYMDAYNQKILNEEGDDDPIASRLRWHWNIDSSYAGDCTACGQCEKACTQHLNIIDRLKEIAAPKAAK

SEQ ID NO: 53029 - DNA, 966 bp, Unknown
  Obtained from environmental sample
  misc_feature (1)..(966): n is a, c, g, or t
ttgatggccgagatcggctggtggaactgcattacagtctgccatcacgaagcccgccatcttgtggacgacacccctcattttttttcggacctgaaacggggagacaaaattatcgccattgtcgcgccggctgtcgcgtcggttttccccggcaagcacctcaatctcaacggctgcctaaaatcgctgggcgttaaagatttttttgacgtaagcctcggcgcggaactcaccgttgtttcatacctcaattacattcaggcaaaaaagccgaaactggtcatagcccagccctgccctgccatcgtgagctatattgaaatttaccatcctgaactgataccctaccttgcgccggcggacagtcccatgcttcacacggcgcgaatgatccgcgagtattatccccagtacagggatcataaaatcgccataatttccccgtgcattgccaagcggcgggaatttgacgaaaccggcgtgggggattacaacgttaccatgtttgccctgaaaaaatatctggagacggaaaacattgatcttgattcttgtcagccgctgggctataccgggttgcttgccgaacgggcggtaggtttttccagtcccggcggtttgcttgataccgccgagcgctttgtaccgggtatacggagaaatacccgcaaaatcgaggggctgcacagcatttatcactaccttgcggaagtagccgaattgctgaatgataaggatgtacaattcccgctgctgatagactgcctgaactgcgaaaaaggctgcaacggcggacccggcaccggtaacagtcccctgccgctggacaggctggaaagccctgttcgcaagcgcagtgccgaacttgaaaaacaccttgcttccaatcccaaacaacagaaaaaacagtataaaaaaataccacaaactgctgaaccagtactggaaacccggactgtatga

SEQ ID NO: 53030 - protein, 321 aa, Unknown
  Obtained from environmental sample
  DOMAIN (25)...(270): Iron only hydrogenase large subunit, C-terminal domain
  misc_feature (1)..(321): Xaa is any amino acid
MMAEIGWWNCITVCHHEARHLVDDTPHFFSDLKRGDKIIAIVAPAVASVFPGKHLNLNGCLKSLGVKDFFDVSLGAELTVVSYLNYIQAKKPKLVIAQPCPAIVSYIEIYHPELIPYLAPADSPMLHTARMIREYYPQYRDHKIAIISPCIAKRREFDETGVGDYNVTMFALKKYLETENIDLDSCQPLGYTGLLAERAVGFSSPGGLLDTAERFVPGIRRNTRKIEGLHSIYHYLAEVAELLNDKDVQFPLLIDCLNCEKGCNGGPGTGNSPLPLDRLESPVRKRSAELEKHLASNPKQQKKQYKKIPQTAEPVLETRTV

SEQ ID NO: 53031 - DNA, 615 bp, Unknown
  Obtained from environmental sample
  misc_feature (1)..(615): n is a, c, g, or t
atgacagatcgacagacgccgagcggctcattgacattggattacaccgcggccggaaaaacgggaaacatctcttttagttctcccgccgcagaacgccagcttggaagcgtaaacggaacaagttcggctttgtcggtgactaaccgctcgtctttccctgtttatgtaaggttcacggctaaagggcttcccgccgagggaaaagagcccgcgctttccgaaggtctttcgcttaacgttgaataccgtgacgcccgcagcaatgtaatcgctcccgagaatttaaaactgggcgaagacatggtaatctccgtcagcgtgcgcaatacatttacccagcctgtggaagaagccgcccttattgttccgcttcccgcgtcatgggaaatcgtcaacacccgtgtcggcggagaatcgtcttcgtctaatttccgctatcaggacataagggacgacagggtgatgacttactttaaccttaaaaggggcgaagaaagaacgataaatttcagggtaaacaaagcctacgaaggttcgttcttcaggccggcaattcatgtttacgctatgtatgacgagtcgataagggcgttaattcccggcacacggtaa

SEQ ID NO: 53032 - protein, 204 aa, Unknown
  Obtained from environmental sample
  misc_feature (1)..(204): Xaa is any amino acid
MTDRQTPSGSLTLDYTAAGKTGNISFSSPAAERQLGSVNGTSSALSVTNRSSFPVYVRFTAKGLPAEGKEPALSEGLSLNVEYRDARSNVIAPENLKLGEDMVISVSVRNTFTQPVEEAALIVPLPASWEIVNTRVGGESSSSNFRYQDIRDDRVMTYFNLKRGEERTINFRVNKAYEGSFFRPAIHVYAMYDESIRALIPGTR

SEQ ID NO: 53033 - DNA, 786 bp, Unknown
  Obtained from environmental sample
  misc_feature (1)..(786): n is a, c, g, or t
ttgaagactgtacgctttaaatatcaaactgaacttgcgttttcttcgcccgcctccgagcacaggttcctgctcagaatactgccgcaaagcgacggaaggcagcggataaaaagccttttatggcgtatagacccatcgcctgtcgatacgctctggcaaaccgtagacagcttcggcaacaacgcgctcgcggggcaaatcaacccgccgcacagctttttcagcttcgaaatagaaggagccgctgaagtgtccggcgaaccatacacagcgtccggtgaaccgccgcgcatactgctctacccgtcagagttaacgcgggcgcatcgcgggcttaccgatttctacaacaacattaatcaatccgctccgggcggcgtgttggagcgcatccaacacttttcgcacgctgtccataactgccttcgttacgaacgcggagcgacagaaaattcaactacggcggcgcaggcttttgacataggcgcgggcgtctgccaggattatgcgcaaatattgctcgctattctgcgccttaataaaatcccctgccgctatgtcgcgggaatggcttccggcttcggcgaaacccacgcatgggtcgaggcgtggaccggggattgttactgcgccgtggatcccacacgcgataaactcatagacgagggctatatagtcctctcaagaggccgcgactttgccgacagttcaatcgaacgcggagtatttaagggtgcgtgccgtggaacacaaacaataaacttaagcatggatatttcctga

SEQ ID NO: 53034 - protein, 261 aa, Unknown
  Obtained from environmental sample
  DOMAIN (3)...(85): Bacterial transglutaminase-like N-terminal region
  misc_feature (1)..(261): Xaa is any amino acid
MKTVRFKYQTELAFSSPASEHRFLLRILPQSDGRQRIKSLLWRIDPSPVDTLWQTVDSFGNNALAGQINPPHSFFSFEIEGAAEVSGEPYTASGEPPRILLYPSELTRAHRGLTDFYNNINQSAPGGVLERIQHFSHAVHNCLRYERGATENSTTAAQAFDIGAGVCQDYAQILLAILRLNKIPCRYVAGMASGFGETHAWVEAWTGDCYCAVDPTRDKLIDEGYIVLSRGRDFADSSIERGVFKGACRGTQTINLSMDIS

SEQ ID NO: 53035 - DNA, 690 bp, Unknown
  Obtained from environmental sample
  misc_feature (1)..(690): n is a, c, g, or t
atgggtactatctcggtagaatacagctcaaacctgtactggctcggaaggtacactgagcgcgcctacaccacactcagcacgtttttcaattatcacgataaatcgctcgacaaggataaaaacgcctacaaggagttccttgaaaacctggaaattgaggacaagtacggcgaccacagccgctttatacaggggtatctgtacgatgatgtggactgcttcaccctcagttccgccctgcgcttcgcgcacgataacgcgcttgtctgccggaacgtgatcggcagcgaggcgctcgcctacatccagcttgcgattgacgcgttccgctccagccgcgacgccaaaaacctccgcctgtcgctgatgccggttattgattacctgctcgcgttctggggcagcatagacgacaagctggcggacggcgaggcgcgtacgattgtcaagtgcggcaaacttgtcgagcggctcgacctatatttcaggttttggtatgactacaaactaattaacagcgagtacgaaaagctgtgccacgtccttgcgcgggtacgaaaaggtttttgcaacgcgaaacatttagcggtactggttgaagccctcgccacagatgaaagttacaaggcgcgcctggacgaagtgcttgaaagctttaaccggctgtttgaggagcaggcggcttga

SEQ ID NO: 53036 - protein, 229 aa, Unknown
  Obtained from environmental sample
  misc_feature (1)..(229): Xaa is any amino acid
MGTISVEYSSNLYWLGRYTERAYTTLSTFFNYHDKSLDKDKNAYKEFLENLEIEDKYGDHSRFIQGYLYDDVDCFTLSSALRFAHDNALVCRNVIGSEALAYIQLAIDAFRSSRDAKNLRLSLMPVIDYLLAFWGSIDDKLADGEARTIVKCGKLVERLDLYFRFWYDYKLINSEYEKLCHVLARVRKGFCNAKHLAVLVEALATDESYKARLDEVLESFNRLFEEQAA

SEQ ID NO: 53037 - DNA, 999 bp, Unknown
  Obtained from environmental sample
  misc_feature (1)..(999): n is a, c, g, or t
gtgtacagccatatttcagggatcgatcttgttcaggccaaggacggcgcgtggtatatactggaagacaatttgcgcataccttcgggcgcgtcctatcccttgatggcccgggaactgagccggatcgccgatcccgacgcttattcgaacaactatgtcgtggacaaccgcaactactcggacttgctgcgcgagactatgaactgggtaaactgcggcgggctgaacgtgatcctcacgccgggcaggtacaacgccgcatacttcgagcactcgtacctcgcggaacgcacgggcgcgatactggtgaaagcgtcggagcttgttgttgaggacgcggttctgtacatgaatgattacctcggcgtcaaggcgaaagttggcgcggtgtaccgccgtatttccgacgagtaccttgatcccatgacatttctgggggagtccctcatcggcgtaccgcatattatggatgcctaccgcaagggaaatgtcgcgataataaacgcgccgggcaacggcgtagcggacgataagggcatttattattttgtgccaaaaatggtaaaatattacctgggcgaagaaccgatcctgcagaacgcgccgacctacctgcctttctacgaggatgacatgaagttcacgcttgagaacatccggcgtcttgtcataaaggacgtgtcggaagcgggcggctacggcgtggtgttcggcagagagctgtcggaagaaaagctggcggaactcaaggccactattattaaagagcccaggcggttcatatcgcaggaggtcatcgactttatcgaccttgatataatggaagaagacggcactatcccccgaaaggccgacctgagggcgttcgtgctgaccggcaaagacacgcgcgtatgggcaagcgggctgacgcgcttttcgcgcgttgaggggtcgttcattgtcaattcttcgcagggaggagggtttaaggacacatgggtactatctcggtag

SEQ ID NO: 53038 - protein, 332 aa, Unknown
  Obtained from environmental sample
  DOMAIN (1)...(163): Domain of unknown function (DUF404)
  misc_feature (1)..(332): Xaa is any amino acid
MYSHISGIDLVQAKDGAWYILEDNLRIPSGASYPLMARELSRIADPDAYSNNYVVDNRNYSDLLRETMNWVNCGGLNVILTPGRYNAAYFEHSYLAERTGAILVKASELVVEDAVLYMNDYLGVKAKVGAVYRRISDEYLDPMTFLGESLIGVPHIMDAYRKGNVAIINAPGNGVADDKGIYYFVPKMVKYYLGEEPILQNAPTYLPFYEDDMKFTLENIRRLVIKDVSEAGGYGVVFGRELSEEKLAELKATIIKEPRRFISQEVIDFIDLDIMEEDGTIPRKADLRAFVLTGKDTRVWASGLTRFSRVEGSFIVNSSQGGGFKDTWVLSR

SEQ ID NO: 53039 - DNA, 783 bp, Unknown
  Obtained from environmental sample
  misc_feature (1)..(783): n is a, c, g, or t
ttggaatacaactctcttagtttcagcgtcgccggttccgaaaacacgcaacgcagtcttaaccgcacggcggagcttgaaatcacaatgaacaaaaccgatttcagaaacggcgaggagatcgaattgatgatcaaagcgccgtacgcgggatcggggcttatcaccattgagcgagacaaggtttacgcgcaccgctggttcagaagcacaggggaaacttccatgcagaccatcaccgttcccgcagagcttgagggtaacgcctatgtgaacgtccattatttaagatcgcaggattcgcgcgagatttttatgtctccgttctgttacggcgccgctcctttctcgataagccgagaaaaccgcaccaatcggatcaaactggaaattccgggcgaagcgaaaccgggcgaggattttgtcataaaatactcaacggcgcgcaaaggaaaaattattgtttacgccgtggacgaaggcatacttcagcttgccggttatcaaacgcccgatccgttggcgttctttttcaggaaaagggcgcttgaggtaaaaaccgcccagatactcgacatggttctgccccgttactctatcgttcaaagccttgcggcgatgggcggcggcggcggttttgacgacgagtatctttctcgtaacctaaatccgtttaagcgcaagcagaatgttcctgtggcttattggtcggggatattgactcgggaccccgagtcaaagaactgcgttaccgtgtgccggattattttaatggaacattaa

SEQ ID NO: 53040 - protein, 260 aa, Unknown
  Obtained from environmental sample
  DOMAIN (22)...(168): Alpha-2-macroglobulin family N-terminal region
  misc_feature (1)..(260): Xaa is any amino acid
MEYNSLSFSVAGSENTQRSLNRTAELEITMNKTDFRNGEEIELMIKAPYAGSGLITIERDKVYAHRWFRSTGETSMQTITVPAELEGNAYVNVHYLRSQDSREIFMSPFCYGAAPFSISRENRTNRIKLEIPGEAKPGEDFVIKYSTARKGKIIVYAVDEGILQLAGYQTPDPLAFFFRKRALEVKTAQILDMVLPRYSIVQSLAAMGGGGGFDDEYLSRNLNPFKRKQNVPVAYWSGILTRDPESKNCVTVCRIILMEH

SEQ ID NO: 53041 - DNA, 1737 bp, Unknown
  Obtained from environmental sample
  misc_feature (1)..(1737): n is a, c, g, or t
ttggtcggggatattgactcgggaccccgagtcaaagaactgcgttaccgtgtgccggattattttaatggaacattaagggtaatggctgtcgccgtgagcgatagtacaatcggcgccggggaagacaggtctttagtccgaagtactttcataatttcgcctaacgcgccgatgatggcggctccaggggacgaatttgacgtttcgcttaccgtaaccaacaaccagaagggcgcgggagaaaacggcaaggtgcgccttagggtgattccctctgaacatctttccatttcgggtaacggcgaatttaacctgcaaatcgcggaaggcaaagatcaaaccctgaacattcccgttaaagccgcgggcccgcttggggcggcgcaaatgcgctttgtcgcatccaacaacggtgaagtttcggaactttccgcttatatgagcgttcgtcccgcggttccgtatcgcgtatccatttattcgggggcgataaggaaaaaaagcgccgaaacatcaattgaccgtaacctctacgaagagttcaacacgagggaagtttcgctttcctatcttcctgtgggattggcaaaggggctttctttcttccttaataacttcccctacggatgttcggaacaaattaccagcgcggttttcccattcctgtatccacagcttttcagggagctagggtatacaaaggcgcaggcagacgagggagttaaccgcgctatcggcatacttcaggcgcggatgaaggaaaacggaactataggcgtgtggacttcccgttcctatgacgacccgctgatcaccgtctacgcggctcatttccttaccgaagcccgcggcgcgaattattatgtttcgcccgccatgatggaaaaactgcttaacgcgtgcagaaacatcgcttcaagttccggaataagccattacgattttaccactcgagcttacgcgatttatattcttaccagaaacgaaattgttactactcagttggttgaatcgcttaaaagggacatgaaccgctttgatgaatcgcagaccgggattgccggtctttaccttgccggaacttacgcgctattgcaaaaaacaagcgatgcctcccagcttctgggaaaaatcaagcgcgcgatggctaaagacagcagtttccgttacattgacgaacttatgtatcattcgatatacctcagcattttatcgaggcatttcccgcagcgtttgcgcgacatatcggagtccttgttagttgacatggcaggtcagatggaaagacagtcctacaccacgatttccgccaaccacgcgcttatggcgattgacgcctatctgaaagccgtcccgtccgctgaaacaggccgttataccatacaggaagtttcaaaagacaaccagcgcaaagaaataaaagccgccggaacaactttattcagcgcctccttctccgctaacgcggcaaaaatcgctcttgaaaacaaagacaacctcaacctgttttatcagataacggccgccggttttgaccgtgaactgccgacgaaagagacaaagaacggcattgaggttttcagggaattccttgacagctcgggaaaacccgtaacttcgataaaggtgggcgacgtgataacggtaaaactcaatttccgcagtctttccagcgtcgagtaccgcgacgtggcggttgtcgatttatgccccgcaggtctgagacggaaatga

SEQ ID NO: 53042 - protein, 578 aa, Unknown
  Obtained from environmental sample
  misc_feature (1)..(578): Xaa is any amino acid
MVGDIDSGPRVKELRYRVPDYFNGTLRVMAVAVSDSTIGAGEDRSLVRSTFIISPNAPMMAAPGDEFDVSLTVTNNQKGAGENGKVRLRVIPSEHLSISGNGEFNLQIAEGKDQTLNIPVKAAGPLGAAQMRFVASNNGEVSELSAYMSVRPAVPYRVSIYSGAIRKKSAETSIDRNLYEEFNTREVSLSYLPVGLAKGLSFFLNNFPYGCSEQITSAVFPFLYPQLFRELGYTKAQADEGVNRAIGILQARMKENGTIGVWTSRSYDDPLITVYAAHFLTEARGANYYVSPAMMEKLLNACRNIASSSGISHYDFTTRAYAIYILTRNEIVTTQLVESLKRDMNRFDESQTGIAGLYLAGTYALLQKTSDASQLLGKIKRAMAKDSSFRYIDELMYHSIYLSILSRHFPQRLRDISESLLVDMAGQMERQSYTTISANHALMAIDAYLKAVPSAETGRYTIQEVSKDNQRKEIKAAGTTLFSASFSANAAKIALENKDNLNLFYQITAAGFDRELPTKETKNGIEVFREFLDSSGKPVTSIKVGDVITVKLNFRSLSSVEYRDVAVVDLCPAGLRRK

SEQ ID NO: 53043 - DNA, 300 bp, Unknown
  Obtained from environmental sample
  misc_feature (1)..(300): n is a, c, g, or t
ttgcaggagggatccttgatgaaaaataaggcactaggtagttcatttgatgattttctgactgaggaaggacttgccgatgaggtgagttccggagcaataaagaaaattattgcttatcagttacaggaaaccataaaaaaggagcgtctttcaaaaaccgcccttgcagccagacttgaaacatcccgcgccgcagttgataggctattggatccggaaaatgagtcaattactctcttgtcccttaaaaaggcggcaaatgtcttagggaaaaaactgcggctcgagttggtgtga

SEQ ID NO: 53044 - protein, 99 aa, Unknown
  Obtained from environmental sample
  misc_feature (1)..(99): Xaa is any amino acid
MQEGSLMKNKALGSSFDDFLTEEGLADEVSSGAIKKIIAYQLQETIKKERLSKTALAARLETSRAAVDRLLDPENESITLLSLKKAANVLGKKLRLELV

SEQ ID NO: 53045 - DNA, 777 bp, Unknown
  Obtained from environmental sample
  misc_feature (1)..(777): n is a, c, g, or t
atgccattactgcctttttcaagccaggccgaaaacagccaggcaaaactagcggttctaatcgacgcggacaacacgcagcccgcaatcattgagggacttctggacgaagtcgccaaatacggagtagccagcatcaagcggatttacggagactggaccagcgtccagctgcgttcctggaaagagcggctccttgcaaacgctatccagccaatccagcagttttcgtacactaccggaaaaaacgccaccgacagcgcgatgatcatcgacgcgatggatcttctatacagcgaaaagctcgacggcttctgcattgtttcaagcgattcggattttacccgcctggcggcccgcctgcgtgaaagcgggtgtaccgtttacggctttggcgccgaaaaaaccccaaaggcctttgtcaaagtctgcgataaattcatctttaccgaaattctgttggacaatcaggaagaatcggaagaggaagaaggccgccgccacacaaagccaggaaaggaattcaaggttgacaggaaacttttaaagctgctccgtgacgcggttgatgacatcgccgacgaatcgggctgggcttaccttggcggcgtgggccaaaaggtcaacaaccgctccagtgagtttgatccccgcaactacggctttaaaaagctgggcgaccttttcagggccctcccccagtttgagactgaggaacgcccccaggaaaacggcacaggccgccaggtttacattcggtggaaaaagaaaaggtaa

SEQ ID NO: 53046 - protein, 258 aa, Unknown
  Obtained from environmental sample
  DOMAIN (14)...(155): Protein of unknown function DUF88
  misc_feature (1)..(258): Xaa is any amino acid
MPLLPFSSQAENSQAKLAVLIDADNTQPAIIEGLLDEVAKYGVASIKRIYGDWTSVQLRSWKERLLANAIQPIQQFSYTTGKNATDSAMIIDAMDLLYSEKLDGFCIVSSDSDFTRLAARLRESGCTVYGFGAEKTPKAFVKVCDKFIFTEILLDNQEESEEEEGRRHTKPGKEFKVDRKLLKLLRDAVDDIADESGWAYLGGVGQKVNNRSSEFDPRNYGFKKLGDLFRALPQFETEERPQENGTGRQVYIRWKKKR

SEQ ID NO: 53047 - DNA, 498 bp, Unknown
  Obtained from environmental sample
  misc_feature (1)..(498): n is a, c, g, or t
ttggcttattcttttccaggcggagataagcaaacgcccttgacttcgactggcactgacgcgaaaaaatccgacgaaggggcgtctatcaaagaaaaattccgcggagttttggacaagatgaaaataaccaagcaggagcgggatgaaattcttgcaagaatagaacgaggccttgtactgaacgaaacccagcttgagtcaacatcggtgcgttatgaaaagctggaagcccgcgggctggattacacaggcaagacagcgatagccaagcaggccattgaaaccggttcacttttggaaataacctggcctggccgggacggcgaaccaaaccggacagtcggaataccgcaggcgcttgagagaaaagaaggagagagtgttctggttctcaaggccagcgcaaattcggaaaacgccgcaagagtcctaaaaatcccgctcggaaagatcagccttttacggcgcatcaaacaatcaatttttggagagtaa

SEQ ID NO: 53048 - protein, 165 aa, Unknown
  Obtained from environmental sample
  misc_feature (1)..(165): Xaa is any amino acid
MAYSFPGGDKQTPLTSTGTDAKKSDEGASIKEKFRGVLDKMKITKQERDEILARIERGLVLNETQLESTSVRYEKLEARGLDYTGKTAIAKQAIETGSLLEITWPGRDGEPNRTVGIPQALERKEGESVLVLKASANSENAARVLKIPLGKISLLRRIKQSIFGE

SEQ ID NO: 53049 - DNA, 1704 bp, Unknown
  Obtained from environmental sample
  misc_feature (1)..(1704): n is a, c, g, or t
ttgcgtgcctgcacgtcgactctggaggatcccacagacctgtttgctgttttgtccaaaaaagaaaatagaaagaccatagccgcttttatcggcgaacaggatcacaaagtgatcgctgcaacagcgctccttaacgagccggacaccggcgatttagaaagattttttgccggggaaatgaccgcagcggaactacacgccgttatcatcaaccttgaggagcggcttatcctttaccgttttcgggatgaaaaatgccagcgcctggcgcttaacccggttttggaagaggtactgtcccctttcattgcagacacgcgaccgctgttttgcagcatccccttggagagtggctctccaaaggagagcggctctcctttggagagctccgaggaaacggaagcagcaccccaggcagcctgtcagccctattacatttccgatcccagaattatggcggcgctttttaccttcatcatcgaagaggaagagctgtttaagatggaaaccggaacagagcccaagaaatcatcgttccaggaaactccgatccccgaattacgcaagaaggttatggaaagcgcaaaaaaaatctttcccgatctggattttgaacttgcggtaaacaacttaatccagcttgggctgttcaagcgtacggaccgatgcttaattcccaacagcgagaaaattaccgaatactccgagctttccgatgctgaaaggcaggagtactgggcggcaggtctgtatatctgctttaaggaaaccgaaaacagtacgcgcaacaacaactcctgggacacttattcgttttcctggggccgcctgcgcttaattgcctcatccatacaccgctttagaagcctgcttgatccaggcagggtttacccggaacttaccctaaagcggatatgggatcttttggaagagcgagcgggggggccgtcaaatcaatggccttcgttccttgcggtgatggagaagacaggccttttggaaaaggaaaatgtttccggaaacgaagaaaccttaaaggaagaaagcttttggcttctcccttcagaaaaaccaaaagaacaatccgccggtaaaccggtaatcgccatggacacggcattttcatttataatttacccggaaatctcctttgcggacgcgctggcgttaactgctttctgttcgattaaggaatgcgtgataaacgaatccaccggaactttaatcagttttgaattaaccagcaaatcagcggtcaggggctttgaccagggattggacgcgaaagccatgatggagcttttggatcggctttcagaaaaccgccttgatccgaatcttgactggacacttaaagaatgggaaaaacgctacaccggggtttccatccatcagggcattgtccttacgctgacggaagacaaccactacctggcgaaggcagggcccgtctctcacctgatagcaaaaacccttgcgccgggagtttacctgctttccacggaagagcgctcgacagtcgtcagggccttgcacagagccggcattgatattgtcgcccagccgcctgaggaagccggaatcgccgggtataggcgcgccggatcattcagcaactctttccgcgcctttttccatcggaagcagcggaatacggtttggcttattcttttccaggcggagataagcaaacgcccttga

SEQ ID NO: 53050 - protein, 567 aa, Unknown
  Obtained from environmental sample
  misc_feature (1)..(567): Xaa is any amino acid
MRACTSTLEDPTDLFAVLSKKENRKTIAAFIGEQDHKVIAATALLNEPDTGDLERFFAGEMTAAELHAVIINLEERLILYRFRDEKCQRLALNPVLEEVLSPFIADTRPLFCSIPLESGSPKESGSPLESSEETEAAPQAACQPYYISDPRIMAALFTFIIEEEELFKMETGTEPKKSSFQETPIPELRKKVMESAKKIFPDLDFELAVNNLIQLGLFKRTDRCLIPNSEKITEYSELSDAERQEYWAAGLYICFKETENSTRNNNSWDTYSFSWGRLRLIASSIHRFRSLLDPGRVYPELTLKRIWDLLEERAGGPSNQWPSFLAVMEKTGLLEKENVSGNEETLKEESFWLLPSEKPKEQSAGKPVIAMDTAFSFIIYPEISFADALALTAFCSIKECVINESTGTLISFELTSKSAVRGFDQGLDAKAMMELLDRLSENRLDPNLDWTLKEWEKRYTGVSIHQGIVLTLTEDNHYLAKAGPVSHLIAKTLAPGVYLLSTEERSTVVRALHRAGIDIVAQPPEEAGIAGYRRAGSFSNSFRAFFHRKQRNTVWLILFQAEISKRP

SEQ ID NO: 53051 - DNA, 726 bp, Unknown
  Obtained from environmental sample
  misc_feature (1)..(726): n is a, c, g, or t
ttgttgcgtcgcgttgaggattttttcatccccccgctctgtcttgtctgcgacggcgccttgtccgacgaccgcggcggcgccggcggccgatggctctgcccgtcttgcgtggacgcgctctccaaaaaccacgccgggcgcgacgcttgcccgcgttgcgccggcaaccgccgcaagcgggagtgcgcttgcgagttcgcttgggatcttccgttcgagagcgtgtactgcgtctacgattacgacgatacgttaagtgtccttgccaagcacatcaagtaccacgggaagagcgctttgcccgaacgtgtaggcgccatcagcgccccgttaatccccgcggatttttttgacggggtgtacgcggttataccggtgccgcttcaccgcgcaaagcagcggctcagggggtacaaccaagcggagcgtttcgcgcgcggcgttttggaggggcggggcgcggaggcggcgttgctgcgcacggatttgctcttacgcgttaagaacacggggacgcagacgcagttggatagggaagagcgccaaaagaaccttgccggggccttcgcggtgaacgatcaaaaggcgggcgagcttgccggaacgcggatagtattggttgacgacgtctttaccacgggggcgaccacgggggcctgcgccgaggcgctgctcggggcggggtgcgcgtcggtggccgtgttggccatggggcgggactga

SEQ ID NO: 53052 - protein, 241 aa, Unknown
  Obtained from environmental sample
  misc_feature (1)..(241): Xaa is any amino acid
MLRRVEDFFIPPLCLVCDGALSDDRGGAGGRWLCPSCVDALSKNHAGRDACPRCAGNRRKRECACEFAWDLPFESVYCVYDYDDTLSVLAKHIKYHGKSALPERVGAISAPLIPADFFDGVYAVIPVPLHRAKQRLRGYNQAERFARGVLEGRGAEAALLRTDLLLRVKNTGTQTQLDREERQKNLAGAFAVNDQKAGELAGTRIVLVDDVFTTGATTGACAEALLGAGCASVAVLAMGRD

SEQ ID NO: 53053 - DNA, 840 bp, Unknown
  Obtained from environmental sample
  misc_feature (1)..(840): n is a, c, g, or t
atgcaccctactttattccacatattttcgttccccgtcccctcctacgggacgatgctcgctctctcctttttgagcggcatcctcatagcgatgtacttcgccaagcagcgcggtctcaatcccgacgccgtgtcagacgttgggctttacactataatctccgcaataatcggcgcgcggctatactacgttatgacgcacttccatgagtttcgcggcaatctgctatccatcgtgaacccggttcaagacgggcggatcgggataagcggacttgtgatgtacggcgggttcattgcggccatagccacggcggcgctcttctttaagattaaaaaactcccaattctatcgtatttggacgtatgctcgccaagcgtcggattgggaatcgctattacccgcgtcggttgttttctcaacgggtgctgttacgggggccctgcgaaggccgggagtttcttgtcgataaattacccgatccaaacactgtctccggccggatactatcaacattctatcggcgcccaaggattgctgccgactcaatttttcgagtctgcgggcggaataatcatcgccgtcacgctgtatttagccggtagaagcaagttcgcttttgcgggattgcaattctatttgctagtggtgatgtacgccgtgctgcgcttttttatagaaatggttcgctatatcgaaacgcagcggatagggccttttacgcataatcagttgatatgtatcgttttatttttggtgttcggcgggcttatcgtgaagaatcttatggcggggaaacataaggggtcgggaagattaaaatcaaagacagactga

SEQ ID NO: 53054 - protein, 279 aa, Unknown
  Obtained from environmental sample
  DOMAIN (1)...(265): Prolipoprotein diacylglyceryl transferase
  misc_feature (1)..(279): Xaa is any amino acid
MHPTLFHIFSFPVPSYGTMLALSFLSGILIAMYFAKQRGLNPDAVSDVGLYTIISAIIGARLYYVMTHFHEFRGNLLSIVNPVQDGRIGISGLVMYGGFIAAIATAALFFKIKKLPILSYLDVCSPSVGLGIAITRVGCFLNGCCYGGPAKAGSFLSINYPIQTLSPAGYYQHSIGAQGLLPTQFFESAGGIIIAVTLYLAGRSKFAFAGLQFYLLVVMYAVLRFFIEMVRYIETQRIGPFTHNQLICIVLFLVFGGLIVKNLMAGKHKGSGRLKSKTD

SEQ ID NO: 53055 - DNA, 603 bp, Unknown
  Obtained from environmental sample
  misc_feature (1)..(603): n is a, c, g, or t
ttgatcagatcggccgagccccgcaaccgcgatgaaatccgagccataatcgcccgaatagactccgacatccgcacgtacataggcataaagaccctggcgagcttggccaccgccgccgccggatacgtggtcttcgcgagcgtaggcctgaacttcgccagcttctggacgttcctgctattcatgctgaattacatcccgaccttcggctcaatagtggcgaccgtcctgccggcgatcttcgccctcatgcagtacgaaagcctcggcccgttcttcgttatcctgataggcataatcatcatccagcaagccataggaagcatcatagaacccagattcttgggcgacaggctgaacctgagcccgctggtaatcctgctgtcgctggccttgtggaacctaatctggggcatccccggaatgctgatgtgcgtccccctcaccgccatattggtaataatcttctcctacttcccgcagaccaggccgatagccatagccctgtcgagaaacggaaagataaggggaaccgagccgaaggagccggcggaagcggggcttgtgccggaggagttaaaacagggtgaaaatatttaa

SEQ ID NO: 53056 - protein, 200 aa, Unknown
  Obtained from environmental sample
  misc_feature (1)..(200): Xaa is any amino acid
MIRSAEPRNRDEIRAIIARIDSDIRTYIGIKTLASLATAAAGYVVFASVGLNFASFWTFLLFMLNYIPTFGSIVATVLPAIFALMQYESLGPFFVILIGIIIIQQAIGSIIEPRFLGDRLNLSPLVILLSLALWNLIWGIPGMLMCVPLTAILVIIFSYFPQTRPIAIALSRNGKIRGTEPKEPAEAGLVPEELKQGENI

SEQ ID NO: 53057 - DNA, 414 bp, Unknown
  Obtained from environmental sample
  misc_feature (1)..(414): n is a, c, g, or t
atgaaaaaaataataattgcctccattgtgaaacgtgaatacagagtagagagggaagcgcctattatggcgggagtttttataacagggctccgcataaaaatggctctgcaatcctgcgctacagtagagtacattataacggaaatacagaaccgccctcacccgtcggttttgctgtttacggacatagaaattgatcacccgtataatacatacgttaagccgggtcttccccccgggcctatttccgcacccggacttaccgccttacgggcgtcgttttttccggacaaaacaaattatttgtatttccggcttgaagatgtcaagagcggaagacattatttttcccggacttatgaccagcatataaaggccggagagttaattacgaaaccatcatggcgttaa

SEQ ID NO: 53058 - protein, 137 aa, Unknown
  Obtained from environmental sample
  DOMAIN (1)...(131): Aminodeoxychorismate lyase
  misc_feature (1)..(137): Xaa is any amino acid
MKKIIIASIVKREYRVEREAPIMAGVFITGLRIKMALQSCATVEYIITEIQNRPHPSVLLFTDIEIDHPYNTYVKPGLPPGPISAPGLTALRASFFPDKTNYLYFRLEDVKSGRHYFSRTYDQHIKAGELITKPSWR

SEQ ID NO: 53059 - DNA, 339 bp, Unknown
  Obtained from environmental sample
  misc_feature (1)..(339): n is a, c, g, or t
ttgtgcgccgtattaaaaaaggacgaaaaaaacgtaattagcgaatattgcagatgggtaaaaacatgggacggggaagcggttctttccttaaaagaaaagtcgaattatgactgtattttttgggacagcggctgtaccgtttacgcgtcgcgtccccttcaatgtattacttttccgttttgggattcgatagttgccgatataaaatgctgggaaagcgcggcaaagagctgtccgggtatgaattcaggcgaactgcattcacaggcggaaatagacaaagccgtcgaatcaagggttgatgaaccgttaatttataagacagggggaaattga

SEQ ID NO: 53060 - protein, 112 aa, Unknown
  Obtained from environmental sample
  DOMAIN (15)...(84): Uncharacterised protein family (UPF0153)
  misc_feature (1)..(112): Xaa is any amino acid
MCAVLKKDEKNVISEYCRWVKTWDGEAVLSLKEKSNYDCIFWDSGCTVYASRPLQCITFPFWDSIVADIKCWESAAKSCPGMNSGELHSQAEIDKAVESRVDEPLIYKTGGN

SEQ ID NO: 53061 - DNA, 390 bp, Unknown
  Obtained from environmental sample
  misc_feature (1)..(390): n is a, c, g, or t
ttgatgaaaatacatttttggggagtacgaggttccattccaacatcggtatcgccatcctctatcaaaagtaaaatttcagcgattgtagaacagatcactgttgatgatttagccggcgctgaaagcagagaaaagtttttagcggggcttccgccgtggctgttcgggactacgggcggaaacagtccgtgcgtcagcgtatcgctcgataacaataaagatgattgtattgtctttgactgcggttcggggttgcgcgaacttggaataacgcaggcaagcgccgaaaaaaagataaaccattaccatattttcctttcacattttcactgggatcatatacaagggcttccgttttttcggccccggttacaatcccgccgttaa

SEQ ID NO: 53062 - protein, 129 aa, Unknown
  Obtained from environmental sample
  misc_feature (1)..(129): Xaa is any amino acid
MMKIHFWGVRGSIPTSVSPSSIKSKISAIVEQITVDDLAGAESREKFLAGLPPWLFGTTGGNSPCVSVSLDNNKDDCIVFDCGSGLRELGITQASAEKKINHYHIFLSHFHWDHIQGLPFFRPRLQSRR

SEQ ID NO: 53063 - DNA, 531 bp, Unknown
  Obtained from environmental sample
  misc_feature (1)..(531): n is a, c, g, or t
ttggaaaaaatattaagcggtcagatggttcacccttattttccggtactatggacgcaatggggagcgacaaaaacatttcattacatggaaaacgatattgatattctcggctgtaaaataagcaagaaaaaaatgaaccacccgggcgactcatacgcctattgcataaacgaaaacggcaaacgttttatttacgcaaccgatacggaattaacatcaggcgactttttaaagaacgacgaaaacaccgcgttttttaacggcgcggatgtgatagttattgactgccaatatacgttaggcgaagctattgataaatacaactggggtcacagcgctttcagtttggcggtagacttttccgtaaactggaatattaaacacatggtgttattccatcatgatcctacttatgatgatcataaactctacggaatattgcaatcggcaaaatggtatttggaaagaatgaaccttaaaggcattgaattgactctggcttatgaaggcttggaaatttcaatttaa

SEQ ID NO: 53064 - protein, 176 aa, Unknown
  Obtained from environmental sample
  misc_feature (1)..(176): Xaa is any amino acid
MEKILSGQMVHPYFPVLWTQWGATKTFHYMENDIDILGCKISKKKMNHPGDSYAYCINENGKRFIYATDTELTSGDFLKNDENTAFFNGADVIVIDCQYTLGEAIDKYNWGHSAFSLAVDFSVNWNIKHMVLFHHDPTYDDHKLYGILQSAKWYLERMNLKGIELTLAYEGLEISI

SEQ ID NO: 53065 - DNA, 684 bp, Unknown
  Obtained from environmental sample
  misc_feature (1)..(684): n is a, c, g, or t
atgcggcctncgttcatatcctcgcacaattgtgaaaccatgcccgagtccatcaagactgatgatttttttatcagcgccgcccgcttgaacggaagaatgcttgcatatgtgtcgaaagaactgcgtacgcaagagctttgtcttgaagcggtttcaaatcatggaggggctcttttttgcacgcctcgtcaattcataacagaaagcctctgccgtaccgctattgaaacctgcggcggcgcgctcgagtgcgttccggatgaatttaagaccagggaaatctgccatatggccgttgaaagatgtggaaaggctctcgaatatgcgcctgagaattttattaccgccgatctgtgcatcaaagcggtggaaaatgatgttgacgccaagatgttcgttcccaaaaagtaccgcactaaagaattctggcgtgtgcttgtctcccgttcctggttatgttttaagtatttgccagcttcattgatgtcggaagaattctgccgcctggcggtacatcattcgggtatggctctttgttatgttcctgacaaatacaaaacaaaggaactgtgttttgaggcagtgcgtgaggatggccacgcgcttacgtatgttgatgtaagcaagctcaccaaagaggaatatactgaaatatgccgtctgtcgcttgagagggcatga

SEQ ID NO: 53066 - protein, 227 aa, Unknown
  Obtained from environmental sample
  misc_feature (1)..(227): Xaa is any amino acid
MRPXFISSHNCETMPESIKTDDFFISAARLNGRMLAYVSKELRTQELCLEAVSNHGGALFCTPRQFITESLCRTAIETCGGALECVPDEFKTREICHMAVERCGKALEYAPENFITADLCIKAVENDVDAKMFVPKKYRTKEFWRVLVSRSWLCFKYLPASLMSEEFCRLAVHHSGMALCYVPDKYKTKELCFEAVREDGHALTYVDVSKLTKEEYTEICRLSLERA

SEQ ID NO: 53067 - DNA, 615 bp, Unknown
  Obtained from environmental sample
  misc_feature (1)..(615): n is a, c, g, or t
gtgccgtatgaggcgggagacgtgctggtatttgaccggggatacacagattatggctattttgcggcaatatgcgagaaaaaagccttttttgtgacacggttaaagaaaaacgcggtatataagcgagtcagaaagaatccggtcaaggaaggcggaaacatcatatctgattatgaaataattattccttcattatcaaatgaaataacattgcgtaaaataacagtccgtgatcctgaaacaaaagaacaagttgtattattaacgaataacctgaagtggtctgccgtgacggtagccggagtatataaggatcggtggcagatagaaatattttttaagacgataaaacaaaacttgaagataaaacgattttatggcaattcaaagaacgcggtaatgacccaagtttggatagcgttaatagcataccttttattttatctgttgaaagcaaagtcaaagatttttaggatgtcatttaccaattttatctcggtaataaagacgatgctgtttcaacgtgtttctctttttgctttcttaagcggtgaaagcccgccgcctaaacctaagaaattacttgaatgtcagccggagttcgtatggtag

SEQ ID NO: 53068 - protein, 204 aa, Unknown
  Obtained from environmental sample
  misc_feature (1)..(204): Xaa is any amino acid
MPYEAGDVLVFDRGYTDYGYFAAICEKKAFFVTRLKKNAVYKRVRKNPVKEGGNIISDYEIIIPSLSNEITLRKITVRDPETKEQVVLLTNNLKWSAVTVAGVYKDRWQIEIFFKTIKQNLKIKRFYGNSKNAVMTQVWIALIAYLLFYLLKAKSKIFRMSFTNFISVIKTMLFQRVSLFAFLSGESPPPKPKKLLECQPEFVW

SEQ ID NO: 53069 - DNA, 525 bp, Unknown
  Obtained from environmental sample
  misc_feature (1)..(525): n is a, c, g, or t
atgaaagatataattttgacaggtccaaaacactgcggtaaaacaaccacgggcaaagagcttgccttgttgttttcatgcgattttatcgacatagacgaattgatttcccagagaaccggaaaaagtccccgtcagctttttaacgaagggctggctgtttttcaaaaagccgaagccgaagcgttggcggctctcgtggactcaggcggcggcgcggacagcggggctaagcggcgcgtaattgccgcaggcggcggaataattgacaatagtgaagccttgtctatattgaaaaaatcaggtgcggtaatggtttatcttgatatttccgccgaaagtgcgtgggatagaatcgccgccggggaattgccgccgtttctcaaaacagaaaacccgcgggagacacaccgcgctttacacgaacggcgtgcggctgcttatttgcaaattgccgatattgttatcgaaaccgagggaaaatcgccacaagaaagagccgccgaaatcttctcacgtttttaa

SEQ ID NO: 53070 - protein, 174 aa, Unknown
  Obtained from environmental sample
  DOMAIN (12)...(173): Shikimate kinase
  misc_feature (1)..(174): Xaa is any amino acid
MKDIILTGPKHCGKTTTGKELALLFSCDFIDIDELISQRTGKSPRQLFNEGLAVFQKAEAEALAALVDSGGGADSGAKRRVIAAGGGIIDNSEALSILKKSGAVMVYLDISAESAWDRIAAGELPPFLKTENPRETHRALHERRAAAYLQIADIVIETEGKSPQERAAEIFSRF

SEQ ID NO: 53071 - DNA, 885 bp, Unknown
  Obtained from environmental sample
  misc_feature (1)..(885): n is a, c, g, or t
ttggaatgcgccttccagacacagccgaatatctgtcttatttcggaagaaatcgaagctaagggactgtctcttgataaaatagtcgatcaggtctgcgcctctatcgtaaaacgagcggaaaacggcgataatttcggcgttgtgttagttcccgaagggcttatcgaatttattccggagataaaaaaattaatcgaagaacttaacgatgtaatcgccgctgaagaaaaagcgtttgcggatattaccaattttatcgatcaactttattggctttcaacaagaatatgcgaaccttcatacagaataatgcaatcgcttcctcccgaaatcgcccagcagtttttaatggacagagacccgcatggaaacgtgcaagtttccagaattgagaccgaaaaattacttgtcggaatggtggaaaaaagacttgccgacatgaaggcgaaaaatctttacaacggaaaattcagcgctcttactcatttcttcggctatgaaggcagatgcgctttcccgacaaattttgacgctgattattgttacagcttgggctttagcgcgtttattttgatagcgtcgggattaaccggctatctttccagcgtaagaaatcttatcgctccggcggatcaatggatagcggggggcattcctcttacaatgatgatggaccttgaacataggcacggaacccaaaagcctgttataaaaaaagcgttagttgaacttgacggcaagccgtttaaaaagttcgccgccatcagggatcattgggctgaaaaaaccagctttttgtttccgggcgcgattcagtattacggaccgcctgaagtatgcgatcagccgtcaagtacgttaaaacttgaacatgagatataa

SEQ ID NO: 53072 - protein, 294 aa, Unknown
  Obtained from environmental sample
  misc_feature (1)..(294): Xaa is any amino acid
MECAFQTQPNICLISEEIEAKGLSLDKIVDQVCASIVKRAENGDNFGVVLVPEGLIEFIPEIKKLIEELNDVIAAEEKAFADITNFIDQLYWLSTRICEPSYRIMQSLPPEIAQQFLMDRDPHGNVQVSRIETEKLLVGMVEKRLADMKAKNLYNGKFSALTHFFGYEGRCAFPTNFDADYCYSLGFSAFILIASGLTGYLSSVRNLIAPADQWIAGGIPLTMMMDLEHRHGTQKPVIKKALVELDGKPFKKFAAIRDHWAEKTSFLFPGAIQYYGPPEVCDQPSSTLKLEHEI

SEQ ID NO: 53073 - DNA, 1524 bp, Unknown
  Obtained from environmental sample
  misc_feature (1)..(1524): n is a, c, g, or t
atgctcaaatgtttttttgaggatacggcgcaaatcggcggcaaagatacgcgggcgctgtttcgcgggttgaagatagaggatgccggagagcggtatatggagtatcaggggaagtatccggtgatatttttaagtttcaaggagggaaagtccaacagttttgacggatcgtatgatttgttaagggattgcatagcccaagaatttgagcggcacacctacgctatggaaaaaatatctaatgattatgacagagatttgtttaagaaactgtcaacccgtaccggatctatcagtgattacgttcgatcgctcaaatttttgagcaggtgcctaaactgctatcacggtagaaagaccgtaatcctaatcgacgagtatgacgtcccgctggagaattcgtggtcttgcggtttttatcaaaatatgatcgatttcatccgtccgcttttgggtagcgcgcttaaagacaatccgcaccttcaattatcggtgatgaccggatgtctgcgaatttccaaagagagcatatttaccggactcaacaatttgtcggtagtgtcaattctcagcgatttttatagcgagcgtttcggatttacacagaatgaaatggacatcatgcttgagtactacggcttagagagcaaaacacaaattatcaaggattggtacaacggttatttattcggaaataccgtggtatacaacccattgagcaccgtccgcgcggttgatgcgtggacgcaaaatataaacagaaatccagaaccgtactgggcaaacaccagcggtaacgatattgtccgcagattaatgaataccgccgacgccgaaatgaaaaccgacctcgaaacactgatggccggcgagacaatctcaaaggttatccatgaggacatcacatacaacgaaatagatgaagacgtcgaaaatttttggaatttcctattttttaccggctatctaaaaaaagagggggacggacgccaaagcgccgacggcgagttaacgttgaatttatcaatccccaacattgaattgagatacatctacaaaaccaaaatacaagaatggttcaaaacacgaatggccggaaagaacctcgacacgctccacagcgctgttttgaacggggatgtcgaaacgttccaaaatgagttatccgcaattcttttggagagcataagttacatggacaacgcagaaaacctttaccacggacttatgatcggaacactggcgcggttaaacgattacagattgaagtctaatagagaaagcggagacggacgtagcgatttagtcttatacaacgcaaacgaaaaaggcggcaaagcgattatatttgagtttaaggtagccaaagaatttgacaatttgaccatagcgtgtgaaaacgccctgaaacaaatagatgacaagaattacgccgccgcatgggacaaagagggctataaaaacattatcaaatacggcataggcttttacaagaaaagatgcgtggtgagaaaaggataa

SEQ ID NO: 53074 - protein, 507 aa, Unknown
  Obtained from environmental sample
  DOMAIN (1)...(507): Protein of unknown function (DUF1703)
  misc_feature (1)..(507): Xaa is any amino acid
MLKCFFEDTAQIGGKDTRALFRGLKIEDAGERYMEYQGKYPVIFLSFKEGKSNSFDGSYDLLRDCIAQEFERHTYAMEKISNDYDRDLFKKLSTRTGSISDYVRSLKFLSRCLNCYHGRKTVILIDEYDVPLENSWSCGFYQNMIDFIRPLLGSALKDNPHLQLSVMTGCLRISKESIFTGLNNLSVVSILSDFYSERFGFTQNEMDIMLEYYGLESKTQIIKDWYNGYLFGNTVVYNPLSTVRAVDAWTQNINRNPEPYWANTSGNDIVRRLMNTADAEMKTDLETLMAGETISKVIHEDITYNEIDEDVENFWNFLFFTGYLKKEGDGRQSADGELTLNLSIPNIELRYIYKTKIQEWFKTRMAGKNLDTLHSAVLNGDVETFQNELSAILLESISYMDNAENLYHGLMIGTLARLNDYRLKSNRESGDGRSDLVLYNANEKGGKAIIFEFKVAKEFDNLTIACENALKQIDDKNYAAAWDKEGYKNIIKYGIGFYKKRCVVRKG

SEQ ID NO: 53075 - DNA, 717 bp, Unknown
  Obtained from environmental sample
  misc_feature (1)..(717): n is a, c, g, or t
atgatacaattcgacctgcacgtacacacgatattcagccagtgcggtatccataccgcgttggaaatactcgcccgcgctaatgaactcggcatgaagggtatcgcgataaccgaccacgggcccgcccttcccgacgaacgcatcaatagcccgttcttcgaacgtttcaagtccccgtatcccgatcttatattcttgaaaggtatggagtgcaacttggtcgacgcgtccggtaagatcgacattccgctacggttcaaaagctgcatggacgtggtgctcttgggcatccaccccaatacccacatgggcttagacgcctcggcctacacagatatgctgatcgccgcgatagataaaaatccgtgcgtagatataataacccaccccaacgaccccaattacccggttgattacaggcgtttggccaaggcggccaaggcggcgggggtggctttggagttgaacaactcaaagatactgtacgctagggcggaggcgcaaagcgcggtggatttggtgacggcctgccgggacgaaggctgcaaaatggcggtgaacagtgatacccacgcgatacacgaattggggctggacgattctgtcaggcccatcctgcggtcggtagggtttccggaggaaatgatcgttaatagggatgaagcgtctacgatggagtttatcaattccagacgggggaataaaaatgtctga

SEQ ID NO: 53076 - protein, 238 aa, Unknown
  Obtained from environmental sample
  DOMAIN (4)...(195): PHP domain
  misc_feature (1)..(238): Xaa is any amino acid
MIQFDLHVHTIFSQCGIHTALEILARANELGMKGIAITDHGPALPDERINSPFFERFKSPYPDLIFLKGMECNLVDASGKIDIPLRFKSCMDVVLLGIHPNTHMGLDASAYTDMLIAAIDKNPCVDIITHPNDPNYPVDYRRLAKAAKAAGVALELNNSKILYARAEAQSAVDLVTACRDEGCKMAVNSDTHAIHELGLDDSVRPILRSVGFPEEMIVNRDEASTMEFINSRRGNKNV

SEQ ID NO: 53077 - DNA, 1224 bp, Unknown
  Obtained from environmental sample
  misc_feature (1)..(1224): n is a, c, g, or t
atgatcagatcggccgagggacatttcggctttatgcgcgcgcttccgacggcggatatgcgcggacgcaagggcggctacggcatgtactaccacttcgattaccacggcgggccgatttcatacgagtggatgccgtccatttcttttgaaagaacctgggaacaaatgtgcatggcttacgattacgggatcaaagatgtttggatcgtcaatgtaggcgatttgaaattcaacgaagtccctctcgcgtattttatggagcttgcctatgattttgaaaaatgggggacaaattcgcctaacagcattaacgaatatacaaaaatgtggcttgaaaaaacatttccacaggcagaagcagggcttcgtgggaagattgcggacgttcttcacggatatataagaatgaacgcggcgaggcgtcccgaagcgcttaacgcagatatttaccatccttgccattaccttgaagcggacaggatactggaccttgccgcaagtattgaaaaaacaaacgaggaagtttattccgcgcttcccaaaaacgaaaaggacgcgtattacagcatgatatacttcccggcgaagacgagcgtcaatcttttacgaatgcacctgtacgccggaaaaaacctacattatgccaaacagggcaaaaaaatcgcgaataaattttccgctctcgtgaccgagtgcattgaaaaagaccgcagtctgaacaaagagttcgcgtcgttcaaaggcgggaaatggaaaggcatggaacttgaacagcacataggctttgtcaaatggaacgatgataattacagatacccgttgagagtgacggttgaaccggcgcataagccccgtttgtccgtttccagaaaagacagaacagaagtatattccaaagcctatggcagcccgatgacgattaacgtagaagattttctttacgccggaaacgacgaagttatcatcgaaatagcaaatgacgggattggcagtcttgattatgtaatcgaaggcgcccaggaatacaaatggctgaatataagctccatacaaggaacggtcgagtcacaggaagaaataaccctaagctgtaacagacagtggctgacaaataatatacaaagcgcccggctgttaatcaaagataaagaaactgtcgttgccgtcgatataaaagcccaggaactatgttatagaagatttaccctcgtgccgatctga

SEQ ID NO: 53078 - protein, 407 aa, Unknown
  Obtained from environmental sample
  misc_feature (1)..(407): Xaa is any amino acid
MIRSAEGHFGFMRALPTADMRGRKGGYGMYYHFDYHGGPISYEWMPSISFERTWEQMCMAYDYGIKDVWIVNVGDLKFNEVPLAYFMELAYDFEKWGTNSPNSINEYTKMWLEKTFPQAEAGLRGKIADVLHGYIRMNAARRPEALNADIYHPCHYLEADRILDLAASIEKTNEEVYSALPKNEKDAYYSMIYFPAKTSVNLLRMHLYAGKNLHYAKQGKKIANKFSALVTECIEKDRSLNKEFASFKGGKWKGMELEQHIGFVKWNDDNYRYPLRVTVEPAHKPRLSVSRKDRTEVYSKAYGSPMTINVEDFLYAGNDEVIIEIANDGIGSLDYVIEGAQEYKWLNISSIQGTVESQEEITLSCNRQWLTNNIQSARLLIKDKETVVAVDIKAQELCYRRFTLVPI

SEQ ID NO: 53079 - DNA, 561 bp, Unknown
  Obtained from environmental sample
  misc_feature (1)..(561): n is a, c, g, or t
atgatagtaatgaaattcggaggaagctccgtagcggacgcggtaaggctccgtcatgtagcggagattgtcaaactttacattaagaataaacccgctttggttttgtcggcaatgggtgacacaaccgatcatcttcttgacgcgggggacatggcgcttaaacagggaaaggtcgatataaaaaacgtcgaaaagctgcaccttgcgacaattaaaacattgaagctgccgattcaaaaagaaattaaagtcctatttgacgagcttacccgtctgctttccggcatcgctctgattcgggaacttactcccagaacaaaggattaccttgtatccttcggcgagcggctttccgtgcgtattgcggcttcttattttcaatccattaaaataaacgcaaaagcctttgacgcgtttgacgtgggatttgtttccacttctgattacaccaaagcagagctcgcgaaagaatcctgggatttaataccgcagaaagttctgccgcttgtaaaaggaaacgtgtgtccccgttataaccggctttatcgcgaaagatga

SEQ ID NO: 53080 - protein, 186 aa, Unknown
  Obtained from environmental sample
  misc_feature (1)..(186): Xaa is any amino acid
MIVMKFGGSSVADAVRLRHVAEIVKLYIKNKPALVLSAMGDTTDHLLDAGDMALKQGKVDIKNVEKLHLATIKTLKLPIQKEIKVLFDELTRLLSGIALIRELTPRTKDYLVSFGERLSVRIAASYFQSIKINAKAFDAFDVGFVSTSDYTKAELAKESWDLIPQKVLPLVKGNVCPRYNRLYRER

SEQ ID NO: 53081 - DNA, 2637 bp, Unknown
  Obtained from environmental sample
  misc_feature (1)..(2637): n is a, c, g, or t
gtgtcagttatggtaactgatctggaaattttggaaaaagcgcttgcccgtattcgagaagcccaaaaagtcttcgccgcgttcagtcaggagcaagtagacaaaattttctttgccgcggccagggctgccgcaaaggaacgcatcccgctggcaaaaatggcggtagcggaaaccggcatgggcgtagtcgaggacaaagtgattaaaaaccactacgcctcggagtacatctacaacgcctacaaagacgaaaaaacctgcggcgttatcgaggacgatcccgtctccggtatcacccgtatagccgaacccattggcctggtagcggcggtcatacccaccaccaaccccacctctacggcgatattcaaggcattgatttgcctgaaaacccgcaacgggattatcatctcgccgcacccgcgcgccaaaggctgtacctgcgctgccgccaaaatcgtgctggacgccgcggacgccgcgggcgcgcctgagggaattatcggctggatagacgaaccgagccttgaaatgaccaacatggtgatgaaagaggcggacatcatccttgccaccggcgggccgggcatggttaaatcggcctattcttccggcaagcccgctatcggcgtggggtcgggcaatacgcccgccatcatcgacgacagcgcggatatacttctcgccgtcaactcaatcatccactcaaaaacttttgacaacggtatgatttgcgcgtccgagcagtcggtaattgccctgcagggcgtctacgataaagtgaaagccgaattcatcaaccggggctgttacttcctcaacccggaagaaaccgaaaaggtgcgcaaaacgattatcgtcaagggtgccctgaacgcgaaaatcgtcgggcaaaaggcggcgaagatcgcggagcttgcgggcgtgaaggttcccgaagaaacgaagatcataatcggcgaagtggaaagcgtagatctgtcggaagaattcgcccacgaaaaactctccccggtgctgggcatgtataaggcgaaggatttcgatgaagcgctggacaaagccgatcatctggtaaaagacggaggctacggccacaccgccagcttgtaccttaacccgcaaacctgcgcggacaaactcgccgcctttagcgcccgcatgaagacctgccgcattttgcttaatacgccctcggcgcacggaggcatcggcgacctgtacaacttccgcctgaagccttcgctcaccctgggctgcggcagttggggcggcaattcagtttcggagaatgtcggcgtcaaacacctgttaaatatcaaaacactggcggcaaggagggaaaatatgctgtggttccgcgctcccgaaaaggtatatatcaaacggggctgcctccccgtggctctggatgagctcaaaaccgtgatgggaaaaaagcgggcgttcatcgttaccgacaccttcctctacgaaaacggctacaccaaatgcatcaccgacaagctggacagcatgggcatagtccatgatacgttctttgacgtcgcccccgacccgacattaggctgcgccaagagaggtgcggggctggttaccgctttcaagcccgatgttatcatcgcgcttggcggcggctcggctatggatgcgggcaaaatcatgtgggtactctacgaacacccggaagcggattttgaggatatggccatgcgctttgccgatatccgcaagcgggtctacaccttcccaaaaatgggagaaaaggcctactttatcgccatacctacctccgccggaacaggaagcgaggtaacgccgtttgccgtcatcaccgacgaaaccaagggcatgaagtacccgctggcggattatcaactgatgcccaacatggcgatagttgacgcggacgtgcagatgaacgcgcccaagggacttaccagcgcttcaggcattgacgcgttgacccacgccctggaagcctacgcctcgatcatggccactgactttaccgacggccttgcgatacaggccatcaagatggtttttgaatggctgcccaaggcttacaacgaaggcgcggcgaatccggttgcgcgggaaaagatggccaacgccgccaccatagcgggtatggctttcgccaacgctttcctcggtgtctgccactcaatggcgcacaagctcggcgcgttccaccacataccccatggcgtcgccaacgccctgatgatcagcgaagtgctccgctacaacgccgtcgaggttccgcccaagatgggaaccttcccgcaatacgatcatcccaagaccctttcccgttacgcggaaatcgcggacgccatggatttcgccggtaaaaacgacgaggaaaaacttgaaagcctgatcgccgccgtggaatggcttaaagatcagatagggatcaagaagaccatcaaggattacaacattgatgaaaaagattttcttgcccgtcttgacgagatgagcgaacaggcttttgacgatcagtgcaccggcgctaatccccggtaccccctgatcgaggaaatcaaacagatgtatctcaacgcttactatggcaagaatattcatctgggcggttccgacggaaagaaggagcggacgtaa

SEQ ID NO: 53082 - protein, 878 aa, Unknown
  Obtained from environmental sample
  DOMAIN (3)...(444): Aldehyde dehydrogenase family
  misc_feature (1)..(878): Xaa is any amino acid
MSVMVTDLEILEKALARIREAQKVFAAFSQEQVDKIFFAAARAAAKERIPLAKMAVAETGMGVVEDKVIKNHYASEYIYNAYKDEKTCGVIEDDPVSGITRIAEPIGLVAAVIPTTNPTSTAIFKALICLKTRNGIIISPHPRAKGCTCAAAKIVLDAADAAGAPEGIIGWIDEPSLEMTNMVMKEADIILATGGPGMVKSAYSSGKPAIGVGSGNTPAIIDDSADILLAVNSIIHSKTFDNGMICASEQSVIALQGVYDKVKAEFINRGCYFLNPEETEKVRKTIIVKGALNAKIVGQKAAKIAELAGVKVPEETKIIIGEVESVDLSEEFAHEKLSPVLGMYKAKDFDEALDKADHLVKDGGYGHTASLYLNPQTCADKLAAFSARMKTCRILLNTPSAHGGIGDLYNFRLKPSLTLGCGSWGGNSVSENVGVKHLLNIKTLAARRENMLWFRAPEKVYIKRGCLPVALDELKTVMGKKRAFIVTDTFLYENGYTKCITDKLDSMGIVHDTFFDVAPDPTLGCAKRGAGLVTAFKPDVIIALGGGSAMDAGKIMWVLYEHPEADFEDMAMRFADIRKRVYTFPKMGEKAYFIAIPTSAGTGSEVTPFAVITDETKGMKYPLADYQLMPNMAIVDADVQMNAPKGLTSASGIDALTHALEAYASIMATDFTDGLAIQAIKMVFEWLPKAYNEGAANPVAREKMANAATIAGMAFANAFLGVCHSMAHKLGAFHHIPHGVANALMISEVLRYNAVEVPPKMGTFPQYDHPKTLSRYAEIADAMDFAGKNDEEKLESLIAAVEWLKDQIGIKKTIKDYNIDEKDFLARLDEMSEQAFDDQCTGANPRYPLIEEIKQMYLNAYYGKNIHLGGSDGKKERT

SEQ ID NO: 53083 - DNA, 1029 bp, Unknown
  Obtained from environmental sample
  misc_feature (1)..(1029): n is a, c, g, or t
gtgtttgcgcttgcgttcgcgctctgcgcgttatttacgcttgtaggatgcgcaaaaaaacaacggttgtatatttacaactggacttactacactccggattccgttatcgaaaaattcgaaaaggaatacaaagtcaaggtcttctacgatgagtttgcgtctaacgaagacatgttcgcgaaactcaaggcgggcggcagcggatacgacattgtttttccgtcggcggattatgtttcgattatgattcagcagaatatgcttgaaaaaatcgacaaaacaaaaatccccaatcttaaaaacgtggacccggccgttttaaggcaggcggactatgatccggacatgaactattcggttccgtattatttcggagcggcgggaattgccgtaaacactaactttgtaaaagactttaagcaaagctggtccatcttctcaagggaagatttaaaggggcgcatgacaatgctggatgacatgagggaagtaatgggcgacgcccttgcgtacctgggttattctgttaacacgacagacccggcgaaagtggaagaagcaagaaggcttatcaactattcatggaaacccaaccttgtcaaattcgacgccgaagcgttcggaaaaggctatgccaacggagatttttgggtggtgcagggttatcccgaagtcgtatttgaagaaatcgcggataacgaaaaaatgatggccaatacggttttctttattccttccgaaggggggccggcgtacattgacagcatgtgtatcttaaaaggctcaaagaatattgacgttgcgcacaattttatagactttatccacagacctgaaatttacgccgagtttgccgacatcttcggatttccggcgacagcgaatatccccgcgcgcaaatttaaaaccggaaattcatggtacacggaaacggaacttgagaatgtagaagtcaaaaaagatatcggagacaaattggagctctataacgacgcttggtttaattcgataagaattgacaaataa

SEQ ID NO: 53084 - protein, 342 aa, Unknown
  Obtained from environmental sample
  SIGNAL (1)...(18)
  misc_feature (1)..(342): Xaa is any amino acid
MFALAFALCALFTLVGCAKKQRLYIYNWTYYTPDSVIEKFEKEYKVKVFYDEFASNEDMFAKLKAGGSGYDIVFPSADYVSIMIQQNMLEKIDKTKIPNLKNVDPAVLRQADYDPDMNYSVPYYFGAAGIAVNTNFVKDFKQSWSIFSREDLKGRMTMLDDMREVMGDALAYLGYSVNTTDPAKVEEARRLINYSWKPNLVKFDAEAFGKGYANGDFWVVQGYPEVVFEEIADNEKMMANTVFFIPSEGGPAYIDSMCILKGSKNIDVAHNFIDFIHRPEIYAEFADIFGFPATANIPARKFKTGNSWYTETELENVEVKKDIGDKLELYNDAWFNSIRIDK

SEQ ID NO: 53085 - DNA, 453 bp, Unknown
  Obtained from environmental sample
  misc_feature (1)..(453): n is a, c, g, or t
ttgagaaaaaaattcagctatattgttttagcggcggcgcttataatgcccgccgttgtttcgtgcagttttttaggaaaacagaagttgtatatttacaactggacgtattatacgccggattccattattcaaaaatttgaaagtgaatttaataccagaataatttacgacgaatttgcctctaacgaggacatgttcgccaaattaaaatccagcagatccaagcggggcagttacgacattgtgttcccgtccaaggattttgtgccgattatgatcaggcaaaacatgctggaaagaatcgacaagacaaaaataccgaacttaaaaaacattgatcctgatcttttaaaaagagccaattatgatccgaacatggaatactccgttccatatttctacggggcagccggcataatagttaataccgcaaaagttccccgtttatga

SEQ ID NO: 53086 - protein, 150 aa, Unknown
  Obtained from environmental sample
  SIGNAL (1)...(21)
  misc_feature (1)..(150): Xaa is any amino acid
MRKKFSYIVLAAALIMPAVVSCSFLGKQKLYIYNWTYYTPDSIIQKFESEFNTRIIYDEFASNEDMFAKLKSSRSKRGSYDIVFPSKDFVPIMIRQNMLERIDKTKIPNLKNIDPDLLKRANYDPNMEYSVPYFYGAAGIIVNTAKVPRL

SEQ ID NO: 53087 - DNA, 579 bp, Unknown
  Obtained from environmental sample
  misc_feature (1)..(579): n is a, c, g, or t
atgagcatgccatttttaacaaaaacaacattcaaggagaaaataatgaaaaaatcaatattaattttatttacgcttgccgtttttcttttcggaataagcggctgcaagaaaaacaaaaataccgttacgcgcaatgctgacggcaaactcatcgttacggcgacaaattttccgccgttcgattttgtaaggcagatagcgaaagacaaggtaaacttaaaccttcttctgccgccgggggcggaaagccattcttttgaaccttccccgcgggatataatcacggtacagaactcaaggctttttatctatgtcggcggagaaagcgacacatgggtagacaggatacttgagaccatggacacgtcaaaaatgataatcataaaaatgctggacacggttgacgccgttgaggaagaaatcgttgagggcatggaggcggaggatgaagaagaaggagaagaaacagcctacgacgagcatgtctggacttctccccaaaacgcgattctgattgtaaaggcgataaatacggcgctttgcgagccgatcccgccacgccgatttttaccgtaa

SEQ ID NO: 53088 - protein, 192 aa, Unknown
  Obtained from environmental sample
  DOMAIN (24)...(192): Periplasmic solute binding protein family
  misc_feature (1)..(192): Xaa is any amino acid
MSMPFLTKTTFKEKIMKKSILILFTLAVFLFGISGCKKNKNTVTRNADGKLIVTATNFPPFDFVRQIAKDKVNLNLLLPPGAESHSFEPSPRDIITVQNSRLFIYVGGESDTWVDRILETMDTSKMIIIKMLDTVDAVEEEIVEGMEAEDEEEGEETAYDEHVWTSPQNAILIVKAINTALCEPIPPRRFLP

SEQ ID NO: 53089 - DNA, 714 bp, Unknown
  Obtained from environmental sample
  misc_feature (1)..(714): n is a, c, g, or t
atgctgatagactgtcaaaacctttctttcgggtatgacggacatattgtcgtctccggtctgaacttttcggtacaggccggggattttcttcttattgccggagaaaacggatcaggaaaatccactcttgtaaaaggcttgctgcgtatcctatcccctatggaagggacaataacctttaatactgattacaagcagtctgaaacaggctatctttcccaacaaacggccgcaaaacaggattttccggcaggggtttttgaaatagtattgtcgggaaatctgggaaagaaagggttttggcccttatacacccattccgaaaaacaaaaggcggaagaaaaactgcgcttgcttgacattgaggatttaaaggacaggtgtttccgggaactttcaggcggacagcaaaggcgcgtcctgcttgcgcgttccctttgcgcggcggagaaactcattgtgctggacgaaccctntgcgggattggacccgctgataagcgcggatctgtaccgtcttctcgcgcaaatcaaccgtgaaatggacatgactataataatggcttcccacgacattgaagccgcttcctgcgcgacaaaggtattacatttacaaaggcagcagctttttttcggcagtatggaagaataccttggttcggaaattggtaaaaatttttttgtgaaaaaggaggcagcctccaatgcttga

SEQ ID NO: 53090 - protein, 237 aa, Unknown
  Obtained from environmental sample
  DOMAIN (28)...(208): ABC transporter
  misc_feature (1)..(237): Xaa is any amino acid
MLIDCQNLSFGYDGHIVVSGLNFSVQAGDFLLIAGENGSGKSTLVKGLLRILSPMEGTITFNTDYKQSETGYLSQQTAAKQDFPAGVFEIVLSGNLGKKGFWPLYTHSEKQKAEEKLRLLDIEDLKDRCFRELSGGQQRRVLLARSLCAAEKLIVLDEPXAGLDPLISADLYRLLAQINREMDMTIIMASHDIEAASCATKVLHLQRQQLFFGSMEEYLGSEIGKNFFVKKEAASNA

SEQ ID NO: 53091 - DNA, 630 bp, Unknown
  Obtained from environmental sample
  misc_feature (1)..(630): n is a, c, g, or t
atgcttgatacaatcattgaaatgttttcatttccgtttctggtcagagccttcattgtcggcgcgcttgtctcgatttgcgcctctctgcttgggataagccttgtgctgaaacgctattcgatgatcggcgacggcctttcccacgtgggctttttttcccttgccctcgccaccgccctgaacacagctcctttatacgtcgccatcccgatagttgtcgccgccgctttcttgctcctgcgcatgagcgaaaacagcaagataaagggagacgccgcagtcgccctgatttccaccggctccctcgccgtgggcgtgattatcatatcacggtcaacgggcatgaacaccgatgtttgcaattatcttttcggcagtattctctctatgaaaaaatccgacgtgtacctgagcgtcggcctttcgattaccgtactgttcctctttatactgttttacaataaattgttcgccgtaacctttgacgagaccttcgcgaaagccagcggaataaaaaccggactgtacaatatgctcatcgcccttttgaccgccctgaccatcgtgcttggcatgcggattatgggcgccgtgctgatttcaagcctgattattttccccgcttaa

SEQ ID NO: 53092 - protein, 209 aa, Unknown
  Obtained from environmental sample
  DOMAIN (10)...(209): ABC 3 transport family
  misc_feature (1)..(209): Xaa is any amino acid
MLDTIIEMFSFPFLVRAFIVGALVSICASLLGISLVLKRYSMIGDGLSHVGFFSLALATALNTAPLYVAIPIVVAAAFLLLRMSENSKIKGDAAVALISTGSLAVGVIIISRSTGMNTDVCNYLFGSILSMKKSDVYLSVGLSITVLFLFILFYNKLFAVTFDETFAKASGIKTGLYNMLIALLTALTIVLGMRIMGAVLISSLIIFPA

SEQ ID NO: 53093 - DNA, 807 bp, Unknown
  Obtained from environmental sample
  misc_feature (1)..(807): n is a, c, g, or t
atgatcagatcggccgagtcggagaccggcatgggcgtggtcgaggacaaggtcatcaaaaaccactacgcatcggagtacatatacaatcagtataggtacgaaaagacctgcggcgttatcgaggaagatccggttggcggcctaacccgtatcgccgagcctataggcctcgtggcggcggtcatcccgaccaccaaccccacatccacggcgattttcaagtcgctgatctgcctcaaaacccgcaacggcatcataatctcgccgcacccgcgcgccaagggcagcacctgcgcggcggccaaggtcgtgctggacgcggcggtcgccgccggagcgccggcggggataatcgggtggatagacgagccgagcctcgaaatgaccaacacggtgatgaaagaggccgacatcatcctcgccacgggcggaccggccatggtcaagtcggcctactcctccggcaagccggcagtaggcgtggggtcgggcaacgtccccgccataatcgacgacagcgcggacatcatcctcgcggtgaactcgatcatccactctaaaactttcgacaacggaatgatatgcgcctccgagcagtcggtaatcgccctgcaaagcatctacgacaaggtgaaagccgagttcaaacgacggggctgctacttcctgaacgcggaagagacagaaaaggtgcggaaggcgattatcgtcaaaggggcgctgaacgctaagatcgtanggcagaaggcggcgaagatcgcggagatcgccggcgtgaccgttccggaagaacgaagatcataa

SEQ ID NO: 53094 - protein, 268 aa, Unknown
  Obtained from environmental sample
  misc_feature (1)..(268): Xaa is any amino acid
MIRSAESETGMGVVEDKVIKNHYASEYIYNQYRYEKTCGVIEEDPVGGLTRIAEPIGLVAAVIPTTNPTSTAIFKSLICLKTRNGIIISPHPRAKGSTCAAAKVVLDAAVAAGAPAGIIGWIDEPSLEMTNTVMKEADIILATGGPAMVKSAYSSGKPAVGVGSGNVPAIIDDSADIILAVNSIIHSKTFDNGMICASEQSVIALQSIYDKVKAEFKRRGCYFLNAEETEKVRKAIIVKGALNAKIVXQKAAKIAEIAGVTVPEERRS

SEQ ID NO: 53095 - DNA, 1641 bp, Unknown
  Obtained from environmental sample
  misc_feature (1)..(1641): n is a, c, g, or t
gtggaaagtgtggagctctcggaagaattcgcccacgaaaagctttccccggtgctgggcatgtacaaggcgaaggattttaacgacgcgctggacaaggccgatcaactggtaaaagacggcggctacggccacaccgcaagcgtataccttaacccgcaaacgggcgcggacaaacttgctacctttagcgagcgcatgaagacctgccgcatcttgctcaacacgccatcggcgcatggcggcatcggcgacttgtacaacttccgcctgaagccctcgctcaccctgggctgcggcagttggggcggcaattcggtttcggagaacgtcggcgtcaaacacctgctaaatatcaaaacactggcggcaaggagggaaaatatgctgtggttccgcgctcccgaaaaggtatatatcaaacggggttgcctccccgtggctcttgatgagctaaagaccgttatgggaaaaaagcgggcgttcatcgttaccgacactttcctctaccaaaacggctacaccaaatgtatcaccgacaagctggacagcatgggcatagtccatgaaacgttctttgacgttgctcccgacccgactttaggctgtgccaagagaggcgcggcactggtaaccgctttcaaccccgatgtcatcatcgcgctgggcggcggctcggcaatggacgcgggcaagatcatgtgggtgctatacgaacacccggaagcggattttgaggatatggccatgcgctttgccgacattcgcaaaagaacgtataccttccccaaaatgggagagaaggcatactttatcgcaatacccacctcagccggaacgggcagcgaagtaacgccctttgccgtcatcaccgatgaaaccaaaggcatgaagtatccgctggcggattatgagttgttacctgacatggcgattgtggacgctgacgtgcagatgaacgcgcccaaaggactcaccagcgcgtccggtatcgacgcggtaacccacgcgctggaagcttacgcctcagtcatggcgacagattacaccgacggtctggcgatacaggcgctcaaggtgattttcgagtggctgcctgccgcctacaacgaaggcgcggcaaatccaacagcccgtgaaaagatggcaaatgccgctaccatcgcgggcatggcatttgccaacgcattcctcggcgtgtgccactcaatggcgcacaaactcggcgcgttccaccacctgccccacggtgtcgccaacgcgctgatgatcagcgaagtgcttcgctacaacgcctgcgaagttccgccgaagatgggttccttccctcaatatgatcatcccaaaacattattccgttacgcgcaaattgcggacgcgctggctctcggcggctcaagcgatgaggaaaaacttgaaaaattgatcgccgccgtggaaaagctgaaagagcagatagggatcaaaaagacaatcagggattacggcattgatgaaaaagattttcttgcccgtcttgacgacatgagcgaacaggcatttgacgatcaatgtaccggcgcgaatccccggtatcccttaatcgaggaaatcaaaaagatgtacctcaatgtttactacggaaagaaggagagggtgtaa

SEQ ID NO: 53096 - protein, 546 aa, Unknown
  Obtained from environmental sample
  DOMAIN (135)...(531): Iron-containing alcohol dehydrogenase
  misc_feature (1)..(546): Xaa is any amino acid
MESVELSEEFAHEKLSPVLGMYKAKDFNDALDKADQLVKDGGYGHTASVYLNPQTGADKLATFSERMKTCRILLNTPSAHGGIGDLYNFRLKPSLTLGCGSWGGNSVSENVGVKHLLNIKTLAARRENMLWFRAPEKVYIKRGCLPVALDELKTVMGKKRAFIVTDTFLYQNGYTKCITDKLDSMGIVHETFFDVAPDPTLGCAKRGAALVTAFNPDVIIALGGGSAMDAGKIMWVLYEHPEADFEDMAMRFADIRKRTYTFPKMGEKAYFIAIPTSAGTGSEVTPFAVITDETKGMKYPLADYELLPDMAIVDADVQMNAPKGLTSASGIDAVTHALEAYASVMATDYTDGLAIQALKVIFEWLPAAYNEGAANPTAREKMANAATIAGMAFANAFLGVCHSMAHKLGAFHHLPHGVANALMISEVLRYNACEVPPKMGSFPQYDHPKTLFRYAQIADALALGGSSDEEKLEKLIAAVEKLKEQIGIKKTIRDYGIDEKDFLARLDDMSEQAFDDQCTGANPRYPLIEEIKKMYLNVYYGKKERV

SEQ ID NO: 53097 - DNA, 648 bp, Unknown
  Obtained from environmental sample
  misc_feature (1)..(648): n is a, c, g, or t
atgactgacgtatacagacaattcggtcttacggaggcggaaatagaccttatcgcatcagctaccatgaaaagggattatttctatacaagccccatggggcgaaggctcttccaactcgatcttggccgactgacgctcgcgctcatcggatcgccgaaccacgcccttcttgatgagcttgcggccaggtatgaaccaggcagcccgttatgcgctgaaattcttgccgccaaaaatattaattataaaagatatcttggcgaagactcccctattgatccggcgccggtactcaggcaagcgcagattctaagttattccgcgccggcactgccggaagaacaaacagaggccgttttggaggaagttataacggttgacaaatcagacaaaaacgccgattttcttgatgccgtcgccgctctgccggaacgcaagaaaaatgacgggcaaggacgcgccgccactgccattgcggaaaaattcggcgttagtacgtccaccgtttatcaggcgcgtaccgtccttaaatacgggcttcctgaacttgtagacgctttgcgccggggagatattcctgtaaaaactgcctataagaaaatgcttaaagaacgcggccgcgaacctgaaaaggttgccggataa

SEQ ID NO: 53098 - protein, 215 aa, Unknown
  Obtained from environmental sample
  misc_feature (1)..(215): Xaa is any amino acid
MTDVYRQFGLTEAEIDLIASATMKRDYFYTSPMGRRLFQLDLGRLTLALIGSPNHALLDELAARYEPGSPLCAEILAAKNINYKRYLGEDSPIDPAPVLRQAQILSYSAPALPEEQTEAVLEEVITVDKSDKNADFLDAVAALPERKKNDGQGRAATAIAEKFGVSTSTVYQARTVLKYGLPELVDALRRGDIPVKTAYKKMLKERGREPEKVAG

SEQ ID NO: 53099 - DNA, 903 bp, Unknown
  Obtained from environmental sample
  misc_feature (1)..(903): n is a, c, g, or t
gtgatggccgagtcggcagaacatcaacagttcgacgtaagttcggcaatttcatcatttgaaatactccaaaaaatattaccatcggcgcagaactacaatggaaaagtgtcggcaagcctgacattgaacagcgttcttgacgaacatatgagcccccttatgaatacggtggcttccaaaggccaactgcagacgcataacctgagcatacaaaattcagaactgttcggcacaatggcaaaactgttaaataacgaggcgtggcgcacgcccactctgaacaatgttaatatcaaatacgaaatcaaggatggagaactgacgattgacccgatacggatgaacgttgcgcagaccgcgctagagatcaccggcggacagaaccttgatatgacattgaaatacaagataagcgcgacagtacccgcttcggtagtcggttccggcgcgaccgatattttaagcaaattgcccgcaggcataaaagtcaatgaattcaaattgacgggattggtaggaggcacggttaccaaacctgtcgtaactcttggcgtagccgatatgacaaccagcgttgtcacagccgttaaggaacaaattaaaggagaggttggcaaacaagtggataacatcatggctgaggcggaaaaacaagctcaaaacctccgtaacgcggccaaacaagccgccgacaaagtgcgtaaagaagctaacgccgccgccgataaattggaagcgcaggctaaatcgccaattgaaaaaaccgcggctaaagtggcggcaaaaaaacttcgcgacgagggcaatgataaggcgaaaaaattggagcaggatgctgagaagcaaattaagactcttatggataacgccaaaaagaaagccgacgaggcgaaaaaataa

SEQ ID NO: 53100 - protein, 300 aa, Unknown
  Obtained from environmental sample
  misc_feature (1)..(300): Xaa is any amino acid
MMAESAEHQQFDVSSAISSFEILQKILPSAQNYNGKVSASLTLNSVLDEHMSPLMNTVASKGQLQTHNLSIQNSELFGTMAKLLNNEAWRTPTLNNVNIKYEIKDGELTIDPIRMNVAQTALEITGGQNLDMTLKYKISATVPASVVGSGATDILSKLPAGIKVNEFKLTGLVGGTVTKPVVTLGVADMTTSVVTAVKEQIKGEVGKQVDNIMAEAEKQAQNLRNAAKQAADKVRKEANAAADKLEAQAKSPIEKTAAKVAAKKLRDEGNDKAKKLEQDAEKQIKTLMDNAKKKADEAKK

SEQ ID NO: 53101 - DNA, 651 bp, Unknown
  Obtained from environmental sample
  misc_feature (1)..(651): n is a, c, g, or t
gtgaaacaaatctttttagataaacgcagaaaaacttttttttcccatttattattatcaggcaaaaccctgttgcagcgtctgattattaccctgcaattctttaatgaaaacagtctggcaaaccatgcgtccgcctgcgcttacggttttttgctctcagccgcccccgtattgatgctgttgtcctttcttcttttttccgcgtttcactcattgataagcggcgcaaataacttgggagaagctgttcttgtgcaattagcggcaaatattcccttcttaaacggcgtactggacgaaacatggctcgcggaggaattgtcctccattgctgaaagcggtatgcgccttcgcggaacagccggccttgtttcggcaatcgtaattttctggtcaggcagaatatttattctttccttacagcgtggtttaaaggttatttttacaggtacgcaaaaacggaatcccatacatgaaatattaattgtccttattgtggaattggctgtgttatcaggcgcaatactgatgattttcttttccataacagcccgtaaaatttataaatttttcgatcttttttccagcacgacttttttctccatatacaatcccctcataatatccgtctttgtccttttttcctga

SEQ ID NO: 53102 - protein, 216 aa, Unknown
  Obtained from environmental sample
  misc_feature (1)..(216): Xaa is any amino acid
MKQIFLDKRRKTFFSHLLLSGKTLLQRLIITLQFFNENSLANHASACAYGFLLSAAPVLMLLSFLLFSAFHSLISGANNLGEAVLVQLAANIPFLNGVLDETWLAEELSSIAESGMRLRGTAGLVSAIVIFWSGRIFILSLQRGLKVIFTGTQKRNPIHEILIVLIVELAVLSGAILMIFFSITARKIYKFFDLFSSTTFFSIYNPLIISVFVLFS

SEQ ID NO: 53103 - DNA, 402 bp, Unknown
  Obtained from environmental sample
  misc_feature (1)..(402): n is a, c, g, or t
atgacagaatcggcacgagacatgttcttcggtcagaatattaacccgataagcggtcagtattatattcataaaggaattgatattgcgacttaccgcgcgggcgatccgattgtagcgactgcggacggacaggtagtaaccgctgaatacacttatgacttcggatattatgtaatcatcaggcataaacacggttattatacccgttatgcgcatatgcagaggtacaatgtaagcgtcggtcagcttgttcagcagaatgaagtaatcggctatatcggaaataccggtatttctacaggtcctcaccttcattatgaagttcatgtcggttctgatgttgtggatccttacagatacattacgattcgttccagtatagccagacaagggcgctga

SEQ ID NO: 53104 - protein, 133 aa, Unknown
  Obtained from environmental sample
  DOMAIN (22)...(118): Peptidase family M23
  misc_feature (1)..(133): Xaa is any amino acid
MTESARDMFFGQNINPISGQYYIHKGIDIATYRAGDPIVATADGQVVTAEYTYDFGYYVIIRHKHGYYTRYAHMQRYNVSVGQLVQQNEVIGYIGNTGISTGPHLHYEVHVGSDVVDPYRYITIRSSIARQGR

SEQ ID NO: 53105 - DNA, 420 bp, Unknown
  Obtained from environmental sample
  misc_feature (1)..(420): n is a, c, g, or t
atgtctcaggataaaatcaacgatttttcaattaacacgattatcggtcccaatactgatattaacggcgatattagaaccggcggctttacacgtatagacggcagcattcgcggaaatgtacgggcaaaggggagagtagtaatcggtgaacgtgcgcgcataaaaggcaatgtaacaggtacaaatataacaatcggcggggtggtatgcggtaatataatcgcggacggataccttgttattctttcaactgctgtagtaatcggcgatattattacccggagaattcaagcggatgacggctgctttataaacggaagagtggctgtatgcgtcgattccgaaaattggaaaaaaactacatccgagtacaaagatgcgcagggaataaaatctaccttgcctgttttcaattaa

SEQ ID NO: 53106 - protein, 139 aa, Unknown
  Obtained from environmental sample
  DOMAIN (3)...(115): Protein of unknown function, DUF583
  misc_feature (1)..(139): Xaa is any amino acid
MSQDKINDFSINTIIGPNTDINGDIRTGGFTRIDGSIRGNVRAKGRVVIGERARIKGNVTGTNITIGGVVCGNIIADGYLVILSTAVVIGDIITRRIQADDGCFINGRVAVCVDSENWKKTTSEYKDAQGIKSTLPVFN

SEQ ID NO: 53107 - DNA, 792 bp, Unknown
  Obtained from environmental sample
  misc_feature (1)..(792): n is a, c, g, or t
gtgtttatccgctttgaccctccctggtactccgaagggcccgggacgccgccccccgaacttggttctccctttgtccgggccgcggcggatatccaggctccggatacggcgcttgttaatcttgagggaacctgggacgccgttctgggaaagatgaaaaacaaatggcgttataacagcaggctggccctaaaacggggagttgttatccggcggcctgatgaaaaagggctggatattttctattccctcttaaaggaaactgcccggcgggatcacatctctattcaccaaaaagaatattacaaaacccttttttcccattgccgggaataccaggaaaaacttaataatcccgctaatgtgcctgccgttcacctctataccgctgaccatgaaggagaaaccctggcagccatagtggttcttttccggggtaaagagggaatttatctctacggtgcgtcttcaaacaacaaacggaacctcatggcgccctatgcgctccaggtacgggccatggaagatgccaagaaaatgggctgcgttgaatacgatcttttcggcatccccccaaacgaagatccttcccatcccatggcagggctttacaggttcaaaaccggttttggcggccgcatcattcatcggcctggaagctgggactattcttataggaattttgccatgaaactgttctattttctggaatctctgcgcaaaaaataccgggatcgaaaaaaacgcgcgccaaaagaggatatagtaaaggaaacccgtgacgcctaa

SEQ ID NO: 53108 - protein, 263 aa, Unknown
  Obtained from environmental sample
  DOMAIN (1)...(239): FemAB family
  misc_feature (1)..(263): Xaa is any amino acid
MFIRFDPPWYSEGPGTPPPELGSPFVRAAADIQAPDTALVNLEGTWDAVLGKMKNKWRYNSRLALKRGVVIRRPDEKGLDIFYSLLKETARRDHISIHQKEYYKTLFSHCREYQEKLNNPANVPAVHLYTADHEGETLAAIVVLFRGKEGIYLYGASSNNKRNLMAPYALQVRAMEDAKKMGCVEYDLFGIPPNEDPSHPMAGLYRFKTGFGGRIIHRPGSWDYSYRNFAMKLFYFLESLRKKYRDRKKRAPKEDIVKETRDA

SEQ ID NO: 53109 - DNA, 444 bp, Unknown
  Obtained from environmental sample
  misc_feature (1)..(444): n is a, c, g, or t
atgatgttcgaaccgcttaaagggcgcggggaagtcaatgtaaccgaacggcgcaccgcaaatgactttgcccattgtttgcgggacttggctgaaatacactatccccacgctgaaaaaatagtacttgtgacggacaatcttaatacccgcacccttgcttcactatacgccgcatttgaaccggaagttgcgttacctttggccccacgttttgaaatccgttacacccccacacacggttcccggcttaatatggcagagttagaaataggggtaatgagtcggcagtgtcttgggcggaggataccctcaattgaggagacggccggtgaagtccaatcttgggttacccaacggaacaataataaaaccacggttcaccggcagttcaccaccgctgatgcaaggataaagctccaacatttgtatccacgtatttag

SEQ ID NO: 53110 - protein, 147 aa, Unknown
  Obtained from environmental sample
  misc_feature (1)..(147): Xaa is any amino acid
MMFEPLKGRGEVNVTERRTANDFAHCLRDLAEIHYPHAEKIVLVTDNLNTRTLASLYAAFEPEVALPLAPRFEIRYTPTHGSRLNMAELEIGVMSRQCLGRRIPSIEETAGEVQSWVTQRNNNKTTVHRQFTTADARIKLQHLYPRI

SEQ ID NO: 53111 - DNA, 369 bp, Unknown
  Obtained from environmental sample
  misc_feature (1)..(369): n is a, c, g, or t
atgatttttgtaaaagaaagcggacagaaacctgcaaattttggcaagcgtagacgattacgttataagggggaatgtttggaaacttatttgagcattgaggggctggccaagtatttgggcatagcggaaaagacagtcagaaagtgggtgcttaaccatgacattccctaccacaagattatgaaaataatccgctttcgtgtttccgagattgagcaatggattgagaccaacggcaaaaacccccagggcaatgaaggcgaagaacaggacggagatttgtttgcggaagatgaggccggaaatgacagggaaggggaagatgaaaaggaaattgaggctgaggaaaccgggggcgttgtatga

SEQ ID NO: 53112 - protein, 122 aa, Unknown
  Obtained from environmental sample
  misc_feature (1)..(122): Xaa is any amino acid
MIFVKESGQKPANFGKRRRLRYKGECLETYLSIEGLAKYLGIAEKTVRKWVLNHDIPYHKIMKIIRFRVSEIEQWIETNGKNPQGNEGEEQDGDLFAEDEAGNDREGEDEKEIEAEETGGVV

SEQ ID NO: 53113 - DNA, 1122 bp, Unknown
  Obtained from environmental sample
  misc_feature (1)..(1122): n is a, c, g, or t
ttgacggacagttatattttgccgtggagatacgcacgagcgacggtacggttatcggcaattttgatggcgacgggcggcgttgttcggtctacgccgataacggttttgtgggtaagaccgcgtctaagtccaagttcaactcgccgctcagcaacgtcagcgcggttacgatcatgggcaagggcgatgagaagaagggcgacaagggggacgacgaggatgaatcagaggagtgagaggagacatacgccatccttgatatttgtcagcaggatggaggaggtgcagcggcatgagagcaggctctccttctccgtgatacttttcagcggttttttgtgcgctctattgatattggccgcctttttagccgtgcgctacatacacgtattcttcaatcccaccgtagagaatacggagcgtctcctctctatggggaagcccaaggaggcaatggcgctccttgataaaatggaaagaaactccggaggggatgttgacagccgaagcaatttgcttcgcggcaaggctctttacgcgatactcatggagaagttgcgtttggagaagtgggggagttacggcttgaaccccgacaattggcttgccgacccgcttgccgccgaggcggagcagtgcttcatagacgctatggcggcggcgccagacgatccggaaatacgcttggtgctcggcaacctatatagggagcaagggcgtttcagcgacgccgagcttatattccgctctatactcgaaattgatgatgaaaacgccgaggcctacttggccatcgggttgctctacgcggagggaggccacataaacgcggcggagagggcgctgacggccgcgtgggacttagacaggggaaacccgaaaatcgcgaagaatctggcctatttctacagattctacgccaacgaaccggaattgtctatcgagtggttcagccggtacctgcggagcgatcccagaagggatacggatataaacctcatacgtgcggagctttcggatttgattgagcgctatccggaatacgatggatataaggtagagactaacccaaacctaaatcgcggcgtaggcagaaagtttacggcgaggaatcggtag

SEQ ID NO: 53114 - protein, 373 aa, Unknown
  Obtained from environmental sample
  DOMAIN (226)...(259): Tetratricopeptide repeat
  misc_feature (1)..(373): Xaa is any amino acid
MTDSYILPWRYARATVRLSAILMATGGVVRSTPITVLWVRPRLSPSSTRRSATSARLRSWARAMRRRATRGTTRMNQRSERRHTPSLIFVSRMEEVQRHESRLSFSVILFSGFLCALLILAAFLAVRYIHVFFNPTVENTERLLSMGKPKEAMALLDKMERNSGGDVDSRSNLLRGKALYAILMEKLRLEKWGSYGLNPDNWLADPLAAEAEQCFIDAMAAAPDDPEIRLVLGNLYREQGRFSDAELIFRSILEIDDENAEAYLAIGLLYAEGGHINAAERALTAAWDLDRGNPKIAKNLAYFYRFYANEPELSIEWFSRYLRSDPRRDTDINLIRAELSDLIERYPEYDGYKVETNPNLNRGVGRKFTARNR

SEQ ID NO: 53115 - DNA, 759 bp, Unknown
  Obtained from environmental sample
  misc_feature (1)..(759): n is a, c, g, or t
ttggaaggcggggcgctgtttatcagccgtaatacttcagttttctcatggcttgaaagcgcctttattgattgcgggttttatgacgttattccaatatcgttggaaagggacgctcttaatttcaaactgaatgaaataaaacctaaatatgtttttataaatagcgaattttactcgtgcgtaacgccttttaagataggctcgcttcatgaagattttcccgatttaaatatcaacattgttaatttcggcaattttcccgacagtctcgcggtgcgcttcttttatcatggggctaaatcctatctcaatgttaatgacggcattaaagaatttaaaaacggtctaaaaacaattaaggcaggtgaaaattattattccccgggcgttgacaggtatataagagaattagatgatattaaaaatcttagaacatatacaactgaccgtgaatggcaggttttatttcttatctgtaacgggtataagaaagttgagattatggctgatcttgggattaaaaaaaggactgtagatactcatatttataatttaaagaaattgttttatgccagaaactgggtagatttatcaaataaagccgcctgtatgggttgggttaagaaagaagatttaggtattcaaaatattaaaataaaaacacctcaactccttttaaagaaaaaaagaaaaaaaataacccccgcgcgtggcgggggaattgttaaccaacgtaatctttcaaagtacggttaa

SEQ ID NO: 53116 - protein, 252 aa, Unknown
  Obtained from environmental sample
  DOMAIN (145)...(202): Bacterial regulatory proteins, luxR family
  misc_feature (1)..(252): Xaa is any amino acid
MEGGALFISRNTSVFSWLESAFIDCGFYDVIPISLERDALNFKLNEIKPKYVFINSEFYSCVTPFKIGSLHEDFPDLNINIVNFGNFPDSLAVRFFYHGAKSYLNVNDGIKEFKNGLKTIKAGENYYSPGVDRYIRELDDIKNLRTYTTDREWQVLFLICNGYKKVEIMADLGIKKRTVDTHIYNLKKLFYARNWVDLSNKAACMGWVKKEDLGIQNIKIKTPQLLLKKKRKKITPARGGGIVNQRNLSKYG

SEQ ID NO: 53117 - DNA, 498 bp, Unknown
  Obtained from environmental sample
  misc_feature (1)..(498): n is a, c, g, or t
ttggtcatctgtacggtgattggttttcccttggggtatacatatacttctgttaaggttaatgaaacaggcgtcgccctggaaaacggcgccggtgaaattgacatggtaataaacgcgggcgatgtgaaaaacggcaattacgatttggtgcttgatgaaataaaagccattaagaaagtatgcggggcacaaatcctcaaggttattattgagacttgttatctgaacgaagaagaaaaaatacgagcctgcactattgtcaccgaagcgggcgcggatttcattaagacctcgacgggcttcggaaccgcgggcgcgaccattgccgatgtaaagctgttcaggcagcatatcgggccaaaagtaaaggttaaggccgcaggcggcataaaaacacgcgaagaccttgaagcttttattcaagcgggggcggaccgcataggcacaagctccgccataaaactgctttccggcgccgccgcagttggatattaa

SEQ ID NO: 53118 - protein, 165 aa, Unknown
  Obtained from environmental sample
  DOMAIN (2)...(159): DeoC/LacD family aldolase
  misc_feature (1)..(165): Xaa is any amino acid
MVICTVIGFPLGYTYTSVKVNETGVALENGAGEIDMVINAGDVKNGNYDLVLDEIKAIKKVCGAQILKVIIETCYLNEEEKIRACTIVTEAGADFIKTSTGFGTAGATIADVKLFRQHIGPKVKVKAAGGIKTREDLEAFIQAGADRIGTSSAIKLLSGAAAVGY

SEQ ID NO: 53119 - DNA, 567 bp, Unknown
  Obtained from environmental sample
  misc_feature (1)..(567): n is a, c, g, or t
atgggccgcaagncggattgtcttgttccgctcagggcctggacaagcgccgagcgcgccttcatctccatacccgaaactgtcaaatcaatttcaggaacagatgcggcccgcaatcgaccctttgtaaaagatctgtttctcagaatcgcctgcggggacagggtcgattttccccggaacaatgtttccaaatgcggcaatatccttagcgccgctcccgaccgcgccattgccgtggaagccgcagaaaacgccgcccgctgtatactcatccgtcttgatccgtcagaccctgaaacaggggaatttctttcaaagacagggaacagggaacagggaacagggaacggggaatggggacgcggagggtgcaccgcgctaagcggtgtttttaaatttatgcggcaatgcgggagcccgagaaaatgcccaagtctacagaaacggcgcgaaggctttagcctgagcggtgggcgtataacagggancagggagatacagttgcttgacagtgaaatattgagccgcgttgatcatacgttgttgaagatgaccgcctcatga

SEQ ID NO: 53120 - protein, 188 aa, Unknown
  Obtained from environmental sample
  misc_feature (1)..(188): Xaa is any amino acid
MGRKXDCLVPLRAWTSAERAFISIPETVKSISGTDAARNRPFVKDLFLRIACGDRVDFPRNNVSKCGNILSAAPDRAIAVEAAENAARCILIRLDPSDPETGEFLSKTGNREQGTGNGEWGRGGCTALSGVFKFMRQCGSPRKCPSLQKRREGFSLSGGRITGXREIQLLDSEILSRVDHTLLKMTAS

SEQ ID NO: 53121 - DNA, 1503 bp, Unknown
  Obtained from environmental sample
  misc_feature (1)..(1503): n is a, c, g, or t
atgataggcgtcgccggtttttccgcgcgcgttttcagcgctcttgcgcgcaggaatatcagcgtgatgctgataactcaaagctccagcgaatattcaatatgttttgccgttctccccgaagaagtacaagaggcacaactggttttgaaagaggaattcttaagtgaaattcaaaatggttcgatagaaaaaccaatcgcggaaaaagatctttcgataatcgcggttgtaggttccgcaatgaaaagcacaacgggaatttccggcaagttttttcacgcgcttggccgcaacggcgtaaatattgtcgcgattgcccaggggtcatcggaaacaaatatttcggcggttatttcaaaacaggacgagggcaaggcgttaaacgcaatccatgacgcgttcttcttcgcgaacctgcgctgtgtaaacctttttttaatcggaacgggcaatataggcggaaccctgctggatcaaatagaggaaaaccgcgaaaagctcgcaaacagggatttaattaaaattaatttaataggggccgccgcgtgggacaagatgatattttcccttgacgggcttgaccccgtaaaaaccaaagaaatgctgaataaaaaaggcaaggttgcgggtacggaagaatataaacttgattcatttattgaaaaaatgacatcttttaaccttcccaattcatgtttttgcgattgcacggcaagcgaggaaattgcggctgtttacgaaaaaatcatgcgcctctccattcctatagttacgccgaataaaaaagcgaactcgagttctctggattattaccgcaggcttacttcgtattcaagggagagggggattccctatttatatgaaacgacggtcggcgcgggattgccggttatttccaccatacacgatcttttcctttcgggagacaggattataaggatagaagcggtgccgtccggaacattaagttttatttttaacaatttcgacggcaaaaagccgttttccgcccttgtgcgcgaagcgaaagcaaagggctacaccgagcctgacccaagggacgatcttaacgcgatggacgctgcgcgcaaggccttaatactcgcgagggaaatagggctgtccctggaattttccgatgtaaaaatagagcctatactccctccttcctgccttaaggcgaaagatacagactctttcttcaaagagcttgaaaaatcggacggcgtctttgaaaaacgccgcgtgcaggaagcggagaaaggaaacgccctgcgttatgttgtagtaatagaaaacggaaaggcaaaactctctttgcgcggcgagcccgagggaagccccttccgctcgttagttgacagcgataatattgtcgttattacgaccaaccgttattcaaaactcccgatggttattaagggaccgggagcgggcgctcaagtaacggcgggtggagtttttgccgacatattacgtaccgcaagaacattggtttaa

SEQ ID NO: 53122 - protein, 500 aa, Unknown
  Obtained from environmental sample
  DOMAIN (76)...(141): ACT domain
  misc_feature (1)..(500): Xaa is any amino acid
MIGVAGFSARVFSALARRNISVMLITQSSSEYSICFAVLPEEVQEAQLVLKEEFLSEIQNGSIEKPIAEKDLSIIAVVGSAMKSTTGISGKFFHALGRNGVNIVAIAQGSSETNISAVISKQDEGKALNAIHDAFFFANLRCVNLFLIGTGNIGGTLLDQIEENREKLANRDLIKINLIGAAAWDKMIFSLDGLDPVKTKEMLNKKGKVAGTEEYKLDSFIEKMTSFNLPNSCFCDCTASEEIAAVYEKIMRLSIPIVTPNKKANSSSLDYYRRLTSYSRERGIPYLYETTVGAGLPVISTIHDLFLSGDRIIRIEAVPSGTLSFIFNNFDGKKPFSALVREAKAKGYTEPDPRDDLNAMDAARKALILAREIGLSLEFSDVKIEPILPPSCLKAKDTDSFFKELEKSDGVFEKRRVQEAEKGNALRYVVVIENGKAKLSLRGEPEGSPFRSLVDSDNIVVITTNRYSKLPMVIKGPGAGAQVTAGGVFADILRTARTLV

SEQ ID NO: 53123 - DNA, 747 bp, Unknown
  Obtained from environmental sample
  misc_feature (1)..(747): n is a, c, g, or t
atgacagccctcggcggaatattcgccgtagtcgtcggcaaagaatttttcggcggcctcggcgcaaacgttttcaaccccgcactaatcggccgcgccttcctcgtaatgagttttcccgccgccctgaccacatggcagttccccgtcctccccataggagccgcgttcaccgccgacgccgtaacaggagccacgcccctcggaataatcaaaatgggaaacagcgcagctgacggtataaccgaagtcggcagatcgttagccgccatgggtctctccgattccgccgaatactggccgacaataaaagccctcttcttcggattcaaaggcggaagcatgggagaaaccccgatatttttaatcctcgcctcatgtttctttttgctcgtaacaaaaacaatcgactggcgcgcccccgtattcatgataggcacaggcttcatcgccgccctcgccttctggcaggacgccggtttcgccctgttcagcgtactgacaggcggtctcgtattcggcgcggtattcatggtaaccgattatgtaacaagccccgtaacaagcaaaggaaaaatgatattcggagcgggcgcgggaataatcgccatactgatccgcagattcggaatctaccccgaaggcgtatgcttctcaatattgatgatgaacgcgctcgtccccttcccttacanactccttcccaagaaatacggttacgtgcaaaagaaggaggcggcaaaatga

SEQ ID NO: 53124 - protein, 248 aa, Unknown
  Obtained from environmental sample
  DOMAIN (1)...(241): NQR2, RnfD, RnfE family
  misc_feature (1)..(248): Xaa is any amino acid
MTALGGIFAVVVGKEFFGGLGANVFNPALIGRAFLVMSFPAALTTWQFPVLPIGAAFTADAVTGATPLGIIKMGNSAADGITEVGRSLAAMGLSDSAEYWPTIKALFFGFKGGSMGETPIFLILASCFFLLVTKTIDWRAPVFMIGTGFIAALAFWQDAGFALFSVLTGGLVFGAVFMVTDYVTSPVTSKGKMIFGAGAGIIAILIRRFGIYPEGVCFSILMMNALVPFPYXLLPKKYGYVQKKEAAK

SEQ ID NO: 53125 - DNA, 1002 bp, Unknown
  Obtained from environmental sample
  misc_feature (1)..(1002): n is a, c, g, or t
atgtttctttttgctcgtaacaaaaacaatcgactggcgcgcccccgtattcatgataggcacaggcttcatcgccgccctcgccttctggcaggacgccggtttcgccctgttcagcgtactgacaggcggtctcgtattcggcgcggtattcatggtaaccgattatgtaacaagccccgtaacaagcaaaggaaaaatgatattcggagcgggcgcgggaataatcgccatactgatccgcagattcggaatctaccccgaaggcgtatgcttctcaatattgatgatgaacgcgctcgtccccttcccttacanactccttcccaagaaatacggttacgtgcaaaagaaggaggcggcaaaatgaaaaccaacattttaggcatggtaaaactaggattgatactcgccgccttcgccgccgccgcctgcttaatgctcgccttcgtttacaacggcacaaccgcgataatcgcacagcgccagcaagccgaccttgaagccgcgttaaaagaacttttccccgacgccgaaaagtttgaaaagattgatgatgtaacaagccccgataaaacggtaaacatcgaagcggtttacgccgcacgcaagaacggcaaaatcgccggagcggcattgcgcgtctcaagagcgagttacagcgggcagataatttcgctggtaggcgtatccgccgacggaaaaatcacaggcgtaaaaatactggaacacagcgacacgcccggactcggagctaacgcaatgtcacccacatactttgttgaccgctccaacgggctgacgttttacggacagttcgccggaaaaaaaataaccgatccctttgtagtaaaagaagacataatagcgataaccgcctccacgataaccagcagagcagtctccgcatcagtaaaagccgccggccttgcgttcatttcgtggctctcgggcgaagaagccgacgccgtaacaagcgcgtcaatggaggttgaagaatga

SEQ ID NO: 53126 - protein, 333 aa, Unknown
  Obtained from environmental sample
  DOMAIN (219)...(312): FMN-binding domain
  misc_feature (1)..(333): Xaa is any amino acid
MFLFARNKNNRLARPRIHDRHRLHRRPRLLAGRRFRPVQRTDRRSRIRRGIHGNRLCNKPRNKQRKNDIRSGRGNNRHTDPQIRNLPRRRMLLNIDDERARPLPLXTPSQEIRLRAKEGGGKMKTNILGMVKLGLILAAFAAAACLMLAFVYNGTTAIIAQRQQADLEAALKELFPDAEKFEKIDDVTSPDKTVNIEAVYAARKNGKIAGAALRVSRASYSGQIISLVGVSADGKITGVKILEHSDTPGLGANAMSPTYFVDRSNGLTFYGQFAGKKITDPFVVKEDIIAITASTITSRAVSASVKAAGLAFISWLSGEEADAVTSASMEVEE

SEQ ID NO: 53127 - DNA, 615 bp, Unknown
  Obtained from environmental sample
  misc_feature (1)..(615): n is a, c, g, or t
atgaaacgcctgataacaatttttgccaacggcctggtgcgcgaaaacccgctgttaatactgatgatcggcctttgctccgcgttagctgtaacaacctcagtcgccaacggaataggcatgggactctcgatgaccttcgtactgctgatgtccgaagtagtcatcagtattttcaggaagctaatcccatcgtcaattcgcatccccatattcataataatcatcgccgcctttacaacagtaattgattacgtgctaaaagcatggttccccgatctttcaaaagcgatgggcgtattcattccgctaatcgtcgtaaactgcgtaatcatgggcagggttgagggcttgcgttccaaagtgccgcttcaggacgccatagccgactcctttggcatgaggctgggctacactgggtttctcattggtatttcatttattcgggaactgcttggctccggtacaattctgggcgctcaggttcttcccgacagttatgtgcctatacttttnttcattatgcctccgggggggtttttggtgtttgccttgtttatcagcctcaatctctttataaaatcaaagctaaagagcgaagggagcccctcatga

SEQ ID NO: 53128 - protein, 204 aa, Unknown
  Obtained from environmental sample
  DOMAIN (1)...(188): Rnf-Nqr subunit, membrane protein
  misc_feature (1)..(204): Xaa is any amino acid
MKRLITIFANGLVRENPLLILMIGLCSALAVTTSVANGIGMGLSMTFVLLMSEVVISIFRKLIPSSIRIPIFIIIIAAFTTVIDYVLKAWFPDLSKAMGVFIPLIVVNCVIMGRVEGLRSKVPLQDAIADSFGMRLGYTGFLIGISFIRELLGSGTILGAQVLPDSYVPILXFIMPPGGFLVFALFISLNLFIKSKLKSEGSPS

SEQ ID NO: 53129 - DNA, 576 bp, Unknown
  Obtained from environmental sample
  misc_feature (1)..(576): n is a, c, g, or t
atgaatctttttaaaatattcatcagcgcctttttaattgacaacgtggttctaatgcggtttatagccctctgtccctttatcgggatgagtaccgacgaggacaaatccataggaatgggcctggcggttacatttgttacggtgcttgcgacctgcgttacctggccggtttacaaattcatactggaaccccttgggctggtgttcttgcagttgctggtttttattctggtcattgcgtctctggttcagcttgtggagttttaccttaaaaaatcagcgcccgctttatacaacgccatggggatttatcttgcgttaattacgaccaattgcgccattcttgcggtaaccctggacaatatttccaatggctataattttgccgaatctttggcctacgccattggcattgcccttggctttctgctttccatgctgcttttggcgggactaaggcgaaggctcaggacaagcccgattccggcatttcttagagggacacccatactttttgtgtgcgcctgccttctttcgcttgcctttgcgggtttttcaggtttggtaaagtag

SEQ ID NO: 53130 - protein, 191 aa, Unknown
  Obtained from environmental sample
  DOMAIN (2)...(191): Rnf-Nqr subunit, membrane protein
  misc_feature (1)..(191): Xaa is any amino acid
MNLFKIFISAFLIDNVVLMRFIALCPFIGMSTDEDKSIGMGLAVTFVTVLATCVTWPVYKFILEPLGLVFLQLLVFILVIASLVQLVEFYLKKSAPALYNAMGIYLALITTNCAILAVTLDNISNGYNFAESLAYAIGIALGFLLSMLLLAGLRRRLRTSPIPAFLRGTPILFVCACLLSLAFAGFSGLVK

SEQ ID NO: 53131 - DNA, 783 bp, Unknown
  Obtained from environmental sample
  misc_feature (1)..(783): n is a, c, g, or t
atgagcataatacttaccaccgtcattttcgccgcggctctttccctcgttttgggaataacgctaggcttcttccgagattttttcgccgtgcctgaagaccccaccacaagccttatccgcgaagcattgccgggagcgaactgcggcgcatgcggctttcccggctgtgacaactacgcttccgccgtcgcgtcaggcgaagcgcagtcaaacgcctgcaccgtgggaggccaatccgtagcgcagaaaatagccgccgttacgggcaaagaagcgggcgctgttgttgaaaccgttgcggtgcttgcgtgtcagggttcttctttgcacactccgctaaagggcgattacacgggacttaaaacctgccgcggcgcgaaggtcgcgggcgggacaaaactctgcacgtggggatgtctcggtttcggcgactgcgttaaaatgtgcaaattcggcgcgctttcgatgacagataacaggctccccaagattgattattcaaagtgtaccggctgcggtctttgctcgggcgaatgtcccatggggcttttcaaaactgtcgagaggaaacaaaagggcgcgatggtgctttgttccaacttaaatcccgtaagaccgactatagcgaagacttgcaagatcgcgtgttttaagtgcgggctttgcgtgaaaaattgtccggagcattgtatcagtcttgatacgcttattcctgttgtggatttgacgaaatgcaactcttgcgggacttgcgcacagaagtgtcctgtaaggtgttaa

SEQ ID NO: 53132 - protein, 260 aa, Unknown
  Obtained from environmental sample
  SIGNAL (1)...(19)
  DOMAIN (163)...(186): 4Fe-4S binding domain
  misc_feature (1)..(260): Xaa is any amino acid
MSIILTTVIFAAALSLVLGITLGFFRDFFAVPEDPTTSLIREALPGANCGACGFPGCDNYASAVASGEAQSNACTVGGQSVAQKIAAVTGKEAGAVVETVAVLACQGSSLHTPLKGDYTGLKTCRGAKVAGGTKLCTWGCLGFGDCVKMCKFGALSMTDNRLPKIDYSKCTGCGLCSGECPMGLFKTVERKQKGAMVLCSNLNPVRPTIAKTCKIACFKCGLCVKNCPEHCISLDTLIPVVDLTKCNSCGTCAQKCPVRC

SEQ ID NO: 53133 - DNA, 381 bp, Unknown
  Obtained from environmental sample
  misc_feature (1)..(381): n is a, c, g, or t
atgggactcgtattcctgcaaatattggttttcattcttgtaatcgcctcgctcgttcagttagttgaattctttttaaagaaagccgtcccctctctttacagatcgatgggcatctacctcgcgttgattacaactaactgcgcgatcctcgcggtaaccttcgacgtaatttccaacggctacaccttcgccgaatctctggtctacgccgccggagtcgcgcttggttttcttttatcacttttactgttagcgggcatacgcagaagaatcaggacaagccccattccggcatttttgaaagggacgcccgtgttgtttttaaccgccgctcttctttcgatggcgttcatgggctttaaggggctggtacaatga

SEQ ID NO: 53134 - protein, 126 aa, Unknown
  Obtained from environmental sample
  DOMAIN (1)...(126): Rnf-Nqr subunit, membrane protein
  misc_feature (1)..(126): Xaa is any amino acid
MGLVFLQILVFILVIASLVQLVEFFLKKAVPSLYRSMGIYLALITTNCAILAVTFDVISNGYTFAESLVYAAGVALGFLLSLLLLAGIRRRIRTSPIPAFLKGTPVLFLTAALLSMAFMGFKGLVQ

SEQ ID NO: 53135 - DNA, 717 bp, Unknown
  Obtained from environmental sample
  misc_feature (1)..(717): n is a, c, g, or t
atgaaacgcctgataacaatttttgccaacggccttgtgcgcgaaaacccgctgttaatactgatgatcggcctctgctcagcgttagctgtaacaacctcggtcgccaacggaatcggcatgggactctcgatgaccttcgtactgctgatgtcggaagtagtcatcagtattttcagaaagctaatcccatcgtcaatccgcatccccatattcataataatcatcgccgcatttacaacagttattgattacgtgctaaaagcatggttccccgatctttcaaaagcgatgggcgtattcattccgctaatcgtcgtaaactgcgtaatcatgggacgagtcgaaggcttcgcctccaaacaaccgttaggcgacgtaatagcggactcactcggcatgggactaggctacacatgggtattaacaggcatcgctctagtacgcgagcttttgggaagcggctcaatcgccgccatacccgtgcttcccgcaagttatcagccgttaattttctttatcctcccacccggcggattttttgttttcgccttgttcatcgccctcaacctgtttatcaaatcgaaacttaaatcgccggcagcttccgctttcgggcaaagctgtgaagactgtccgtccgcgtcctgctgcggcatcccagaaaactcggacatgaagtccggggacataaagtccgcggggggtcaatcatga

SEQ ID NO: 53136 - protein, 238 aa, Unknown
  Obtained from environmental sample
  DOMAIN (1)...(188): Rnf-Nqr subunit, membrane protein
  misc_feature (1)..(238): Xaa is any amino acid
MKRLITIFANGLVRENPLLILMIGLCSALAVTTSVANGIGMGLSMTFVLLMSEVVISIFRKLIPSSIRIPIFIIIIAAFTTVIDYVLKAWFPDLSKAMGVFIPLIVVNCVIMGRVEGFASKQPLGDVIADSLGMGLGYTWVLTGIALVRELLGSGSIAAIPVLPASYQPLIFFILPPGGFFVFALFIALNLFIKSKLKSPAASAFGQSCEDCPSASCCGIPENSDMKSGDIKSAGGQS

SEQ ID NO: 53137 - DNA, 768 bp, Unknown
  Obtained from environmental sample
  misc_feature (1)..(768): n is a, c, g, or t
ttgcgcgcgctattgaatatgaaagagagcggcagatcgaaatactggaagacggcggacagattgttcaggaaacgcgcccgttgggacgatgaaaaactggagtcctacggtatgcgttcaaaagaaaacgcgcaggattaccgttactttccggagcctgatcttctgcctatggagattgatgacgcatggcttgcaagcgtcaggaagagtctgcctgaactggcgtatcaaaaacgggagcggtattgccgtgactttaagatacccgaatccgaggcggcggttctgactgttcataaaaatatttgtgatctgttcgagctcattgcgcggaaaagcggacaacccgttgaagcggcgcacctcttgaccggtgaaatcatgcggctgatgaacaatgccaacattttgccggaagatttgtctcttaataccgataaattttcggcgcttattactctggtgacgggcgggaaaatcaaccggaacgcctataaagaaaccgttgaggcggtattcaccagtaatattgatcctgaaagttatatcgccgaaaaagggttgatgatgatcaatgatgacaacgcggtcatcgaagcggcgaaagcggttataactgaaaatcaggataccgtcgcggagtaccgcgccggcaaggaaaaagtgtttgggttcttaatggggcaggttatgaagaaactgggcggaaaagggaatcccgacatggcgaaaaaagcgctggaagatgcgctgaaaaggtga

SEQ ID NO: 53138 - protein, 255 aa, Unknown
  Obtained from environmental sample
  DOMAIN (36)...(104): PET112 family, C terminal region
  misc_feature (1)..(255): Xaa is any amino acid
MRALLNMKESGRSKYWKTADRLFRKRARWDDEKLESYGMRSKENAQDYRYFPEPDLLPMEIDDAWLASVRKSLPELAYQKRERYCRDFKIPESEAAVLTVHKNICDLFELIARKSGQPVEAAHLLTGEIMRLMNNANILPEDLSLNTDKFSALITLVTGGKINRNAYKETVEAVFTSNIDPESYIAEKGLMMINDDNAVIEAAKAVITENQDTVAEYRAGKEKVFGFLMGQVMKKLGGKGNPDMAKKALEDALKR

SEQ ID NO: 53139 - DNA, 756 bp, Unknown
  Obtained from environmental sample
  misc_feature (1)..(756): n is a, c, g, or t
atgaagtgggaaaccgtcatcggcctggaagttcacgccgagctgtctacaaaatcaaaaattttctgcggctgtacaaccgcctatggcggggagcctaatacccatgtctgcccggtatgcgcggggatgccgggcgtattgcctgtgcttaaccgctcggtggtggagtatgccctgcggcttggtatcgcgcttggctttaatattaccaaacactgcaagtttgatcgcaaaaattatttttatcccgatctgccgaaagcctatcaggtatcgcagctgtacgcccccatctgccgggacggccatcttgacatcgaagctgacggcagaaaaaagacaatcaacatacgcgaaatacacatggaagaagacgcgggaaagctaatacacgacgcanaaggcggcggtacgttcatggactttaaccgttgcggggtgccgcttctggaaattgtttcgcagcccgacttccgcagtgccgccgaggtaatcgcctatcttgagaaacttcgcgaaacgcttttatacctagatgtgtgcgattgcaaaatgcaggaaggttccatacgcgcagacatcaaccctctcatgcgccgcgagggcgatgaattggggatacgtaccgagacaaaaaacatgaactcgtttaaggcgattgcgcgcgctattgaatatgaaagagagcggcagatcgaaatactggaagacggcggacagattgttcaggaaacgcgcccgttgggacgatga

SEQ ID NO: 53140 - protein, 251 aa, Unknown
  Obtained from environmental sample
  DOMAIN (1)...(239): PET112 family, N terminal region
  misc_feature (1)..(251): Xaa is any amino acid
MKWETVIGLEVHAELSTKSKIFCGCTTAYGGEPNTHVCPVCAGMPGVLPVLNRSVVEYALRLGIALGFNITKHCKFDRKNYFYPDLPKAYQVSQLYAPICRDGHLDIEADGRKKTINIREIHMEEDAGKLIHDAXGGGTFMDFNRCGVPLLEIVSQPDFRSAAEVIAYLEKLRETLLYLDVCDCKMQEGSIRADINPLMRREGDELGIRTETKNMNSFKAIARAIEYERERQIEILEDGGQIVQETRPLGR

SEQ ID NO: 53141 - DNA, 633 bp, Unknown
  Obtained from environmental sample
  misc_feature (1)..(633): n is a, c, g, or t
atgttagggctgtatgccagaaaagtaggaatgacccaggtttttgacgacacgggcaacctgttgccggtttcggtgttaaaggttaacccgaacgtcgtccttgccacaaagacaaaggaaactgacggttacgaggcagtggtcgtaggaatagacgacacaaagaaaaatcgcgtaacaaaagcgaaagccggacagtttccggaaaacattcccttaaagaaaaagatttgcgagttacgcgattttgagaaaaaagtgaacgtgggcgattctcttggaattgaagtgctggaaaacgcgaggtatgtcgatgtttgcggtatttcaaaaggcaagggttttcagggtgttgtaaaacgctacaagttcggcggggggcgtaagacccacggatcaaaattccaccgcgaaccgggttctacgggacagagtacttatccagcgaagacttttaaaaacgtaaaattgcccggacgaatgggacgggaaaaaactaccgtattaagccttagagttataaaaacagatcctgaaaaacagcttattatggttcgcggcgcggttcccggcattaataaagggcttgtgtttgtccgctttgcggtaaagaaaggacggaaaacatga

SEQ ID NO: 53142 - protein, 210 aa, Unknown
  Obtained from environmental sample
  DOMAIN (8)...(201): Ribosomal protein L3
  misc_feature (1)..(210): Xaa is any amino acid
MLGLYARKVGMTQVFDDTGNLLPVSVLKVNPNVVLATKTKETDGYEAVVVGIDDTKKNRVTKAKAGQFPENIPLKKKICELRDFEKKVNVGDSLGIEVLENARYVDVCGISKGKGFQGVVKRYKFGGGRKTHGSKFHREPGSTGQSTYPAKTFKNVKLPGRMGREKTTVLSLRVIKTDPEKQLIMVRGAVPGINKGLVFVRFAVKKGRKT

SEQ ID NO: 53143 - DNA, 576 bp, Unknown
  Obtained from environmental sample
  misc_feature (1)..(576): n is a, c, g, or t
atgaactgtaaagtgtattcaaaagaaggcaaagaactgcgaaccatcgccttaaacgacgatgtttttggtcttcccgtaaacgaagatctgatttggtacgcgattaataatgaacttgccaataaaagacagggtaacgccagtacaaagggccgcgccgagattcacggttcaaacgcgaaaccgtataaacaaaagggtacaggacgcgcccgtagaggcgataaaaaatcacccgttcttgtcggcggcggcacgatgtttggtccaaaaccgaaggatttttcctatgcgataccgaaaaaagcaaagaggctcgcgcttaaatccattcttagcttaaaagcgcaaagcgacacattaaaaatagtagaagatttttcagttgaatcgggcaaaacaaaagatttggcgaaactcctcgatcattttgaacccgggcttcgcacggtgttaatccttaaagatgacgatcccaaaattaaaagagcggcagcgaatattccctgggttaaatatctttcttataacagactggaagctcatgaattattttacggtcgtcaggtgtga

SEQ ID NO: 53144 - protein, 191 aa, Unknown
  Obtained from environmental sample
  DOMAIN (15)...(191): Ribosomal protein L4/L1 family
  misc_feature (1)..(191): Xaa is any amino acid
MNCKVYSKEGKELRTIALNDDVFGLPVNEDLIWYAINNELANKRQGNASTKGRAEIHGSNAKPYKQKGTGRARRGDKKSPVLVGGGTMFGPKPKDFSYAIPKKAKRLALKSILSLKAQSDTLKIVEDFSVESGKTKDLAKLLDHFEPGLRTVLILKDDDPKIKRAAANIPWVKYLSYNRLEAHELFYGRQV

SEQ ID NO: 53145 - DNA, 1713 bp, Unknown
  Obtained from environmental sample
  misc_feature (1)..(1713): n is a, c, g, or t
atggatgtaaaacaagctattaacgaaaacaaaacttctcttggaatagagtttggttccacgcgaataaaagcggtattaattgacgatacttacgcgcctgtcgcgcaaggcagtcatgattgggaaaataaactggaagacggagtttggacttatcatttagacgacgtttggaaaggactgcaggattgttttaagaatttggcgttagatgtaaaaaaccgctacggtcttgccctttcttctgtcggctctgtcggtatttccgcaatgatgcacggataccttgtatttgacaagaacggcgatcagcttgttcctttccgtacatggcgcaataccacaacagaaaaagccgccgctcttcttaccgaagaatttaaattcaacataccccagcgctggagtatcgctcatttatatcaggcggtttcgaacggcgaatctcatgttaaagatattgattttataactacccttgccggttatgtgcactggaaattaaccggtaaaaaagttcttggcatcggcgacgcttcaggcatgtttccaatagaaaataacaaatataatcctttaatgttaaaacagtttgacgaacttattgcttcaaacaattacggttggaaaatcgaaaacattcttcccgcaattttaagcgccggtgaaaacgccggaaccctcaccgcgcagggggcgaaactgctcgacagtcccggctgtttacgggacggtattcccttctgcgcgccggaaggagacgcgggaacgggcatgacagcgactaacagcattgcggaacgtacaggcaatgtttcggcgggcacttccatnttcgcgatgatcgttatggaaaaagaattgtccagggtataccccgaaattgatattgtcactaccccgtcgggaaagcctgtggcgatggttcactgcaacaactgtacttccgatattgacgcatgggtaaaattattcaagggactgattgacatgagcggcgcaaaaattgaaaatcatgcgctttatgacgcgctgtattacaaagctttggaagcggatgatgattgcggcgggcttctttcatataattactattcaggtgaaactattaccggaattgaggaaggacgtcctatgttcgtgcgcctgcctgacagcaattttacaccggcaaattttatgcgcactcttcttttttcgagcatggcgaccttaaagtacggcatagatattcttaccgaaaaggagaagacgaagatagacagcctgttaggtcatggcggcttgttcaaaacaaaaggcgtaggacagcgatttatggcggcggtctttaacgcgcctgttggcgttatggattccgcgggagaaggcggagcgtggggtattgccattcttgcctcttttataaatcaacaaggcgaaacattggaaaaattccttgcggaaaaagtcttcgccggaaagacaggcgcgcagattaaacctgatccgaaagatgtggaaagttttaggaaattcatggagcgttataccacagggcttaaaatagagcaggccgcagttgaaaatttgaaaaagngggtgattatgaatcttaagaaatacgaatactggtttatcgtaggaagccaagacctttacggagatgaaacgcttaaacaagtcgccgaacattcccgtattatgacggataatcaacactcgcgataa

SEQ ID NO: 53146 - protein, 570 aa, Unknown
  Obtained from environmental sample
  DOMAIN (265)...(502): FGGY family of carbohydrate kinases, C-terminal domain
  misc_feature (1)..(570): Xaa is any amino acid
MDVKQAINENKTSLGIEFGSTRIKAVLIDDTYAPVAQGSHDWENKLEDGVWTYHLDDVWKGLQDCFKNLALDVKNRYGLALSSVGSVGISAMMHGYLVFDKNGDQLVPFRTWRNTTTEKAAALLTEEFKFNIPQRWSIAHLYQAVSNGESHVKDIDFITTLAGYVHWKLTGKKVLGIGDASGMFPIENNKYNPLMLKQFDELIASNNYGWKIENILPAILSAGENAGTLTAQGAKLLDSPGCLRDGIPFCAPEGDAGTGMTATNSIAERTGNVSAGTSXFAMIVMEKELSRVYPEIDIVTTPSGKPVAMVHCNNCTSDIDAWVKLFKGLIDMSGAKIENHALYDALYYKALEADDDCGGLLSYNYYSGETITGIEEGRPMFVRLPDSNFTPANFMRTLLFSSMATLKYGIDILTEKEKTKIDSLLGHGGLFKTKGVGQRFMAAVFNAPVGVMDSAGEGGAWGIAILASFINQQGETLEKFLAEKVFAGKTGAQIKPDPKDVESFRKFMERYTTGLKIEQAAVENLKKXVIMNLKKYEYWFIVGSQDLYGDETLKQVAEHSRIMTDNQHSR

SEQ ID NO: 53147 - DNA, 1287 bp, Unknown
  Obtained from environmental sample
  misc_feature (1)..(1287): n is a, c, g, or t
atgacagattggccgangngctggtcccgcccgagacgatttagcgactggcgttatgagggagtgatatatcctaaaaccaacgatccatttaataaagacggacatatgtgtctttacgcgccggatgtaacgcaggggcctgacggccggtactatttgttttatgtgcttgataaggtaaatgttgtgtccgtagcggtttgtgatactcccgccggagaattcaaatttcatggttatgtgcattatcccgacggaacaaaactcggcgatcggaagacagaccagcctcagtttgatcccggcgttttaacggaaggcgataaaacgtatctctttacgggtttttgcgggcgcgacgataagaccagaataggcgctacggcggtaacgctgggaaaggatatgctgaccgttcttgatgagccggttcttatcgctcccggagtgcataacagcaagggcacaagttttgaaggttatgagttttttgaagctccttccttaaggaaacacggcgatacatattattttatctattcatcaatcgcgtctaacgagctttgttacgctacaagtaaaaatcccctaaaggattatgtttacggcggcgttatcataagcaacgccgatgtgcatatcggcacatataaacccgcggataaacctatgggctgcggcggcaataatcacggaagcatcatcgaaataaaagggaaatggtatattttttatcacaggcataccaacggaaacgagttcagccgccagggatgccttgaacctatagaaataaaagcggacggttctattcctcaggttgaaatgacttcgtgcggaccaaacggcaaaccgcttattggcaaaaaggaatatccggcatatattgcatgtaatatattttccgtggaaaataatcggcagttagaaaggcaatggccgcttcacaaccagtctctgccgaaaatttcacaggatgggcgggacggcgatgaagaacccggctttgtaacaaacattacggacaatcacggtattggttttaagtattttgattgtaaaggaattaagagaattaaaataaaaacgcgcggttacaacagcggtgttattcaggttaaaacaaaatgggacggcgaacctttagcgcaaataaaaattgaatacagcaatatttggacggaatattcatcagatataaatcttccggacggaatacatgcgctttactttatttataaaggcaaaggatacgcttctatggcttcctttactttggaataa

SEQ ID NO: 53148 - protein, 428 aa, Unknown
  Obtained from environmental sample
  misc_feature (1)..(428): Xaa is any amino acid
MTDWPXXWSRPRRFSDWRYEGVIYPKTNDPFNKDGHMCLYAPDVTQGPDGRYYLFYVLDKVNVVSVAVCDTPAGEFKFHGYVHYPDGTKLGDRKTDQPQFDPGVLTEGDKTYLFTGFCGRDDKTRIGATAVTLGKDMLTVLDEPVLIAPGVHNSKGTSFEGYEFFEAPSLRKHGDTYYFIYSSIASNELCYATSKNPLKDYVYGGVIISNADVHIGTYKPADKPMGCGGNNHGSIIEIKGKWYIFYHRHTNGNEFSRQGCLEPIEIKADGSIPQVEMTSCGPNGKPLIGKKEYPAYIACNIFSVENNRQLERQWPLHNQSLPKISQDGRDGDEEPGFVTNITDNHGIGFKYFDCKGIKRIKIKTRGYNSGVIQVKTKWDGEPLAQIKIEYSNIWTEYSSDINLPDGIHALYFIYKGKGYASMASFTLE

SEQ ID NO: 53149 - DNA, 474 bp, Unknown
  Obtained from environmental sample
  misc_feature (1)..(474): n is a, c, g, or t
gtggaaagtcgagttcggatacggcggattttgcagttgcgcctcgaaaagaagataaagagcgtcctcgctaaatcggggctttacgcctacgagttgactgagatggacaagatcatcgagtacgggcgcgagttcttcgatccgcgtttgacgggggaggcgattcttgtggccggaacgttcttcaaggacattctgcacactacccacgggactatccagataggccccttcgcctgtatgcccacgcgcgtcgtggaggcggtgcttacggcggaggccacggtggacaacaaaaaatcgcttgacaaaagggtattgggcagcgatcacgccggcgacaatataagcactctgccgtttttgtccatagagagcgacggcaacccgttcccggctatcttggagtctcggattgaggcgttttgtttgcaggttgagaggctgcacgatcggatgctgcggcggtag

SEQ ID NO: 53150 - protein, 157 aa, Unknown
  Obtained from environmental sample
  misc_feature (1)..(157): Xaa is any amino acid
MESRVRIRRILQLRLEKKIKSVLAKSGLYAYELTEMDKIIEYGREFFDPRLTGEAILVAGTFFKDILHTTHGTIQIGPFACMPTRVVEAVLTAEATVDNKKSLDKRVLGSDHAGDNISTLPFLSIESDGNPFPAILESRIEAFCLQVERLHDRMLRR

SEQ ID NO: 53151 - DNA, 1188 bp, Unknown
  Obtained from environmental sample
  misc_feature (1)..(1188): n is a, c, g, or t
ttggttaaggagtacaatatagacgtaaaagcgtcgcgccggcagatcgtaattccagccggcaaggccttttggggtttgggcaaaggcaaggacgacggcgacacgctgtcggtaatcctgagcgtagacaccgccctccagaagtacgccgcgagtatgttccgccaatacaagcctcgttacgcggcggcggtcgccgtagatccgacgacgggccgggttctggcgctcgcctcctacgccggcgacggaacggagatagacggcaaagatctgtatctgcggaaccgcttcccggcggcgtccgtgtttaaaacgatcgtagccgccgcgggaatagaaaggggcggaatgcacgccaagactaccatagagcacttcgggcgcaaccacacgctctacaccacgcaacttaaaaaagaccttaaaatctcccgcgacatcacattggaggacgcatacgcctactctataaatccggtcttcgcccgcatcgcgctcttcaacataaacaaagacgtcgtgaccgaatacgggcggcgcttcgggttcaacgagcctataccgttcgagtacgacgttgacaaaagcgaaatgttcgcgccggacaccggattctccgtggcggagttcgcctccggcttcaaccgcaaaaccaccatcacccccctcttcggcgcgcttatagccggagcggtgtgcgagaacggggtgatcttcgagccgacaatcatagacaccgtccgctcgacgcgcggggactcctgcgtctacgtcagacggccgaaggtgtggcggcgcgccgttaaagagcaaaccgccgcagagctcaggggattgatgactaaagtaacgcattacggcaccgcccgcaactcgtttaggcggatgcgcgaatcgccccggtacaacgccttcgagttcggaggaaaaactgggtcggtcaaccaagtggagctcgggcgcgtggattggttcgtcggattcgccagaaacccgaacaacaaaaagcaacgcatcgcggtgggcgtggtgactacgcacggcgaatattggacggtgcattcaagctacatcgcggcggagctgattaaaaagtacatcagcggcgctaccgccgcagcatccgatcgtgcagcctctcaacctgcaaacaaaacgcctcaatccgagactccaagatag

SEQ ID NO: 53152 - protein, 395 aa, Unknown
  Obtained from environmental sample
  DOMAIN (63)...(370): Penicillin binding protein transpeptidase domain
  misc_feature (1)..(395): Xaa is any amino acid
MVKEYNIDVKASRRQIVIPAGKAFWGLGKGKDDGDTLSVILSVDTALQKYAASMFRQYKPRYAAAVAVDPTTGRVLALASYAGDGTEIDGKDLYLRNRFPAASVFKTIVAAAGIERGGMHAKTTIEHFGRNHTLYTTQLKKDLKISRDITLEDAYAYSINPVFARIALFNINKDVVTEYGRRFGFNEPIPFEYDVDKSEMFAPDTGFSVAEFASGFNRKTTITPLFGALIAGAVCENGVIFEPTIIDTVRSTRGDSCVYVRRPKVWRRAVKEQTAAELRGLMTKVTHYGTARNSFRRMRESPRYNAFEFGGKTGSVNQVELGRVDWFVGFARNPNNKKQRIAVGVVTTHGEYWTVHSSYIAAELIKKYISGATAAASDRAASQPANKTPQSETPR

SEQ ID NO: 53153 - DNA, 420 bp, Unknown
  Obtained from environmental sample
  misc_feature (1)..(420): n is a, c, g, or t
atgcccggcgacgatgtaacgcacccggttcccgacaatacaggatatataaccgagggccagtactacctcaagcacggtcgcattgagcctttcggttctttgagccgccttaaacaacaggttaacggcaaaacccgcgctgaccaccgcgccctgatggacggcatgatcaagctgtactccgcgttcagggacaccctggaaaagaaggcgatgggctttatgatgtccgcctgggacgaaaaactcctcaaatacggccatcagtttgaatcgaagatgatggacctttcggtcaatatcccgcttgaaaaggcccttgacctcgggtgggaaattcttgccgactgtttcaatcccgaagataccggccttaggaccgagcttatcagcaaattctggccgaagaaggattag

SEQ ID NO: 53154 - protein, 139 aa, Unknown
  Obtained from environmental sample
  misc_feature (1)..(139): Xaa is any amino acid
MPGDDVTHPVPDNTGYITEGQYYLKHGRIEPFGSLSRLKQQVNGKTRADHRALMDGMIKLYSAFRDTLEKKAMGFMMSAWDEKLLKYGHQFESKMMDLSVNIPLEKALDLGWEILADCFNPEDTGLRTELISKFWPKKD

SEQ ID NO: 53155 - DNA, 825 bp, Unknown
  Obtained from environmental sample
  misc_feature (1)..(825): n is a, c, g, or t
atgaaaaaggtttatagcaaaattgaatccataaccggaagcgttattaccgtccgggccgaagggatccgttacggcgaccttgccgaggttgacaccgtattcggcacctcgcttgccgaggtaaatcggctgcaggacgaccttgtctccctgcaggtatttgccggcggtcgcggtatttccacgggcgacacggttcgctttttgggacggcccatgcaggtgccgttttctgaaaacctcatgggcagggtgttttccggttcggggatgccccgcgacaaaggtccggcactgcacgaaaactacatacccatcggcggtccctcggttaacccgtcagagcgcattatcccccgcaagatgatccgcaccggcatccccatgatcgatttgttcaatactctggtcgtttcacagaaactgccgatcttctcggtttcgggcgagccgtacaacgagcttctggcgcgtatcgcaatgcaggccgaagttgacgtaatcgtactgggcggaatgggccttaaatatgacgactaccttaccttcaagaacacgcttgaaaacgccggcgccctcgcgcgcacggtcatgttcatgcacaccgccagcgaccccacggtcgaatgtctcatgatccccgatatgtcccttgccgtagccgagcagttcgctctgaagggcaaagacgtgctggtgcttcttaccgacatgaccaacttcgccgacgcgatgaaggaaatttccattatacaggaacaggtgccgtcaaaccgcggttacccccggcgacctttacagccagcttgccagccgctatga

SEQ ID NO: 53156 - protein, 274 aa, Unknown
  Obtained from environmental sample
  DOMAIN (8)...(71): ATP synthase alpha/beta family, beta-barrel domain
  misc_feature (1)..(274): Xaa is any amino acid
MKKVYSKIESITGSVITVRAEGIRYGDLAEVDTVFGTSLAEVNRLQDDLVSLQVFAGGRGISTGDTVRFLGRPMQVPFSENLMGRVFSGSGMPRDKGPALHENYIPIGGPSVNPSERIIPRKMIRTGIPMIDLFNTLVVSQKLPIFSVSGEPYNELLARIAMQAEVDVIVLGGMGLKYDDYLTFKNTLENAGALARTVMFMHTASDPTVECLMIPDMSLAVAEQFALKGKDVLVLLTDMTNFADAMKEISIIQEQVPSNRGYPRRPLQPACQPL

SEQ ID NO: 53157 - DNA, 1026 bp, Unknown
  Obtained from environmental sample
  misc_feature (1)..(1026): n is a, c, g, or t
ttgctcattgctcattactcattggttgttatactatcaagcagggaacaaccatgctcggctaccttagccgcgcggtgccgctcgagtcgctgcttgagagtgaagccgatgcctcggaggcggaaaagaaccgccggtttgtggagcaggttcaggatatacggccgttatgcgaaagaagaacttggccttaatctggggaagaattatacccgctatgtaaagctcgaccgtgattacctggcggcggttgtgtccgcttccgccgcggactcatttttacggcatgagtggaaataccctatcgtgggcgcgatgccatacaagggttttttcaatattgaggatgcgcgcaaggaacgtgcaaaacttgaaaagaagggcctcgatgtctggatacggggagttgacgcgttcagcacgctgggctggttcagggatcccctgtattcctatatgcgggattatccccctgacaggcttgccgatctgatcatccatgaatcgcttcacgcgacggtatttataaaggggcaggcgcagtttaacgaggagcttgcggaatttgcgggcagcgagggcgcaaggatgtacatggcatcccgctatggcgcggcctccgccgaatacaggaatatgcacaaggacgaagcggataacaagaggtatgtgtcatttcttcagggattaatcagagaacttaataagctgtatgaaagcgaaagaaacggcgaagagaagttaatcgaaaaagaaaagattatcagcgcggcaaagaaacgcttcgcggctgagtatgaaaacatgttttccggcgctggctacaggggatttacagagatgcctgtgaacaacgcctaccttgaattgtaccggctgtattacaccgaagatgcctatatcgccaacttgttcgcgaggtccggcaagagcctgcctgaatttattgccgcggcaaaaacaatttcaaaaaagggcgacggaaggaaaatgttagcgcaagccctggggctggaacaatga

SEQ ID NO: 53158 - protein, 341 aa, Unknown
  Obtained from environmental sample
  misc_feature (1)..(341): Xaa is any amino acid
MLIAHYSLVVILSSREQPCSATLAARCRSSRCLRVKPMPRRRKRTAGLWSRFRIYGRYAKEELGLNLGKNYTRYVKLDRDYLAAVVSASAADSFLRHEWKYPIVGAMPYKGFFNIEDARKERAKLEKKGLDVWIRGVDAFSTLGWFRDPLYSYMRDYPPDRLADLIIHESLHATVFIKGQAQFNEELAEFAGSEGARMYMASRYGAASAEYRNMHKDEADNKRYVSFLQGLIRELNKLYESERNGEEKLIEKEKIISAAKKRFAAEYENMFSGAGYRGFTEMPVNNAYLELYRLYYTEDAYIANLFARSGKSLPEFIAAAKTISKKGDGRKMLAQALGLEQ

SEQ ID NO: 53159 - DNA, 507 bp, Unknown
  Obtained from environmental sample
  misc_feature (1)..(507): n is a, c, g, or t
gtgcaccacatactggccgaacttgaaaagcggggcttcctaaaagccctgataacgcagaacatcgatctccttcacacaaaggcaggttccaaaagggtgatagaaattcacggctccccaaaaacgcattactgccttcgctgtgcgggagtgcgaatgagctttgatgaagccgccgctattgtccactccggggagctccccaaatgccccaaatgcggaagggtgctgaaaccggcaataacgtttttcggcgaaagccttccgatagacgctttaagggaagcgaccgaagaggcccaaaaatcagacttaatgctggttctcggaacaagccttacggtataccccgccgcgtcaatgccccaatacacgctttccaggggcggggagattgtaatcgtaaacaatatggcaactcctttggacggccgggctgttctgcactacgacgatcttgaagaagtttttagcgcactgaatgaaattattgagagcctgtaa

SEQ ID NO: 53160 - protein, 168 aa, Unknown
  Obtained from environmental sample
  DOMAIN (1)...(118): Sir2 family
  misc_feature (1)..(168): Xaa is any amino acid
MHHILAELEKRGFLKALITQNIDLLHTKAGSKRVIEIHGSPKTHYCLRCAGVRMSFDEAAAIVHSGELPKCPKCGRVLKPAITFFGESLPIDALREATEEAQKSDLMLVLGTSLTVYPAASMPQYTLSRGGEIVIVNNMATPLDGRAVLHYDDLEEVFSALNEIIESL

SEQ ID NO: 53161 - DNA, 435 bp, Unknown
  Obtained from environmental sample
  misc_feature (1)..(435): n is a, c, g, or t
atgagcaaatttagaataggtgacggcaatttttacgaaggcgatgtggttgacggacagcccaacggtaaagggaaaatgacgttgacggcatacggctccgtgtacgaaggcgatttcgtagacggcaagccccacggcaatgggaaatttacatggccggaaggctccgtatacgaaggcggttgggtaaacggcaaacccaacggcaaagggaaaatgacgctcaatgacggaacggtgtacgaaggcgattgggttgacggaacggagaacggcaaaggcaaaataacatttgcggacggcaattcttacgaaggcgatttcgtcaaccgcaagtgccacggcaaagggaaaatgacctacgccgacggcacagttgaagaaggaagatttgagaacaacaaatttgttgaaggagaaaaacatggctaa

SEQ ID NO: 53162 - protein, 144 aa, Unknown
  Obtained from environmental sample
  DOMAIN (82)...(104): MORN repeat
  misc_feature (1)..(144): Xaa is any amino acid
MSKFRIGDGNFYEGDVVDGQPNGKGKMTLTAYGSVYEGDFVDGKPHGNGKFTWPEGSVYEGGWVNGKPNGKGKMTLNDGTVYEGDWVDGTENGKGKITFADGNSYEGDFVNRKCHGKGKMTYADGTVEEGRFENNKFVEGEKHG

SEQ ID NO: 53163 - DNA, 1131 bp, Unknown
  Obtained from environmental sample
  misc_feature (1)..(1131): n is a, c, g, or t
ttggaggttctaatggctcttcttcctattgtagttattgccgctttcgcggtattggtcatactgtttatattgatcatcctggttctcgtcaagctttattcaaccagacaagccgatctttctccccagatattggatttgaaaaacgagctgaacgaacttaaaacaaaacaactggaaagccagcagacatcccttgcaagtcagcagcagctctttctgaatacccagaactcgcttggctcccaactgcagcaaatgatgaacctgatgggccaaagccttaattcggcgcaaagcaatatcgcaaaacagcttgacaattccaaccgcataatcggcgacatacatacaaaactcggctcgctggaaacgacggctaaaaacatccaggacatcgggaaagacatttcttccctgcaaaatattctgcaagcgccgaagctccgtggaaatcttggcgaattatttttggaagacctcctaaaacaaatacttccggaagcaaattacaaaattaaacccagttttaaaaacggtacgcaggtggatgccattattatactggggggtaatatagttcctgttgattcaaaattcccgcttgaaagtttcaggcgtcttatagccgccgatagcgaggaaagcaaaaaaacattcaagaaagagtttgtttccagcgtaaaaaagcgcattgacgagattgcgactaaatacattaacccggcggaaggaaccttcgattttgccatgatgtacatccccgccgacaatgttttttatgagaccgtcatcaacgattcttcgacaaacaaagactacgagcttttttattacgccatgtccaagcacgtcattcccgtttcacccaacagtttctacgcgtatcttatggcgcttgttttcggcattaagggcttaaaaatcgaacaggaagccaaaacaatacttggagagctttctcaggttcaggacagattcacaaaattcttcgccgactacggcctggtgggaaaacacatttccgccgccgcaaacaaatactccgattccgaaaaaagcgcagggaagttaaatgatcaaattaacaaaatcacgggaaacaagacggaattgattacagaataa

SEQ ID NO: 53164 - protein, 376 aa, Unknown
  Obtained from environmental sample
  SIGNAL (1)...(17)
  DOMAIN (93)...(376): RmuC family
  misc_feature (1)..(376): Xaa is any amino acid
MEVLMALLPIVVIAAFAVLVILFILIILVLVKLYSTRQADLSPQILDLKNELNELKTKQLESQQTSLASQQQLFLNTQNSLGSQLQQMMNLMGQSLNSAQSNIAKQLDNSNRIIGDIHTKLGSLETTAKNIQDIGKDISSLQNILQAPKLRGNLGELFLEDLLKQILPEANYKIKPSFKNGTQVDAIIILGGNIVPVDSKFPLESFRRLIAADSEESKKTFKKEFVSSVKKRIDEIATKYINPAEGTFDFAMMYIPADNVFYETVINDSSTNKDYELFYYAMSKHVIPVSPNSFYAYLMALVFGIKGLKIEQEAKTILGELSQVQDRFTKFFADYGLVGKHISAAANKYSDSEKSAGKLNDQINKITGNKTELITE

SEQ ID NO: 53165 - DNA, 816 bp, Unknown
  Obtained from environmental sample
  misc_feature (1)..(816): n is a, c, g, or t
atggtaaaccgagctctggaaaacggaatgcctgttcatggtcattgtatggtatggcatgattggactcccgaatggatgactaaaggaacaagagcggaagtggaggacaacctaaaaatttatattactgacatattaacgcattatcatggaaagatatattcatgggatgtggtaaacgaagtaatgagggattttccttttgccgccgatgccgcaggagactggaaaaaatgtctgcgaacagattccccctggtacaaggcgttaggcgcaagatacattgaaacagccttccgcgccgcgcgggaagccgatcccgatattaccatatattataatgattatttttgttatgatgatctcaataaagttgaagcggtatataaaatgattaacgacataaataaccggtataataaagaaacaggacaggatcgaaaccttatcgaaggattgggtattcaggctcatcatcaagttaagtattttgatgaaagaaaagtacgtttgcctctggaaaagtttacgtctctaaatattgaaatttcaataagcgaactggacgtaaccgccgccagttatgatgaaggcgagggaaaggatattgttatgtcagaatatgataccgcgacacaagccaacatttatgcctgtcttttcaggatataccgggaatacgccgcttatatatcacgaataaccctttggggtgtagatgactacaacagttggctttccgccggaaccccctgcctttttgaccgctacctaaacccaaaaaaagcctataatgcggtatttaatccttaa

SEQ ID NO: 53166 - protein, 271 aa, Unknown
  Obtained from environmental sample
  DOMAIN (1)...(271): Glycosyl hydrolase family 10
  misc_feature (1)..(271): Xaa is any amino acid
MVNRALENGMPVHGHCMVWHDWTPEWMTKGTRAEVEDNLKIYITDILTHYHGKIYSWDVVNEVMRDFPFAADAAGDWKKCLRTDSPWYKALGARYIETAFRAAREADPDITIYYNDYFCYDDLNKVEAVYKMINDINNRYNKETGQDRNLIEGLGIQAHHQVKYFDERKVRLPLEKFTSLNIEISISELDVTAASYDEGEGKDIVMSEYDTATQANIYACLFRIYREYAAYISRITLWGVDDYNSWLSAGTPCLFDRYLNPKKAYNAVFNP

SEQ ID NO: 53167 - DNA, 354 bp, Unknown
  Obtained from environmental sample
  misc_feature (1)..(354): n is a, c, g, or t
atggaatccgacagcttatttgaaacggtaaaacgaattgcggtggatatttttttacaggaaggactgcgaatgcgtttggcctgcgggaaacccctaaaaattaaatttggagctgatccgtcgcgtcctgatttgcacttgggacattccgttcccctgcgaatgctccgcaaattgcaggatgccggccatgaaattatttttgtcataggagattttaccggtatgatcggagacccgtcaggacgcagtaaaacgagaaaccagctttcatttgaggaaacaagacaaaacggggacagttactttgagcaggtatcaaaaattcttgatccgcaaaagcccgtataa

SEQ ID NO: 53168 - protein, 117 aa, Unknown
  Obtained from environmental sample
  misc_feature (1)..(117): Xaa is any amino acid
MESDSLFETVKRIAVDIFLQEGLRMRLACGKPLKIKFGADPSRPDLHLGHSVPLRMLRKLQDAGHEIIFVIGDFTGMIGDPSGRSKTRNQLSFEETRQNGDSYFEQVSKILDPQKPV

SEQ ID NO: 53169 - DNA, 780 bp, Unknown
  Obtained from environmental sample
  misc_feature (1)..(780): n is a, c, g, or t
ttgtttgataccgcaaaggccgttgagccgtacgtctctgaaatgctctttacctgcgtagagcgtgagggcgaaatgaaaggtacgaacctggaaactgtacgcaaactgcgtgatactgtttcctgcctgcttaccgttgcgggcggtgtctcaagtttggatgaagtagcggagctggcgtctctaaactgcgatattcagttaggcatggccctctataccggtaagattctactcgctgacgcttttacgcggtcgcttaactggaagaaatgctgtccgccagcaacagacattaataaatcgcttcttccccttatcgttcaatctcccgacggccagatgcttatgacgggctttaccgatgccgaagcgttagccgaaactttcatgcgtggaaacgtttgtttccacagccgcacccgaaacgagctctggatgaaaggcgaaacttcaggaagtattttgcaacttctcaaaatacgcgccgactgtgacagggatacgcttcttgccgtggcggaacctgcaggccctgtttgccatacgggcgcctggtcttgttttgaaacgggtagaaaattcacctgggaatttttacaaagcattatcgtcgaacgttttaagaacccgccgcctggttcgtacaccgcgactttggacgacaagcttgtgcgggaaaaacttatggaagaagcggaagaagtttgtactgcaaaaacacacgatgaagttgtctgggaagcagccgatgttctttattttacactgtgctga

SEQ ID NO: 53170 - protein, 259 aa, Unknown
  Obtained from environmental sample
  DOMAIN (198)...(258): Phosphoribosyl-ATP pyrophosphohydrolase
  misc_feature (1)..(259): Xaa is any amino acid
MFDTAKAVEPYVSEMLFTCVEREGEMKGTNLETVRKLRDTVSCLLTVAGGVSSLDEVAELASLNCDIQLGMALYTGKILLADAFTRSLNWKKCCPPATDINKSLLPLIVQSPDGQMLMTGFTDAEALAETFMRGNVCFHSRTRNELWMKGETSGSILQLLKIRADCDRDTLLAVAEPAGPVCHTGAWSCFETGRKFTWEFLQSIIVERFKNPPPGSYTATLDDKLVREKLMEEAEEVCTAKTHDEVVWEAADVLYFTLC

SEQ ID NO: 53171 - DNA, 537 bp, Unknown
  Obtained from environmental sample
  misc_feature (1)..(537): n is a, c, g, or t
atgagaaacaaactcacattagcggtagcctctgggcttgctttggcttttaccctttcctgctcctcggagaataaggaagataacccaagcagcagttccaacaactcaaccacgtcccaaattgtttatggagaacccgtgtctctcggcggcgagacttatgagacggtcgtcatcggtactcaaacctggttcaagcgtaatttgaactacgatgtaccaaataataagtgttatgataatgaccccgccaactgcaccaaatatggcagactttacgattgggctgcggctaagagcgtttgtcctgctggttggcatttgcctagcgatgctgagtgggatgtattgctgacagcagttggcggttcttcaatcgctgggggcaagctgaaagcgactaacggctggaacaacaatggcaacggcacagacaattacggattttccgccatgccaggcggcttcggtttttcggatggcagtttcgaccgtgtcggcaacaaaggcggtggctcggccaatctatcttga

SEQ ID NO: 53172 - protein, 178 aa, Unknown
  Obtained from environmental sample
  SIGNAL (1)...(23)
  misc_feature (1)..(178): Xaa is any amino acid
MRNKLTLAVASGLALAFTLSCSSENKEDNPSSSSNNSTTSQIVYGEPVSLGGETYETVVIGTQTWFKRNLNYDVPNNKCYDNDPANCTKYGRLYDWAAAKSVCPAGWHLPSDAEWDVLLTAVGGSSIAGGKLKATNGWNNNGNGTDNYGFSAMPGGFGFSDGSFDRVGNKGGGSANLS

SEQ ID NO: 53173 - DNA, 315 bp, Unknown
  Obtained from environmental sample
  misc_feature (1)..(315): n is a, c, g, or t
atggaagaggcgaaaacaaaccgcaagcataaagacagcgtattcacaaagctgttcggcgaaaaaagcaaccttttggagctatacaatgccgtgagtgggaaaaactatcccgaaaacacggaaatcgaaataataacgctctcggatgtcctttatatggagcagctaaacgacatcgcttttgtgatagataatagactgacagtcttgattgagctccaatctacggtcaacgagaatatgcccctgcgtatgctgatatacatatctagggaatacgagaagataacaacgagcaaaaatctgaantaa

SEQ ID NO: 53174 - protein, 104 aa, Unknown
  Obtained from environmental sample
  misc_feature (1)..(104): Xaa is any amino acid
MEEAKTNRKHKDSVFTKLFGEKSNLLELYNAVSGKNYPENTEIEIITLSDVLYMEQLNDIAFVIDNRLTVLIELQSTVNENMPLRMLIYISREYEKITTSKNLX

SEQ ID NO: 53175 - DNA, 1038 bp, Unknown
  Obtained from environmental sample
  misc_feature (1)..(1038): n is a, c, g, or t
atgcttacggaaaggagccaaactatggcatttgccaaagcggaacgcgcccagctttatctgaggtgcgctttattcgggccaagcgggagcgggaaaacaatgaccgcccttcgcatggcgaaggggatagccgataaaatgggagtcccggtagcggttatcgacacggaggcgaaatcggcatccaagtacgccgacaggtttgctttcgcagtggacaacctgaaaagaaaaccgtcgaacattacctgctcaatggaggaagccaagaaagccgggtataaagtgctggtaatcgacagcctctcccacggatggcgggaactgacagaggaagttgaccggattacccaggcaagcaacagcaagaacagccttttgtcctgggggaaagtcgggccaaagcagaagcggttcatcgacgccatccttaattaccccggccatatcatcgtaaccatgaggagcaagaccgaatgggttatcggcacggccgaaaacggaaagatcgccgccgaaaagctgggcctggctcccgaacagggaaaagggattgaatatgagtttgacctgcttctcgaactcaagcaaaaccactatgccactattaccaaggacaggaccgggaagtaccaggacgaggtaattgaaaagcccggcgaagattttgggatcgcgctctatgaatggcttgcaagcggaaagcctgaaaagccagcgacagcagcggcccattctgcgaaagctgccggcaagcctcaaaaatcccaagccgtgcctgaaaaaccgaagcccgaaaagccggataaaacgttatccataaaagaacagggaaacgagattatgaaggaaatcgcggttgtcatcacggcggcaaaagacggagtgcaatactttaccgaagacgaaaaggaagaggcccgcaaagttattaaggatacgcggcttgatgaaaatggcattgctgacttgaaagactttaaagccttcctgtcggaagagcttgccaaaagggaatccaagaaagctgcctaa

SEQ ID NO: 53176 - protein, 345 aa, Unknown
  Obtained from environmental sample
  misc_feature (1)..(345): Xaa is any amino acid
MLTERSQTMAFAKAERAQLYLRCALFGPSGSGKTMTALRMAKGIADKMGVPVAVIDTEAKSASKYADRFAFAVDNLKRKPSNITCSMEEAKKAGYKVLVIDSLSHGWRELTEEVDRITQASNSKNSLLSWGKVGPKQKRFIDAILNYPGHIIVTMRSKTEWVIGTAENGKIAAEKLGLAPEQGKGIEYEFDLLLELKQNHYATITKDRTGKYQDEVIEKPGEDFGIALYEWLASGKPEKPATAAAHSAKAAGKPQKSQAVPEKPKPEKPDKTLSIKEQGNEIMKEIAVVITAAKDGVQYFTEDEKEEARKVIKDTRLDENGIADLKDFKAFLSEELAKRESKKAA

SEQ ID NO: 53177 - DNA, 375 bp, Unknown
  Obtained from environmental sample
  misc_feature (1)..(375): n is a, c, g, or t
ttggccgagtgtcgacacgtcaaatggaaagggctagggatagcccaattccgctatgaaacggacggctgcctgtggatggttacagaattgaaaacggctaaagaacttcttaatgaagggaggaagatgcacaattgcgtttcattttattcgcatgcctgcgcatcgggcgattgttctatctttactgttgaatgcgttttttcagaaggcaaaggcacagaaaaaattgccactttagaagtaaagcttgcaaaccgcgctttagttcaggcaaaagggaaatgcaatactgccatcacgcccaggacaaagaatgtaattacgcgctgggctgcggctaatatgataagcgtcaagctacaggtctag

SEQ ID NO: 53178 - protein, 124 aa, Unknown
  Obtained from environmental sample
  misc_feature (1)..(124): Xaa is any amino acid
MAECRHVKWKGLGIAQFRYETDGCLWMVTELKTAKELLNEGRKMHNCVSFYSHACASGDCSIFTVECVFSEGKGTEKIATLEVKLANRALVQAKGKCNTAITPRTKNVITRWAAANMISVKLQV

SEQ ID NO: 53179 - DNA, 1395 bp, Unknown
  Obtained from environmental sample
  misc_feature (1)..(1395): n is a, c, g, or t
ttgatccttgatgtaaaaaaccgctacggccttgccctttcttcggtcggcgctatcggcgtctccgccatgatgcacggatatcttgtctttgacaagaacggcgaccagcttgttcccttccgcacatggcgaaataccacaaccgaaaaagccgccgctcttcttaccgaagaatttaaattcaatattccccagcgctggagcatagcccatttgtatcaggcgattttgaacggagaaccgcatgtaaaagatattgattttataaccactcttgccggttatgtgcattggaaattaaccggtaaaaaagttcttggcatcggcgacgcttcaggtatgtttccggttgataacagtaaatacaatcctttaatgataaaacagtttgacgatcttaccgcttcaaataatttccaatggaaaatcgaaggcatccttcccgccgtcttgaacgcgggtgaaagaaccggagtccttacggcggaaggagcgaaactgctggacagttcaggctgcctgcgggacggtattcctttttgcccgccggaaggagacgcgggaactggcatggttgcgactaacagcgttgcggaacgtacaggcaatgtttcggcaggcacttccattttcgcgatgatcgttatggaaaaggaactgtcaaaggtataccccgaaattgacattgtcactaccccgtcggggaaacccgtggctatggttcattgcaacaactgcacttccgatattgacgcgtggataaagttgttcagagaactgctggatatgagcggggcaaaaataaacaaagcggcgctttatgacgacttgtactacaaagctctggaagcgcaagaggattgcggcgggcttctttccttcaattactattcaggtgaaactattacaggaattgatgaaggtcgtcctctgtttgcgcgtctgccggatagtaatttcaatctggcgaattttatgcggacgcttctcttttccggcatggcgacattaaagtacggcatagatattcttacagaaaaagaaaaagcaaagatagacagcttgttaggtcatggcggcttgttcaaaacaaaaggcgtaggacagcgatttatggcggcggtctttaacgcgcctgttggcgtgatggaatccgcgggagaaggaggcgcgtggggcatcgctcttcttgccgcgtttataaatcagcaaggcgaaacattggaaaaattccttgcggaaaaagttttcgccggaaagacaggcgcgcagattaaacctgatccaaaagatgtggaaagttttagaaaattcatgaaacggtataccgcaggtctcaaaattgaaatgtcagcggttgaaaatttgaaaaggggtaattatgaatcttaa

SEQ ID NO: 53180 - protein, 464 aa, Unknown
  Obtained from environmental sample
  SIGNAL (1)...(25)
  DOMAIN (1)...(182): FGGY family of carbohydrate kinases, N-terminal domain
  misc_feature (1)..(464): Xaa is any amino acid
MILDVKNRYGLALSSVGAIGVSAMMHGYLVFDKNGDQLVPFRTWRNTTTEKAAALLTEEFKFNIPQRWSIAHLYQAILNGEPHVKDIDFITTLAGYVHWKLTGKKVLGIGDASGMFPVDNSKYNPLMIKQFDDLTASNNFQWKIEGILPAVLNAGERTGVLTAEGAKLLDSSGCLRDGIPFCPPEGDAGTGMVATNSVAERTGNVSAGTSIFAMIVMEKELSKVYPEIDIVTTPSGKPVAMVHCNNCTSDIDAWIKLFRELLDMSGAKINKAALYDDLYYKALEAQEDCGGLLSFNYYSGETITGIDEGRPLFARLPDSNFNLANFMRTLLFSGMATLKYGIDILTEKEKAKIDSLLGHGGLFKTKGVGQRFMAAVFNAPVGVMESAGEGGAWGIALLAAFINQQGETLEKFLAEKVFAGKTGAQIKPDPKDVESFRKFMKRYTAGLKIEMSAVENLKRGNYES

SEQ ID NO: 53181 - DNA, 1095 bp, Unknown
  Obtained from environmental sample
  misc_feature (1)..(1095): n is a, c, g, or t
atggccggttacaacggtattttcttcagccggttatctgacaaccttgtattgcagaacagttatgtgcttattctcgcggtggggatgctgctctgtacccttaccggcaacgttgacctttccgtaggttccattatctgctttgtgggcgcggtgtgcggagtgatgattgtggatatgcatatgaacccctttctcacgatgttcgtcgcgctgcttatgggggcggttatcggcatgtggcaggggttctggatcgcctttgttaatgtcccgccctttatcgcgactttagcgggcatgcttgtattccgggggctcgggcaggcgattttgcagggacagacaaaagcgccgtttccgaaagaattccagataatttcttcggggtatatttccgatccctttggaggccttgtaatcggcgatatatcgcttcatttgttttctattgttatagggctggtgattgtcgcgttcattatcattaacgaaattgttaagcgtaaaaaacagattgcgtataactttgatttgctgcccaaaggaatctggatattgaaattgacggctatttccgtggtgcttatggcgtttaccgttgtgttcgccctgtacaggggatttccgaatatcctggtactgttggggtttcttgttattggttatcagtttatagcctcaaggacggtgcagggccgccatatttacgcgatgggcgggaacgcgaaagcggcaaagctttcaggggtcaagaccgaatgggtgatgttctggatttataccaatatggcggttcttgccgccattgcggcggtagtttttgcggcccgcttaaacgccgccacgcccaaggccggacagggcttcgaaatggacgctatcgccgcttgttatgtgggcggttcggcggtctcaggcggtatcggcaccattatcggggcggtggtgggcggcctttttatcggcgttttaaacaacggaatgtccatattgggagtcagcacggactggcagcaggcaatcaagggctttgtccttcttgccgcggtcgcgtttgatctttattccaaaagaagaagcggcaaataa

SEQ ID NO: 53182 - protein, 364 aa, Unknown
  Obtained from environmental sample
  DOMAIN (12)...(352): Branched-chain amino acid transport system / permease component
  misc_feature (1)..(364): Xaa is any amino acid
MAGYNGIFFSRLSDNLVLQNSYVLILAVGMLLCTLTGNVDLSVGSIICFVGAVCGVMIVDMHMNPFLTMFVALLMGAVIGMWQGFWIAFVNVPPFIATLAGMLVFRGLGQAILQGQTKAPFPKEFQIISSGYISDPFGGLVIGDISLHLFSIVIGLVIVAFIIINEIVKRKKQIAYNFDLLPKGIWILKLTAISVVLMAFTVVFALYRGFPNILVLLGFLVIGYQFIASRTVQGRHIYAMGGNAKAAKLSGVKTEWVMFWIYTNMAVLAAIAAVVFAARLNAATPKAGQGFEMDAIAACYVGGSAVSGGIGTIIGAVVGGLFIGVLNNGMSILGVSTDWQQAIKGFVLLAAVAFDLYSKRRSGK

SEQ ID NO: 53183 - DNA, 1557 bp, Unknown
  Obtained from environmental sample
  misc_feature (1)..(1557): n is a, c, g, or t
atgtacgatggaagaataacgaacggtgatattaaactgctttacattgcgcctgaacgtttacaaagaacggatatacctgagcttgagattaacagcgttccgcttgttgtgattgacgaagcgcattgcgtgtcacaatgggggcatgactttagaacaagttatctgcaaatagctaaatttataaaaggcattaaacctcgtcccgtagttgcggcttttaccgctaccgcaaccgttaatgtaagggaagatatttgcagattgcttgcgttacgcaaacctctttccgtaaacacaggttttgacagacccaatctttattttgaagtgcaaaaaccaaaagacaaaaaaaccgcccttttggactgccttgataaacgaaaagaagcaagcggtataatttattgcgctaccagaaaaaccgtggaagaaacctgcaattttctaataagtcacggcttcaacgccactcgttatcacgcaggtcttgccgacgaagaacgcagaaaaaatcaggacgattttatttacgaccgcaaaccggtcatggtagcgactaacgcattcggcatggggatagataaatcaaatgtgtcatacgttattcattacaatatgtccaaaaatattgaaagttattatcaggaagcggggcgcgccggacgtgacggctctcctgcggactgcattcttttgtacaatggtcaggatgtgcaaataaataagtatcttataacccatgaggaagatgaagaaaccgcagactatgagctgcaagcccacaatttggaactgcttaaacagatgactttctatgctacaggacaagactgccttcgcaaacgcctgcttgcctacttcggcgaacaaatctcggcaaactgcggcaactgctcaaactgcctgacggaatttgaggagaccgatgttaccttggaagcgagaaaaatcgtctcctgtgtttttcgcttgaaacagcgaggcagaagtttcggcaagactatgataatcgacattttgcgcggcagtaagaacgagaaaattatccgcttcggttttgacactctaagcacatttgcgataatgtccgacacaaaagcgcacagaattcgccaaatccttgatcacctaatcgacaaaaactttttgtttgtggaagaaggggaatatcctgttgtaacgcttggttatgcggaaggactgctcaaagaagaagagcgtgttttaatgaaactgccgcaagagcgtgaaaaaacttccgatgacaagaagcataagaaaaaaggcgaaaaactttttgatacgcaaaatgcgtcggaggatattgatgagggcttgctggataaattgaaaaagttacggaaggaaatcgccgcaaaggaatctgttcccgcatacatagttttttccgacgcaagcctgcgggatatgtgccgcaaaaagccgacatcgcttgttcagttttcaggcgttaacggggtggggagtgtgaagctggaaaagtacggagatatatttatcagtcttattcagaaatattacgaaggataa

SEQ ID NO: 53184 - protein, 518 aa, Unknown
  Obtained from environmental sample
  DOMAIN (442)...(518): HRDC domain
  misc_feature (1)..(518): Xaa is any amino acid
MYDGRITNGDIKLLYIAPERLQRTDIPELEINSVPLVVIDEAHCVSQWGHDFRTSYLQIAKFIKGIKPRPVVAAFTATATVNVREDICRLLALRKPLSVNTGFDRPNLYFEVQKPKDKKTALLDCLDKRKEASGIIYCATRKTVEETCNFLISHGFNATRYHAGLADEERRKNQDDFIYDRKPVMVATNAFGMGIDKSNVSYVIHYNMSKNIESYYQEAGRAGRDGSPADCILLYNGQDVQINKYLITHEEDEETADYELQAHNLELLKQMTFYATGQDCLRKRLLAYFGEQISANCGNCSNCLTEFEETDVTLEARKIVSCVFRLKQRGRSFGKTMIIDILRGSKNEKIIRFGFDTLSTFAIMSDTKAHRIRQILDHLIDKNFLFVEEGEYPVVTLGYAEGLLKEEERVLMKLPQEREKTSDDKKHKKKGEKLFDTQNASEDIDEGLLDKLKKLRKEIAAKESVPAYIVFSDASLRDMCRKKPTSLVQFSGVNGVGSVKLEKYGDIFISLIQKYYEG

SEQ ID NO: 53185 - DNA, 534 bp, Unknown
  Obtained from environmental sample
  misc_feature (1)..(534): n is a, c, g, or t
atggaaataattaaaccctacttaaaagagggcaaaaaacatgaacttaattggaaatttatcaatacttgctggaaaaaagattatcgtgaagctcaatatacagcgatagaatatttagaaagtttagaaaaattattaaccgataacgatttacctaatcttaaaaaacttattgttacaaaatcatggtgggatactaccgactcaatagacgcaataatcggaaaaattatattcaattacaaaaaacttgaaaaagaaatgcttaaatggtcaaaagatgaaaatatttgggtaagaagggtatcaattgattttcaactgcaatacaaagataaaaccaaccaaaaattatttgaacaaattatagtaaacaatttcggaacggatgaattttttataaacaaagccatcggctggagtttaagagaatactcaaaaacaaataaaaaatgggttaaagattttattaataaatataaaaatcaacttcataaattgagcataaaagaagcgtcgaagtatttataa

SEQ ID NO: 53186 - protein, 177 aa, Unknown
  Obtained from environmental sample
  misc_feature (1)..(177): Xaa is any amino acid
MEIIKPYLKEGKKHELNWKFINTCWKKDYREAQYTAIEYLESLEKLLTDNDLPNLKKLIVTKSWWDTTDSIDAIIGKIIFNYKKLEKEMLKWSKDENIWVRRVSIDFQLQYKDKTNQKLFEQIIVNNFGTDEFFINKAIGWSLREYSKTNKKWVKDFINKYKNQLHKLSIKEASKYL

SEQ ID NO: 53187 - DNA, 1431 bp, Unknown
  Obtained from environmental sample
  misc_feature (1)..(1431): n is a, c, g, or t
atgacggaggtaaagccgatgaccgtcgtccgtagcacggtaaaatataaatccgagagcatgatcagcgaaatatacgaagctcagcctctatatccgctttataggattgaagcggtcggtttggactccattagcctgataaattggagtagctattttgttgataggatagcgttgacaggcaggaatgagcatggtgtggatttctatggttttcatagtgacaaaggcggttgggcgttgacagacgccgccggcaatccgcacgatggcggtatagcgaggctgacgacggaaacgggtaccggcaggcctattatcgtcgcggacggtaacaacaccggtgtggtctatctgcgttacctcattgccaatgacgtttacagttatgatggtagtacccgttatatgacggcgagcgatttgggtatgcgtacggctatcatcccggtatacgtcagagccgcaggctctttgggcatcgccgcgcaaccgcagggcggtaccgtaaccgttgcgtccgccgccacctatccgttgtcggttgaagtggtcgcgaccggcaacgtcagttaccagtggtacataaataccgtaccaagcaataccggcggtttgccgatttccggtgcgaccggccctacgtacaatgctccgttgagtactgtcggcgtattctactactatgtagtggtgtcaatcgatgatccgtcggtagaaccggttgtgagcatgttggcgacagttcaggtagatgataatgttgacgtgaagccgccaacggacaccgcctataaagtgacgttcagcgccggtgcaaacggtgatctcaaggcaacggttaacggcagtcctattacaacgggtacatcggtacaaagcggcaagaatattgtatttaccgcgattcctgccgaaggctacagtgtaaatagctggacggtcaacggagtgacttctacaggtaacaccaacaccacgtatacaattacaagcgtttcgtcggtatcgacggtagctgtatcgtttatcaagagcatatccgtagcgtcgcccgaccgagtagttccagccgttcggcctgatggggaggtggcggtagtagtgccggtaaacccgctgatcgccgagttctctgtgggccccaatccggttggcaggtcctacggcaaagtgagtttcttccgcaacggcggccgcgtagcttatgcgacgttgtcgatttatgacgctactggtaatgttgttaggaagatacgcgtcattgacgacgccatcggtagtcaaacaaggcgtaaggtgagttcgtggaacctgcgggacgataagggccgtccggtgccggagggtacgtatgtggtcaagggcgtactgaaaacgtccggcggcaagcgtgaggcggtgtcggtggtcgtgggtgtgaggtag

SEQ ID NO: 53188 - protein, 476 aa, Unknown
  Obtained from environmental sample
  misc_feature (1)..(476): Xaa is any amino acid
MTEVKPMTVVRSTVKYKSESMISEIYEAQPLYPLYRIEAVGLDSISLINWSSYFVDRIALTGRNEHGVDFYGFHSDKGGWALTDAAGNPHDGGIARLTTETGTGRPIIVADGNNTGVVYLRYLIANDVYSYDGSTRYMTASDLGMRTAIIPVYVRAAGSLGIAAQPQGGTVTVASAATYPLSVEVVATGNVSYQWYINTVPSNTGGLPISGATGPTYNAPLSTVGVFYYYVVVSIDDPSVEPVVSMLATVQVDDNVDVKPPTDTAYKVTFSAGANGDLKATVNGSPITTGTSVQSGKNIVFTAIPAEGYSVNSWTVNGVTSTGNTNTTYTITSVSSVSTVAVSFIKSISVASPDRVVPAVRPDGEVAVVVPVNPLIAEFSVGPNPVGRSYGKVSFFRNGGRVAYATLSIYDATGNVVRKIRVIDDAIGSQTRRKVSSWNLRDDKGRPVPEGTYVVKGVLKTSGGKREAVSVVVGVR

SEQ ID NO: 53189 - DNA, 684 bp, Unknown
  Obtained from environmental sample
  misc_feature (1)..(684): n is a, c, g, or t
atgattgaatatgtggtgccctcgaatattgatgacaggactctggcaaaagcggcgcgggttttggaaggcggcggaattgtcgccttacctaccgatacgagctggagcattgtctgttctcttaaatcccccaacggcattaagaagctgaagaaactggccggcgagagggacgagcggcattttaccctgctctgctcgggtatctcgcagtttggggaattgtgcagcatggataacagccgtttccgcatgataaaccgcctttcgccggggccttatgtatttattctgaaaacgcttctgggcaccgaaaaggccctggacatacgccggaaggaagtcggagtcagaatccccgatcattccattccccttgcccttatcgatacgcttcagcaccccctgtactcgataacagccaaaaaatccatgcaggaagagactggctctgattatgactctgatgattatgactctgaaaactcagaaaagaccgaacttccgcccattcccgaagacaacctctttgaaggcggatgggagcttgacgggatcgacggcctggatttgattttggacggcggcgaggagcgggagcgtattttctccaccatactggatttatccggcgatgatgttaagctgcttagacagggcgccggcccctggccagtctaa

SEQ ID NO: 53190 - protein, 227 aa, Unknown
  Obtained from environmental sample
  DOMAIN (19)...(221): yrdC domain
  misc_feature (1)..(227): Xaa is any amino acid
MIEYVVPSNIDDRTLAKAARVLEGGGIVALPTDTSWSIVCSLKSPNGIKKLKKLAGERDERHFTLLCSGISQFGELCSMDNSRFRMINRLSPGPYVFILKTLLGTEKALDIRRKEVGVRIPDHSIPLALIDTLQHPLYSITAKKSMQEETGSDYDSDDYDSENSEKTELPPIPEDNLFEGGWELDGIDGLDLILDGGEERERIFSTILDLSGDDVKLLRQGAGPWPV

SEQ ID NO: 53191 - DNA, 831 bp, Unknown
  Obtained from environmental sample
  misc_feature (1)..(831): n is a, c, g, or t
atggccgagctggtcgcgcggcggaagagacaaactttccgctacaactttaacagtgaaactaaagagaccgtaatctccggcatgggcgagcttcaaatccatatcattctggacaagatgaaaaccaaccaaaaaatcgatgtggaaacccgcgtacccaagattgcttaccgtgaaacgataaccaaaaaagcttccgccgagtatacccataaaaaacaaaccggcggtcacgggcaatacggtaaagttgtgctggaaattgccccattaagccggggcgaaggctataaatttgaaaataagattttcggcggagcggttcccaaaaactacatccccggcgtggagaagggcatagccgaaggaatggctcatggcacaatagcccagtatccgactgtggatgtggaagtagctatagtagacggaaaataccatccggtggattcttcggaactttccttcaaacttgccgcccgcaacgccttccgcgaatcaatgcgtcaggcgaatcccacattgctggaacctgtaatgaacctgattgtttttatcgaggaaaaatacctgggcgatgttatgagcgacctttccggcaagcggggaaaaattctcgggcaggattcggcgagcggcatcgcggaggtgcgcgccgaggttcctcaggccgagttgctgcgttattcgatagatctgcgctcgatcacatccggcacgggctccttctccgtggcgttcagtcactacgcgccgatttccggacgcatcgccgacgaggtaattaaggcaagggaatctttncaggtacaggaagccgatgaataa

SEQ ID NO: 53192 - protein, 276 aa, Unknown
  Obtained from environmental sample
  DOMAIN (175)...(262): Elongation factor G C-terminus
  misc_feature (1)..(276): Xaa is any amino acid
MAELVARRKRQTFRYNFNSETKETVISGMGELQIHIILDKMKTNQKIDVETRVPKIAYRETITKKASAEYTHKKQTGGHGQYGKVVLEIAPLSRGEGYKFENKIFGGAVPKNYIPGVEKGIAEGMAHGTIAQYPTVDVEVAIVDGKYHPVDSSELSFKLAARNAFRESMRQANPTLLEPVMNLIVFIEEKYLGDVMSDLSGKRGKILGQDSASGIAEVRAEVPQAELLRYSIDLRSITSGTGSFSVAFSHYAPISGRIADEVIKARESXQVQEADE

SEQ ID NO: 53193 - DNA, 837 bp, Unknown
  Obtained from environmental sample
  misc_feature (1)..(837): n is a, c, g, or t
ttggccgagttggtctgcacaattttaatagaatccgggcttgatgttccaaatgccaatactataataatcatgaacgcgcagcaatttggcgttgggcagttgtatcagttgaggggcagggttggcaggtctgctatacaggcgagggcttacctggtaacccctgaggggggggcgggggtgtcaaaggctgcaaagaaaaggcttgcggctatggagcgttttaacgatttgggttccggttatcaggttgctatgcgagatttggaaattcgcggagcgggaaatttgctgggaatggagcagcacgggtttatagaggaaataggttttgaaacttatgtgagaatggttaaggaagcggttgaggaactgcgcggaaccaaagacgacactccggtcaaaccgcgtttggaactgcgcgtcaacgcttatctgccggagaactggataaacgacggacttgccagaatttccatttaccagcgcattgcccgtgcagaaacaggcgaagaaatagccttgctctccgatgaattgaaagaccgatttggcaccattccccaacaagccgaagcactcctgatgagcgcggaaatagggatactggcaaaaaaatattccataacgggcatagcccgcaaagacggcatcgcagctcttacattctcggacaaaatcacagccaaatcccccatcctcgcggatttatacgcaaagtgcaaattcccgctccgctttttggcaacaacgcctatgcaagctgttatggaaattggattttttggagcggaaaaagaagtggaaaaactgcgggattttttgatgttgtga

SEQ ID NO: 53194 - protein, 278 aa, Unknown
  Obtained from environmental sample
  DOMAIN (140)...(248): TRCF domain
  misc_feature (1)..(278): Xaa is any amino acid
MAELVCTILIESGLDVPNANTIIIMNAQQFGVGQLYQLRGRVGRSAIQARAYLVTPEGGAGVSKAAKKRLAAMERFNDLGSGYQVAMRDLEIRGAGNLLGMEQHGFIEEIGFETYVRMVKEAVEELRGTKDDTPVKPRLELRVNAYLPENWINDGLARISIYQRIARAETGEEIALLSDELKDRFGTIPQQAEALLMSAEIGILAKKYSITGIARKDGIAALTFSDKITAKSPILADLYAKCKFPLRFLATTPMQAVMEIGFFGAEKEVEKLRDFLML

SEQ ID NO: 53195 - DNA, 459 bp, Unknown
  Obtained from environmental sample
  misc_feature (1)..(459): n is a, c, g, or t
gtgttccttgtatacgtttcaaatgtgcgtattcctctttcgcacagaattacattatcgtttccttccgacatgatgtactccgcgctcatcaaaagttcctgcaatgtgttcgcgaatccgcgcttcagaaggatgggcttcttcgactgccccacttcctttaacagctcgaaattctgcatattccgcgcacccacctggatcacgtccacatgctcgaacaagggcagatgcatggcgttcattatttccgaaacgatgggcagtccggttttggctttgactttcaataagagatcaatgccttccggtcccataccctggaaggcatacggcgacgtgcggggtttgaacacgcctccgcgcaggagggtagcgccagaggctttcacgctctcggctatgctgagtatttgttcaggcgactccacggagcagggcccggcaatcacctga

SEQ ID NO: 53196 - protein, 152 aa, Unknown
  Obtained from environmental sample
  misc_feature (1)..(152): Xaa is any amino acid
MFLVYVSNVRIPLSHRITLSFPSDMMYSALIKSSCNVFANPRFRRMGFFDCPTSFNSSKFCIFRAPTWITSTCSNKGRCMAFIISETMGSPVLALTFNKRSMPSGPIPWKAYGDVRGLNTPPRRRVAPEAFTLSAMLSICSGDSTEQGPAIT

SEQ ID NO: 53197 - DNA, 975 bp, Unknown
  Obtained from environmental sample
  misc_feature (1)..(975): n is a, c, g, or t
atgtacggcatgtttcacttacggcttanccgaaacgctcaacgcaagcggaatgttggctgttttaccgctggcatgtttcttggaaatatgcaatttgtgcataagcagggcgtttataatttttcgtctgctatatccatgatttcaaacattctgctatttgtgctgctaggcgttttggttgagccacgcagttggtttaatgaaaatcttgttttaaaaggagttttgctctttgttttcctgtcttttgtagcaagacccgccgcagtgtttttgggaactattgcgatgggcataccgtttaaagaccggttgtttgtagcttgggcggggttgcgcggcgcggtgcccattgtgcttgccacatatccaacagctcacaacatggaaaacggaatggaaattttcaatttggtattttttgcggtgttgctctctctgatgattcaaggctcgtcgcttggcaaagtagcaaagctgttgaaactttccacagagtctcgccccgaaccgccttacagccttgagtttttcacaaagaatgatatggaagccgggcaaaagataaccgtatttaccattgacctgccagacccggaaggtgccaaaggccccctgatacgtgatttaaggttgccggaaaatacgcttttgctgatgatagcacgcaggcaaagggtttcttcgcttttcagaaaaactcaaaaaattataagccttataagagagaggcacggcgaagaggtgaaagaactggaagataaaacttgggctatattcaacaaaataaacgagaaaaaaccttttaataaagacgaagaggaagatgtttggcaagtactcccaccaagaggagataccgctctgtgcggctgggaccaaataaccgttctttcaaaagtggaagacgaagaaaaaatcagagaagtgctgctggattcttttaataaggttaagtcaacagtttag

SEQ ID NO: 53198 - protein, 324 aa, Unknown
  Obtained from environmental sample
  misc_feature (1)..(324): Xaa is any amino acid
MYGMFHLRLXRNAQRKRNVGCFTAGMFLGNMQFVHKQGVYNFSSAISMISNILLFVLLGVLVEPRSWFNENLVLKGVLLFVFLSFVARPAAVFLGTIAMGIPFKDRLFVAWAGLRGAVPIVLATYPTAHNMENGMEIFNLVFFAVLLSLMIQGSSLGKVAKLLKLSTESRPEPPYSLEFFTKNDMEAGQKITVFTIDLPDPEGAKGPLIRDLRLPENTLLLMIARRQRVSSLFRKTQKIISLIRERHGEEVKELEDKTWAIFNKINEKKPFNKDEEEDVWQVLPPRGDTALCGWDQITVLSKVEDEEKIREVLLDSFNKVKSTV

SEQ ID NO: 53199 - DNA, 672 bp, Unknown
  Obtained from environmental sample
  misc_feature (1)..(672): n is a, c, g, or t
atggaatattggttaaatttttttacgaccagcattgctgataatatcgtttatctggcgattccgttaattcttttagccgtagtggtatctgcagttcatttggataaaaaaagcattcccgttattctagtggctctgttcgctggaattgtctttggcaaagacggacttaagttttgggaattcaacaatatgattttggcgaaccagctcgcaaacttggcgttggtttttgttctgtttcacggcggattttgcacggaaaaaaataatttaaaactggtagcattgcctgcggtggggttggcttcttggggagttctattaacagcggtatttacttttgtatgcttgtattttattttgggctgggataaaaatctagctctcttgctggctgtgataatatcctctactgatgcggctgcaattttttcaattttaagaaaacaaccccttagccataagctcagctcaactatagaaatagaaagcgcagccaacgatcccatggctattttgctgacaatagtaactgtgcaaaccttgacctccagcgagaatttgagctttaatgtttttgtttggcaatttttgtggaagtttaccgccggacctattttgngttatgtaatagcaaagatgacggtgcggctcataacaggctaa

SEQ ID NO: 53200 - protein, 223 aa, Unknown
  Obtained from environmental sample
  misc_feature (1)..(223): Xaa is any amino acid
MEYWLNFFTTSIADNIVYLAIPLILLAVVVSAVHLDKKSIPVILVALFAGIVFGKDGLKFWEFNNMILANQLANLALVFVLFHGGFCTEKNNLKLVALPAVGLASWGVLLTAVFTFVCLYFILGWDKNLALLLAVIISSTDAAAIFSILRKQPLSHKLSSTIEIESAANDPMAILLTIVTVQTLTSSENLSFNVFVWQFLWKFTAGPILXYVIAKMTVRLITG

SEQ ID NO: 53201 - DNA, 846 bp, Unknown
  Obtained from environmental sample
  misc_feature (1)..(846): n is a, c, g, or t
gtgtttttaatttttcgtctagttcggttagcacgcggcaggttccaagtgcaatttcataagctaatgctctgttgttttggggcaagttttcacaggtttgttgcaggttgttttgaacaaagccgccgccctttttccagtttaaaagagcgttcaatgctgctatgcgaggtgaaagtccttgagaattcatttatagcctgtgggcaatatagtaaatgcgagttgaaaattttttatctttactcagtgttactttcttccatatcagggcttggtcccaaaaaaatagctgcgttaaaagaaagcggcataaacacgctttttgatttgctttcgtatttgccgcgagattggatagaccagcggcgaataacaaaaataaaggatattaaagcaggcgagcgtgttgttttggtggggcacatagtgcgtagtgcaatgatttacaaggggcgtgcgagatttagcgcaaccttgcaagacgacacaggaagcattgaatttgtgttttttggagcaccgcatcactggcaagccagattaaaaaacggctcgcgctgggttgccattggaaaagggacggtgttccgcactatgcaaatggtgcaccccgatttgcaagctctggaagaagacgaggaattcagcggtaatatacttcccatttacacgataacagaatcaatgcgagaagctagaatggagagcaagtttcttgcaaaactatacaaaggcctttttgaaaaaaacttgaatctcattttaccgcccgaagagcatatttgccccaccggagcttttgagtttcttaaaaatgcgaccactcttagagaattttaa

SEQ ID NO: 53202 - protein, 281 aa, Unknown
  Obtained from environmental sample
  DOMAIN (138)...(211): OB-fold nucleic acid binding domain
  misc_feature (1)..(281): Xaa is any amino acid
MFLIFRLVRLARGRFQVQFHKLMLCCFGASFHRFVAGCFEQSRRPFSSLKERSMLLCEVKVLENSFIACGQYSKCELKIFYLYSVLLSSISGLGPKKIAALKESGINTLFDLLSYLPRDWIDQRRITKIKDIKAGERVVLVGHIVRSAMIYKGRARFSATLQDDTGSIEFVFFGAPHHWQARLKNGSRWVAIGKGTVFRTMQMVHPDLQALEEDEEFSGNILPIYTITESMREARMESKFLAKLYKGLFEKNLNLILPPEEHICPTGAFEFLKNATTLREF

SEQ ID NO: 53203 - DNA, 684 bp, Unknown
  Obtained from environmental sample
  misc_feature (1)..(684): n is a, c, g, or t
atggaagattacctgcccggtttttaccagcattcgcttgtttacatttcaggccccagccacgccgaggaagtgtcccgggggaaaattaccggccttatagccgccagtgaaaacgcgaagaattccatccgtttcagggatttattaaaaagcccggggctttttgtttattcttctttggacgttcacggagttcaggcggcggcggcgtctaaaaacgtaatagccatcgcttttggaatgttagacgcaataaaatcaataggcggctccgacatgttcggcgacggcacggaatcccttctgcttgcggcgggcttaaacgaaatacagctgcttggaaaagcccttggcgcgactcatcccgaaacattcacttccatcgcgggaatcggcgatttggacgtaacatgccgctcaatttacggaaggaacaggcgtttcggcagggaaataatcgaaaaaaatattttagaaccgtataaagatttagacgatcttttaacgcgtatcggggaaataagttatcttccggaaggcgtagcggcggcaaaatacatcagggttctcgcggaaaagcataaacttaaaatgcctgtttccataggattaagcagaatattaaaccgcgaacttgatccttatgaatttgtaaaggatttctttgaagacttgaggtaa

SEQ ID NO: 53204 - protein, 227 aa, Unknown
  Obtained from environmental sample
  DOMAIN (61)...(222): NAD-dependent glycerol-3-phosphate dehydrogenase C-terminus
  misc_feature (1)..(227): Xaa is any amino acid
MEDYLPGFYQHSLVYISGPSHAEEVSRGKITGLIAASENAKNSIRFRDLLKSPGLFVYSSLDVHGVQAAAASKNVIAIAFGMLDAIKSIGGSDMFGDGTESLLLAAGLNEIQLLGKALGATHPETFTSIAGIGDLDVTCRSIYGRNRRFGREIIEKNILEPYKDLDDLLTRIGEISYLPEGVAAAKYIRVLAEKHKLKMPVSIGLSRILNRELDPYEFVKDFFEDLR

SEQ ID NO: 53205 - DNA, 774 bp, Unknown
  Obtained from environmental sample
  misc_feature (1)..(774): n is a, c, g, or t
atggctcttcttgaggcggacgtaaacctgcgcgtcgtccgccgctttgtcaactccacgattgaggaagcaaaaggcgaaaaagtactgcgttcggttgatcccggccagcaatttgtaaaaatagtccatgacaaacttgtttcctttcttggagacgctgacccttcaagccgcgccttaaaattacgcggccccgatgtaatctccgcggttcttatgcttggtttgcaaggttcaggcaaaaccacaagcgcggcgaaactcgcgctgcgcctgaaaaaagaaggccgcaaaccaatgctggtagcctgcgatcttgtgcgccccgcggcgatggaacaactcgctgtcctcggaaaccagattgggattcccgtccacaaagaagacggcgcgaaggacagcgtcaaggtgtatcaaaacgccctctcctgggcaaatcaaaacatgatcgacacaatgatcattgacaccacaggccgcctgcaaattgacgaaccgatgatgcaggagctttcccgtcttaaagacgccgccaagccagatgaaatgctgcttgtcgccgactcaatgacaggacaagccgccgccgacatcgccaaaaccttcgacgaaaaaatcggccttacgggcgttgtccttaccaagttcgattccgacacacgcggcggcgcggcgctctcgctgaaaaccgttacgggcaaaccgttaaaattaccggcacaggcgaaaagcccgaagactttgagcccttccaccccgacagattag

SEQ ID NO: 53206 - protein, 257 aa, Unknown
  Obtained from environmental sample
  DOMAIN (1)...(52): SRP54-type protein, helical bundle domain
  misc_feature (1)..(257): Xaa is any amino acid
MALLEADVNLRVVRRFVNSTIEEAKGEKVLRSVDPGQQFVKIVHDKLVSFLGDADPSSRALKLRGPDVISAVLMLGLQGSGKTTSAAKLALRLKKEGRKPMLVACDLVRPAAMEQLAVLGNQIGIPVHKEDGAKDSVKVYQNALSWANQNMIDTMIIDTTGRLQIDEPMMQELSRLKDAAKPDEMLLVADSMTGQAAADIAKTFDEKIGLTGVVLTKFDSDTRGGAALSLKTVTGKPLKLPAQAKSPKTLSPSTPTD

SEQ ID NO: 53207 - DNA, 318 bp, Unknown
  Obtained from environmental sample
  misc_feature (1)..(318): n is a, c, g, or t
gtggaagggctcaaagtcttcgggcttttcgcctgtgccggtaattttaacggtttgcccgtaacggttttcagcgagagcgccgcgccgccgcgtgtgtcggaatcgaacttggtaaggacaacgcccgtaaggccgattttttcgtcgaaggttttggcgatgtcggcggcggcttgtcctgtcattgagtcggcgacaagcagcatttcatctggcttggcggcgtctttaagacgggaaagctcctgcatcatcggttcgtcaatttgcaggcggcctgtggtgtcaatgatcattgtgtcgatcatgttttga

SEQ ID NO: 53208 - protein, 105 aa, Unknown
  Obtained from environmental sample
  misc_feature (1)..(105): Xaa is any amino acid
MEGLKVFGLFACAGNFNGLPVTVFSESAAPPRVSESNLVRTTPVRPIFSSKVLAMSAAACPVIESATSSISSGLAASLRRESSCIIGSSICRRPVVSMIIVSIMF

SEQ ID NO: 53209 - DNA, 459 bp, Unknown
  Obtained from environmental sample
  misc_feature (1)..(459): n is a, c, g, or t
atgggcgacgttgtcagccttgtagaaaaagcgcaggaagtaattgatcaaaaagaagctcttgaactccagagaaaaatggaaaaagagaactttactcttgaagactggctttctcagcttcgcgccgtaaaaaaaatgggctcgcttcaaaaaatgcttgagatgatccccggaatgcaggggcagatcagcgaggacgacattaacaaagaggaactgaaacatcaggaggcgatattaagctccatgacgcgcaaggagagagcgaaccatttgatcatcgggccgccgcgcagaagcagaatcgcccgaggctccggcacttcggtcgctgaagtagcgcgattactgaaaaaatttgagaaaatgcgcggcatgatgaaaaagatggcaaagggcgcgagaaccggcgcaatgaacggaatgatgggcggcttcccgggatttgggcagtag

SEQ ID NO: 53210 - protein, 152 aa, Unknown
  Obtained from environmental sample
  DOMAIN (31)...(128): Signal peptide binding domain
  misc_feature (1)..(152): Xaa is any amino acid
MGDVVSLVEKAQEVIDQKEALELQRKMEKENFTLEDWLSQLRAVKKMGSLQKMLEMIPGMQGQISEDDINKEELKHQEAILSSMTRKERANHLIIGPPRRSRIARGSGTSVAEVARLLKKFEKMRGMMKKMAKGARTGAMNGMMGGFPGFGQ

SEQ ID NO: 53211 - DNA, 888 bp, Unknown
  Obtained from environmental sample
  misc_feature (1)..(888): n is a, c, g, or t
atgtctgtaaaattcagaccttataaattattagctgattttgataatgtcaataaataccttactgatgtttttaatttggaaacattaaacggttatttgcttcctcaatattttgaatatgcccatactcacccgttatttaatttcaaactggcacataggtttggcttatgggaagatgaaaatgagcttattggaattgcctgttatgatatgtatcccggagagtgttttatcagcgtaaataacaattttaaatcattattgccggagatgataagttattcagaagaatatttatctgaaaaaaataacgggaaaacgtctttagcaatatctgttattgataaagaaattgataaaaaagatttattgaaaaaatccggctacgaaaaaaatcactctgaaccggtaactgtattttcgtatgacaacccattcccgcatcaaattcttccggaaggattttccgttatatcattggaagatgaaaatgactttaataaaatacacgattgtttatggtatgggtttgatcacggtccggaacctgatcccgacaatgatattgacagccggatattagcgcaaagcggaccaaatttccgcaaagacttaactacaataataaaagccccaaacggcgaatacgcgtgttttgccggaatgtggctggacaagcaaaatagctatgcgtatcttgaaccattggcgacagtgccaaaataccggcgcatgggattggcaaaggctgcgctgattgaaggaatgaaaaagacaaaagaatcgggcgcaaagtattgctttggcgggacgggtgaattttataaaagcataggttttaaggctattgcaaaccgtgaattatggaaaaaggaatggtaa

SEQ ID NO: 53212 - protein, 295 aa, Unknown
  Obtained from environmental sample
  DOMAIN (210)...(283): Acetyltransferase (GNAT) family
  misc_feature (1)..(295): Xaa is any amino acid
MSVKFRPYKLLADFDNVNKYLTDVFNLETLNGYLLPQYFEYAHTHPLFNFKLAHRFGLWEDENELIGIACYDMYPGECFISVNNNFKSLLPEMISYSEEYLSEKNNGKTSLAISVIDKEIDKKDLLKKSGYEKNHSEPVTVFSYDNPFPHQILPEGFSVISLEDENDFNKIHDCLWYGFDHGPEPDPDNDIDSRILAQSGPNFRKDLTTIIKAPNGEYACFAGMWLDKQNSYAYLEPLATVPKYRRMGLAKAALIEGMKKTKESGAKYCFGGTGEFYKSIGFKAIANRELWKKEW

SEQ ID NO: 53213 - DNA, 639 bp, Unknown
  Obtained from environmental sample
  misc_feature (1)..(639): n is a, c, g, or t
ttgtctgcttccggaaaagttccaaaatccatactgggcgacatactcgccggaggggcggataaaatcgcggaagccggggcggtactgggcggcggccactcgatctacgataaggaaaccaaatacggccttgccgtaaacggccttattgaaataaaaaacattattcacaacaacacgccgcgcataggacacagtctgcttctgacaaagcccctgggagtgggtattgtcatggccgcgcaaagggtaggcatggcaagcgctgacgccatgcaaaaggccgtgaacagcatgagaaggctgaaccgctatgccgcggaaaaaatgctcaggtttaatattagcgcctgtaccgacgtgacgggtttcgggctgctctgccatcttctggaaatgtgcggcaattcagcctcagcggagatttggccggaggctctgccgattatcaatgaagccgcggattacgcgaatgattttctgctcacggccgcggcccagcgcaaccggaatcattttggcaaacggggacaggtggaaaagctgcccttcgccgcgcaggagttgatgtttgatccccagacctccggcgggctgttgatctgcgttgatgccgaacagtcccaacaactgtaa

SEQ ID NO: 53214 - protein, 212 aa, Unknown
  Obtained from environmental sample
  DOMAIN (63)...(189): AIR synthase related protein, C-terminal domain
  misc_feature (1)..(212): Xaa is any amino acid
MSASGKVPKSILGDILAGGADKIAEAGAVLGGGHSIYDKETKYGLAVNGLIEIKNIIHNNTPRIGHSLLLTKPLGVGIVMAAQRVGMASADAMQKAVNSMRRLNRYAAEKMLRFNISACTDVTGFGLLCHLLEMCGNSASAEIWPEALPIINEAADYANDFLLTAAAQRNRNHFGKRGQVEKLPFAAQELMFDPQTSGGLLICVDAEQSQQL

SEQ ID NO: 53215 - DNA, 300 bp, Unknown
  Obtained from environmental sample
  misc_feature (1)..(300): n is a, c, g, or t
atggttagtaagcatagcgtgatactttcaagagaagattgtgagccaaaaccccgatccctagtccctgatccccagtccctaaaaaaggagaaatcaatgccaaaggaaactgacagtttgcttgcaaactgcaccagtgggggatgtggggccaagattgggccgggggagctttccagcctgctgggtaatattccggctaacagggacgagcgtctgctggtcggctttgactgttcggatgacgcggctgtgtacgcgctggatgatgataaagctatagtgtcaacgcgttga

SEQ ID NO: 53216 - protein, 99 aa, Unknown
  Obtained from environmental sample
  misc_feature (1)..(99): Xaa is any amino acid
MVSKHSVILSREDCEPKPRSLVPDPQSLKKEKSMPKETDSLLANCTSGGCGAKIGPGELSSLLGNIPANRDERLLVGFDCSDDAAVYALDDDKAIVSTR

SEQ ID NO: 53217 - DNA, 597 bp, Unknown
  Obtained from environmental sample
  misc_feature (1)..(597): n is a, c, g, or t
atgcttgacgagccgttttccgccctggacagccatttgcgcggccaactgcgaatccaaatgaaaaaacttctcggcgattacggcggcccgaccatgatggtgacgcataaccgcgatgaggcctacaatttatgcgcccggatcgcgctcatggacgcgggagcgattttggcgctgaaaccggcgaaggaactgttcagtaaccccgaatcggttgcaggggctatgataacgggctgtaaaaacatctgcgccgcaaaaaagaccggcgatcacgaggttgaagtcccggactggggcatacgccttgtcacggcgcaacctctgcgcgaaggcctgtgcgccgtcggaatccgcgcccactattttgattctgaaatcaggcaaaatcgtttcccggtacgtttcaccggcgaaatggaggagccttttgaattttgtctgcaattccgttataaaaaccaacgggataatgctcaggatgttttatggctgtttccgaaagaaaagaaaagcgtcgacattccggcaatgctgggggtggaacctgaaaatgtgctgccgttgtaccaagagaaagggactggggactag

SEQ ID NO: 53218 - protein, 198 aa, Unknown
  Obtained from environmental sample
  misc_feature (1)..(198): Xaa is any amino acid
MLDEPFSALDSHLRGQLRIQMKKLLGDYGGPTMMVTHNRDEAYNLCARIALMDAGAILALKPAKELFSNPESVAGAMITGCKNICAAKKTGDHEVEVPDWGIRLVTAQPLREGLCAVGIRAHYFDSEIRQNRFPVRFTGEMEEPFEFCLQFRYKNQRDNAQDVLWLFPKEKKSVDIPAMLGVEPENVLPLYQEKGTGD

SEQ ID NO: 53219 - DNA, 474 bp, Unknown
  Obtained from environmental sample
  misc_feature (1)..(474): n is a, c, g, or t
ttgatgcttacggtagatattcaaaaaaagctgggcgcgttcagcctgaatgtgtcgtttaacgcggctgaaggcgtgacggggattcttggcgcgtccggctgtggtaaaagcatgacgctccgctgtatcgccggcattgaaaagcccgatcaggggcgcataacgcttgacgacgcggtattgttcgacagcgaacagggaattaatttaaagccgcaggaacgcaaagtgggctatttgttccagaattacgcgctgtttcccaacatgaccgttgaaaaaaatatactatgcgggctgtatcatgagaaagacaggacgaaacgccagcaaatgttagacgacacgatttatctgctgaaactggagggcctggaaaaacacatgccgtcncagctttcgggcggccagcagcagcgcgcggccctggcgcggattctggtaaacaagccgagggctgttaatgcttga

SEQ ID NO: 53220 - protein, 157 aa, Unknown
  Obtained from environmental sample
  DOMAIN (24)...(157): ABC transporter
  misc_feature (1)..(157): Xaa is any amino acid
MMLTVDIQKKLGAFSLNVSFNAAEGVTGILGASGCGKSMTLRCIAGIEKPDQGRITLDDAVLFDSEQGINLKPQERKVGYLFQNYALFPNMTVEKNILCGLYHEKDRTKRQQMLDDTIYLLKLEGLEKHMPSQLSGGQQQRAALARILVNKPRAVNA

SEQ ID NO: 53221 - DNA, 690 bp, Unknown
  Obtained from environmental sample
  misc_feature (1)..(690): n is a, c, g, or t
atgaataatgtggaggtaactttggactggtatcctttatggaattctgtacgtatagcggctataagctgtgttatcgtgtttttcctcgggatatttgccgcctactatatcgccaggctgccgcgccttgtcaaaggcgttcttgatgtaatactgacattaccccttgttctgccgcctacggttatgggctatcttcttctgcttctctttggcgttaagcgccccttaggcggcttctttctgcaattcggaatcaaattcgtaatgacctggtacggcggtataataaccgcggctgtggccgcgttcccgctcatgtaccgcacggcaaggggcgcttttgaaagtntgataataccctggcctatgccggccagaacgctgggtcttccgaatccgtatatcttttggcgtatccgcatgccatattgccgtcaggggatactggcgggggtagtgcttgcgttcgcccgcgccatgggcgaatacggcgccacaagcatgttgatcggctatacgcccggcaagaccgcgaccatctccacaacagtatatcagatgtggcgtaccggcaatgacgcgggggcgcttcgttgggttttgatcaatatcctgatatctatggccgtgttgttgggagtcaacctgatggaacgaaaaaattattataaggaaacgcgttga

SEQ ID NO: 53222 - protein, 229 aa, Unknown
  Obtained from environmental sample
  DOMAIN (13)...(229): Binding-protein-dependent transport system inner membrane component
  misc_feature (1)..(229): Xaa is any amino acid
MNNVEVTLDWYPLWNSVRIAAISCVIVFFLGIFAAYYIARLPRLVKGVLDVILTLPLVLPPTVMGYLLLLLFGVKRPLGGFFLQFGIKFVMTWYGGIITAAVAAFPLMYRTARGAFESXIIPWPMPARTLGLPNPYIFWRIRMPYCRQGILAGVVLAFARAMGEYGATSMLIGYTPGKTATISTTVYQMWRTGNDAGALRWVLINILISMAVLLGVNLMERKNYYKETR

SEQ ID NO: 53223 - DNA, 414 bp, Unknown
  Obtained from environmental sample
  misc_feature (1)..(414): n is a, c, g, or t
atgacaacccatgaaattatcaatgatgatcacgaaaaaatcaccgcgataattaacagtatgcttgagaaaggcgcggaaatggttttctgcacaggcggcatgagcgtggatcctgatgacagaacgcccctggcgattaagaatgccgcgaacaacgtaatcagttacggcgctccggtattacccggctcaatgttcatgcttgcgtacacggctgacaaaaggccggtctgcggtttgccgggctgcgtgatgtacgcgcgcaggacaatttttgatctggttctgccgtatctactggctgacgcgcctgtaagcgccgaatggctggcgggcctgggaaacggcggtttgtgccttgactgcgccgaatgtcattttcccaactgtgcgtttggacgcggagcataa

SEQ ID NO: 53224 - protein, 137 aa, Unknown
  Obtained from environmental sample
  DOMAIN (1)...(102): Probable molybdopterin binding domain
  misc_feature (1)..(137): Xaa is any amino acid
MTTHEIINDDHEKITAIINSMLEKGAEMVFCTGGMSVDPDDRTPLAIKNAANNVISYGAPVLPGSMFMLAYTADKRPVCGLPGCVMYARRTIFDLVLPYLLADAPVSAEWLAGLGNGGLCLDCAECHFPNCAFGRGA

SEQ ID NO: 53225 - DNA, 513 bp, Unknown
  Obtained from environmental sample
  misc_feature (1)..(513): n is a, c, g, or t
ttggttcgcttctgcaaacgccttgaggccgaggggacagagcttattacccttcacccgcggctggttacggaaaagtttaaacgccttgccagatgggattatgtaggcagtctcaggcaggagttgaagatacccgtagccggaaacggggacatagcttccgccgaggatattgtccgccgggcggccggtccctgcgacgcggtcatggtagggagagcggcggtgcggcaaccgtggatttttgcccgggcgcgggagcttgagaacgcaagttccgcgagatctgtccccaatatcgaagaaatcggcgtccgtttccttgagcttttatccttataccagccgcctgagttccttttttccagagcaatgcggtttttcggctttttctgcgacaacttaaaatgggggaattatttgaaaacccaattgaaccatgaaaaaaccctgtccggcattgagcaggcgtggcgggagtattttaagaacgatagtgaaaaaaaatga

SEQ ID NO: 53226 - protein, 170 aa, Unknown
  Obtained from environmental sample
  misc_feature (1)..(170): Xaa is any amino acid
MVRFCKRLEAEGTELITLHPRLVTEKFKRLARWDYVGSLRQELKIPVAGNGDIASAEDIVRRAAGPCDAVMVGRAAVRQPWIFARARELENASSARSVPNIEEIGVRFLELLSLYQPPEFLFSRAMRFFGFFCDNLKWGNYLKTQLNHEKTLSGIEQAWREYFKNDSEKK

SEQ ID NO: 53227 - DNA, 435 bp, Unknown
  Obtained from environmental sample
  misc_feature (1)..(435): n is a, c, g, or t
atgaaaaaagccttcttttttttatttttaattttttctttttacggcgtctgtttttctcaaactgataataccgtaaatgttattgtagaaattaacaatattgtcgctaacggcggaaaagtttatttggtcgttttttttaccggtgaaagtttcaagagtgaaaaaccggatctggcggttgaaataccgtccgataaatcctcggcaataaaagaagggtcattgccgcgcggggaatgtgtattatttgtatttcaggacgcgaataacaatataaaacttgattgcggactttttgggattccaaaagaaaaattcggcatatccaattattttgggaaaggaattccttcaagaaattttgataaacaaaaaataatgatcgatgaaaaaaccggaaaaatagttcttggtttgtataaattttaa

SEQ ID NO: 53228 - protein, 144 aa, Unknown
  Obtained from environmental sample
  SIGNAL (1)...(20)
  misc_feature (1)..(144): Xaa is any amino acid
MKKAFFFLFLIFSFYGVCFSQTDNTVNVIVEINNIVANGGKVYLVVFFTGESFKSEKPDLAVEIPSDKSSAIKEGSLPRGECVLFVFQDANNNIKLDCGLFGIPKEKFGISNYFGKGIPSRNFDKQKIMIDEKTGKIVLGLYKF

SEQ ID NO: 53229 - DNA, 615 bp, Unknown
  Obtained from environmental sample
  misc_feature (1)..(615): n is a, c, g, or t
ttgcgaaaagcaggagcgcggcgtttttgcgcaaacagagaatgtttgtatcctcaagcctgccctaacttaaaagcggatcacagtcagtacattaaaacattaaaagcactgagtaaaattccgggcgttaaaaaagtttttatccgttccggtctgcgttttgattttattcaacatgacaagaaatacggaaaagaatttttggaaaacttgtgccaattccatgtaagcggccagttaaaagtcgccccggaacatatctgcgcggatgtgcttgaagcgatgggcaaatgccctcactcaatttatgaagaattcagggaagaatttacagcaataaacgagaggcttggattgaaacagtaccttctgccgtattttataacttcccacccgggcgcgggcatgaaagaagcggaagaacttgcgcgctacttgaaacaaacgcgctttgtgcccgaacaaacgcaggatttttaccccaccccgggaactctatctacggtgatgtaccacacagggctcgatccccgaacaatgaaaccggtatacatcgccaaaggagaaaaagaacggcgcaaacaaaaagaattactgcgagttaaaaaataa

SEQ ID NO: 53230 - protein, 204 aa, Unknown
  Obtained from environmental sample
  misc_feature (1)..(204): Xaa is any amino acid
MRKAGARRFCANRECLYPQACPNLKADHSQYIKTLKALSKIPGVKKVFIRSGLRFDFIQHDKKYGKEFLENLCQFHVSGQLKVAPEHICADVLEAMGKCPHSIYEEFREEFTAINERLGLKQYLLPYFITSHPGAGMKEAEELARYLKQTRFVPEQTQDFYPTPGTLSTVMYHTGLDPRTMKPVYIAKGEKERRKQKELLRVKK

SEQ ID NO: 53231 - DNA, 873 bp, Unknown
  Obtained from environmental sample
  misc_feature (1)..(873): n is a, c, g, or t
ttgggacggccccgccttgcctttttggtcggcgcgggcaacatggattccatggtcgcgcattataccgccgcaaaacgcaagcgctccgacgacgcgtattcgccgacaggaaaaagcggactgcggcccgaccgcgccactttggtttatgtcgagggaatcaggcgcgcgtacaaggatgtgccggtaattatcggggggatcgaggcaagcctccgccgctttgcccattacgattactggtctgataccgtgcgccgctcgatcttgcttgattcaaaagcggatattttggtttacggaatgggagaaaaacccctgctgagtatagcgcgccggttagcggaaggtgaggcagttggcagtattattgatgagaggggaacttgcgtccgtgttcacggaagatccgctgttgataaaggcaaaaacgaacaatggaaggacacgcgctttctgccgggatatgaggcggtaaagggcaaagacgaggcttctttattcgcctatgccgaacattttatgatgcaaaaacaaaacgctgatcccttaagcgcgaaaccgctggcggaggaaaacgacggggatcgctgggttattcaaaatcctcccgccctgcccctctcaacaaaagaactggataatttgtacgagcttccctttacgcgaaaagcgcatccaatgtatgacgcgcaaggcgggataaacgcgcttaaagaagtttccttttcgttgatttcaagccgagggtgtttcggaggctgttctttttgcgcgattaccgctcatcatgggcgggctgttaccgggcgcggtaaggaaagtctgctccgcgaagcgcgcgctcttgccgcgcgtccggacttttag

SEQ ID NO: 53232 - protein, 290 aa, Unknown
  Obtained from environmental sample
  DOMAIN (1)...(245): Radical SAM N-terminal
  misc_feature (1)..(290): Xaa is any amino acid
MGRPRLAFLVGAGNMDSMVAHYTAAKRKRSDDAYSPTGKSGLRPDRATLVYVEGIRRAYKDVPVIIGGIEASLRRFAHYDYWSDTVRRSILLDSKADILVYGMGEKPLLSIARRLAEGEAVGSIIDERGTCVRVHGRSAVDKGKNEQWKDTRFLPGYEAVKGKDEASLFAYAEHFMMQKQNADPLSAKPLAEENDGDRWVIQNPPALPLSTKELDNLYELPFTRKAHPMYDAQGGINALKEVSFSLISSRGCFGGCSFCAITAHHGRAVTGRGKESLLREARALAARPDF

SEQ ID NO: 53233 - DNA, 762 bp, Unknown
  Obtained from environmental sample
  misc_feature (1)..(762): n is a, c, g, or t
atgcttaatatagttctgccaatggccggacgtagcggtaggtttgcagaagcggggtacgaattgccgaaaccccttattcttgtacacggagtaccgatggtaaagatcgtcgtagacaatctagcgcctaaatgtgaacatcgctttattttcgttgcccaacaggaacacatagacaaatacgatctgatgctaaaattgaaatcatatgcggaaaataccgaggttatcggaatcaacggcataaccgaagggcaagtctgcacagcgctattggcaaaaaaattcttcgacaacgacgagccccttatgaatgcgaacagcgaccaatttatcgactttgacatcaacgaatacctggatgccatggactcccgcaaccttgatggaatgatcatgaccatgaagtctcaggatccgaaatggtcttatgcaaaaacggacgaaaacggatttgtcgttgaaacggcagaaaagaaagttatttcgtctgacgcgaccgtaggtatatacaattttaaacgcggcagcgatttggttcgctcggcagaacagatgatagccaacaatatccgcgtcaacaacgaattctatacttgcccgtgttataactaccttatcagggaaggcaggagaataggtatttattcagttggcgaggaatacaacggaatgtacggcctggggatcccgagcgatttggactttttcctgaaccacccggtttcacaaaaggtgaaatatagcggtaccagataa

SEQ ID NO: 53234 - protein, 253 aa, Unknown
  Obtained from environmental sample
  misc_feature (1)..(253): Xaa is any amino acid
MLNIVLPMAGRSGRFAEAGYELPKPLILVHGVPMVKIVVDNLAPKCEHRFIFVAQQEHIDKYDLMLKLKSYAENTEVIGINGITEGQVCTALLAKKFFDNDEPLMNANSDQFIDFDINEYLDAMDSRNLDGMIMTMKSQDPKWSYAKTDENGFVVETAEKKVISSDATVGIYNFKRGSDLVRSAEQMIANNIRVNNEFYTCPCYNYLIREGRRIGIYSVGEEYNGMYGLGIPSDLDFFLNHPVSQKVKYSGTR

SEQ ID NO: 53235 - DNA, 396 bp, Unknown
  Obtained from environmental sample
  misc_feature (1)..(396): n is a, c, g, or t
atgataattctctcgcaccgaggctattggaaagaattctctgaaaaaaaccagaaggctgcatttgaaaggagtttcgatctgggttttggcacggaaacggacttgcgcgatattgccggaaggatagtcatttcgcacgatatgccaaagggaggtgaaatcacgtttgaagacgttttacagataatgaatggccgcaatcttccgctggcgctgaacatcaaggcggacggtctggcggacgcgntttttgaattattgacnagatancaccatacgaactattttgcgtttgatatgtccaattccggactgntgtttcagctggaacgcgggatgcgggtattttaccggcctttccaacctattgccaacgccggtgctgctgtttaa

SEQ ID NO: 53236 - protein, 131 aa, Unknown
  Obtained from environmental sample
  misc_feature (1)..(131): Xaa is any amino acid
MIILSHRGYWKEFSEKNQKAAFERSFDLGFGTETDLRDIAGRIVISHDMPKGGEITFEDVLQIMNGRNLPLALNIKADGLADAXFELLTRXHHTNYFAFDMSNSGLXFQLERGMRVFYRPFQPIANAGAAV

SEQ ID NO: 53237 - DNA, 714 bp, Unknown
  Obtained from environmental sample
  misc_feature (1)..(714): n is a, c, g, or t
atgttcgcaaaaagaaagcggttttttcctccaatcattatgtttttaattttcgaaacaacagccgttgttttatggctcagccttggcaagatattttatctttttaattttacctatatcggtttttttgtttcccttggaattggcttgttaatcgcaaaacacaaaaacgccagaatattcatacatttttttatcggcctgtatatgcttgtttatctggggctcatgcgccgggaaaacatgcaaatagaaggattcttttactatatcgcgattggcgtgtttgaggcggcggcgatacattatttggtcgcgaaaatagctgggccttttatctttggcaggggatggtgtggttacgcgtgctggacaacgatgatacttgatttacttccgtataagataccgcaaaaacagccggttaaaaagctgggtttattgcgtattcttgtttttgttctttcattaacatatttccttatagtatttttccgttacaggactcacatcaataaaatcatgtacgtcagtttcatcgccggaaatgttatttattacggtatcggaattttatttgcctgtttgttcaaagataacagggctttttgtaaatatttctgcccgatcaccgtgttcttaaaaccaggcgagttattttgcggtttcccggagaaaagtaaatcaggaaaagtgtatcgtttgcaataa

SEQ ID NO: 53238 - protein, 237 aa, Unknown
  Obtained from environmental sample
  misc_feature (1)..(237): Xaa is any amino acid
MFAKRKRFFPPIIMFLIFETTAVVLWLSLGKIFYLFNFTYIGFFVSLGIGLLIAKHKNARIFIHFFIGLYMLVYLGLMRRENMQIEGFFYYIAIGVFEAAAIHYLVAKIAGPFIFGRGWCGYACWTTMILDLLPYKIPQKQPVKKLGLLRILVFVLSLTYFLIVFFRYRTHINKIMYVSFIAGNVIYYGIGILFACLFKDNRAFCKYFCPITVFLKPGELFCGFPEKSKSGKVYRLQ

SEQ ID NO: 53239 - DNA, 369 bp, Unknown
  Obtained from environmental sample
  misc_feature (1)..(369): n is a, c, g, or t
atggaggcatatatgtgtagaaaattgctttttttgtgcgtttcgttttttattaccgaaagtctctttgcgggcaatatccgtacaaccatagagattaacggagtgattgttaacggcggtttgatatatgtcgccgtatactcaaatgaaaatgattataaaacagagacggcttttgccaagtttatcctgcagccggataaaacttccttaacgtattctatggaactgcccgaaggcgaatatgtggtttccgtatttcaggatacggataatgacggggaacttaaaacgggtctttttggaatgccctcagaaccggtaggtaaacaaactacaacctcaagggggcgccgggcggcttaa

SEQ ID NO: 53240 - protein, 122 aa, Unknown
  Obtained from environmental sample
  SIGNAL (1)...(24)
  misc_feature (1)..(122): Xaa is any amino acid
MEAYMCRKLLFLCVSFFITESLFAGNIRTTIEINGVIVNGGLIYVAVYSNENDYKTETAFAKFILQPDKTSLTYSMELPEGEYVVSVFQDTDNDGELKTGLFGMPSEPVGKQTTTSRGRRAA

SEQ ID NO: 53241 - DNA, 453 bp, Unknown
  Obtained from environmental sample
  misc_feature (1)..(453): n is a, c, g, or t
atgaaagcagtaaaaaaaattattaatgatataatgtttgtcacaggcgcggctttggttattttggcggtattttcgctgtttttcaatgttgaaattccttttgttccttatatttttgaaattttcgccgcaaatattgttattattcttggcctttatctgcgcgggagatttgaaatccgcaattttatcctggaatatctggttgatatcagctatataatcaccgttcttgtcgtattcggcctcatatttgactggtattccgcgataccggtgtggcttcttattgtaatggccgtcctaatctacatatttgccatgatattcaccgttacaaagatcaggaaagacgcggaagaattaaacaaattactgcaaactcgggccggggcgcccggagcggaagggcttgaacaccgggaaaaacaagccgacgatgcatcttaa

SEQ ID NO: 53242 - protein, 150 aa, Unknown
  Obtained from environmental sample
  SIGNAL (1)...(26)
  misc_feature (1)..(150): Xaa is any amino acid
MKAVKKIINDIMFVTGAALVILAVFSLFFNVEIPFVPYIFEIFAANIVIILGLYLRGRFEIRNFILEYLVDISYIITVLVVFGLIFDWYSAIPVWLLIVMAVLIYIFAMIFTVTKIRKDAEELNKLLQTRAGAPGAEGLEHREKQADDAS

SEQ ID NO: 53243 - DNA, 414 bp, Unknown
  Obtained from environmental sample
  misc_feature (1)..(414): n is a, c, g, or t
atgtggtttatattcgccctattatccgcgttcttcgcggctttaacttcaattttggcaaaaatcggcattcaaaacattaactcaaatttagcgacggcaatcagaaccattgtcgttcttgtcatgtcatgggcgattgtttttattaccggaaaacacaacgaagctatgaacatcagccacaaaaatttattgtttttagttttatccggaatagcgacgggattgtcatggctttgttatttcagggcattacaaatcggagaagcgtcaaaagtaatacctatagataaattcagtctggtaataggaatgataatggcttttatcgtcttaaaggaaacagtaacaataaagacaattatcggcggtatttttattacgataggcacttttgtcctgatattctga

SEQ ID NO: 53244 - protein, 137 aa, Unknown
  Obtained from environmental sample
  SIGNAL (1)...(20)
  DOMAIN (11)...(137): Integral membrane protein DUF6
  misc_feature (1)..(137): Xaa is any amino acid
MWFIFALLSAFFAALTSILAKIGIQNINSNLATAIRTIVVLVMSWAIVFITGKHNEAMNISHKNLLFLVLSGIATGLSWLCYFRALQIGEASKVIPIDKFSLVIGMIMAFIVLKETVTIKTIIGGIFITIGTFVLIF

SEQ ID NO: 53245 - DNA, 333 bp, Unknown
  Obtained from environmental sample
  misc_feature (1)..(333): n is a, c, g, or t
ttgattgcgagcggacgagaaaccctgctaaatacccccatgataactccagtcaaaggaaagataaccttaatagacggcgcatcgtacgaaggcgaccttatcgacggcgtaccctacggcaaaggaaaacagacgtatgtagacggcacagtgtatgtaggtgattttgttaacggtaaatttcacggcaaaggaaaattaacatattattacggcggtgaatacgacggcgattgggctaacggcgaacaaaacggtttgggaagaatggtctataacgacggaacaattgaagacggaacttttgtaaacggcatgtttgcaaagtaa

SEQ ID NO: 53246 - protein, 110 aa, Unknown
  Obtained from environmental sample
  DOMAIN (30)...(52): MORN repeat
  misc_feature (1)..(110): Xaa is any amino acid
MIASGRETLLNTPMITPVKGKITLIDGASYEGDLIDGVPYGKGKQTYVDGTVYVGDFVNGKFHGKGKLTYYYGGEYDGDWANGEQNGLGRMVYNDGTIEDGTFVNGMFAK

SEQ ID NO: 53247 - DNA, 411 bp, Unknown
  Obtained from environmental sample
  misc_feature (1)..(411): n is a, c, g, or t
atgctcgtagatggcaagggagttccccttgggatggtaataaccggcgctaaccggcatgacgtctctcaacttgaagctctgctggactctgtcattatagaaaggcctgacccatttgaagatcctcaaaatctctgtcttgataaaggctatgccggtgagccggctttggaacaggtggtgttacggggatttattcctcacatcaaaagccggggagaggagcaaagtacaagagtgcaggatcccgcttacaaagcccgtcgatgggtagtggaagtgacccattcgtggatgaaccggtttagaaaacttcttgtgagatatgagaaactcaccataacctataaggcactactcatgttatcttgcgcctttatcgctctccgtaaggcagaggttatttag

SEQ ID NO: 53248 - protein, 136 aa, Unknown
  Obtained from environmental sample
  DOMAIN (1)...(127): Transposase DDE domain
  misc_feature (1)..(136): Xaa is any amino acid
MLVDGKGVPLGMVITGANRHDVSQLEALLDSVIIERPDPFEDPQNLCLDKGYAGEPALEQVVLRGFIPHIKSRGEEQSTRVQDPAYKARRWVVEVTHSWMNRFRKLLVRYEKLTITYKALLMLSCAFIALRKAEVI

SEQ ID NO: 53249 - DNA, 465 bp, Unknown
  Obtained from environmental sample
  misc_feature (1)..(465): n is a, c, g, or t
ttgctggaaaaccagaagatcaaatgggaagccttccgggaaatgctcgagttcatcgcagcagcgtgctacgacatcaatgaaagagagcggtggaacggctaccggctgtcagggatagacagcaacaagctggcgctgcccgccgacaagcccgtgcttaaatattttggagggttcggagcgaataaggaatccgcgacagcgcaagggtcaatgctgtacgacctgttaaacgacgtagtgatgcatgccctgatagacccgattaagacgggagagcaggcccaggcacgggcgcatatagagcacttgcaagggctggaacgcttcgagggagggaaggaactggtgatatttgaccgcgggtacccgtcaaaagagctgatacaagaacttatggccaagaaaatcgactttttgatgcgggtgcggacaaagttttcaaaggcgatagacgcgtga

SEQ ID NO: 53250 - protein, 154 aa, Unknown
  Obtained from environmental sample
  misc_feature (1)..(154): Xaa is any amino acid
MLENQKIKWEAFREMLEFIAAACYDINERERWNGYRLSGIDSNKLALPADKPVLKYFGGFGANKESATAQGSMLYDLLNDVVMHALIDPIKTGEQAQARAHIEHLQGLERFEGGKELVIFDRGYPSKELIQELMAKKIDFLMRVRTKFSKAIDA

SEQ ID NO: 53251 - DNA, 612 bp, Unknown
  Obtained from environmental sample
  misc_feature (1)..(612): n is a, c, g, or t
atgcgcggtgcggcgatggaaaacgcattaatcatttcacactctgaaaatgacgccgctttttttaccgggttcttaaacgcggcttccattcatcaagttacttctgtgcaatcatgcgacagcgcccgcaggcttattctaaaacaggatttcgatatagtaattgtagactctccgcttcgcgacgaatccggcgaagccttttcccggcatgtcgcttccaaaggaacatcgcaagtaattctcctggtaaaaagcgagtcttttgactcaatatccgccgtgtgtgaggaagacggcgttctggtaatttcaaaaccggtagacaaagcttttttttggtccgcgttttcgctggctaaatcggttcaaaacagggttaagcggatacaggctgaaaatgagcggctcaagcaaaaaatcgaggacatacgcattattgaccgtgcaaaatgcctgttaatctcatacatgaaaatgagcgagcaggaagcccaccggtatatagaaaaacaatcgatggatatgcgctcaaccagaagaattattgcggaagggattttaataagatatgacaattatcaggaagctgaggacaggcaatattaa

SEQ ID NO: 53252 - protein, 203 aa, Unknown
  Obtained from environmental sample
  DOMAIN (134)...(189): ANTAR domain
  misc_feature (1)..(203): Xaa is any amino acid
MRGAAMENALIISHSENDAAFFTGFLNAASIHQVTSVQSCDSARRLILKQDFDIVIVDSPLRDESGEAFSRHVASKGTSQVILLVKSESFDSISAVCEEDGVLVISKPVDKAFFWSAFSLAKSVQNRVKRIQAENERLKQKIEDIRIIDRAKCLLISYMKMSEQEAHRYIEKQSMDMRSTRRIIAEGILIRYDNYQEAEDRQY

SEQ ID NO: 53253 - DNA, 729 bp, Unknown
  Obtained from environmental sample
  misc_feature (1)..(729): n is a, c, g, or t
atgacagatcggccgagtcatcgtcatgtcgtcggcagcactatcgccaaagaatcggactactgcatgtttacggcggcgggacccgagattgccgtggcgacgacaaaagcattttcggcccagctcgtactgctgtatattctggcgatatggtttgccgcaaaatcgggaaaattatcgcgggaagcggagctggaactgttagctgaaatcgacgccctgcccgaaaaaacggagcgcctgcttaaacagaccgacgctgttcagatgtacgcttccacctgcatcggctacaagagcatcttcttcattggcagaaacattgattatgccatcgcgctggaaggctcgctcaaactcaaagagatttcctatattcattccgaagcctacgcgggcggagaattgaagcacggcactatttccctggttgaacaggacacgctggttgtcgccatctccaactgcgctccgctgtacggcaaaattatgagcaacgcggaacaggttataagccggggcgcgaaagtgcttcttatcggcaactgtccggacgcgaaaccggacgataaactttttcatatcgctttaccggaaatttttgatttgttttccccttccctgtcggttattgttttgcagcttttcagctattacgtggcagctaacaagggtttggatatagacaagccgaggaatttggccaagagcgttaccgttgaatag

SEQ ID NO: 53254 - protein, 242 aa, Unknown
  Obtained from environmental sample
  DOMAIN (93)...(228): SIS domain
  misc_feature (1)..(242): Xaa is any amino acid
MTDRPSHRHVVGSTIAKESDYCMFTAAGPEIAVATTKAFSAQLVLLYILAIWFAAKSGKLSREAELELLAEIDALPEKTERLLKQTDAVQMYASTCIGYKSIFFIGRNIDYAIALEGSLKLKEISYIHSEAYAGGELKHGTISLVEQDTLVVAISNCAPLYGKIMSNAEQVISRGAKVLLIGNCPDAKPDDKLFHIALPEIFDLFSPSLSVIVLQLFSYYVAANKGLDIDKPRNLAKSVTVE

SEQ ID NO: 53255 - DNA, 1401 bp, Unknown
  Obtained from environmental sample
  misc_feature (1)..(1401): n is a, c, g, or t
atggacgaaatttctggcaaggcgccgttaatattaaagctggatgaaagtgatattgccggcccgctgcggatcagggtacgatcgttcattgagactgtaatgatacggcgcaaaagaaaagcgcataacgtaaaacctctgggagacccctatcccgttaaatttacgaagaaagagccgaagaaggttctgcttattcccaatgtaagccgggcgttctgcgtggttttaaccagcgctcttatcaatgaaggctacattgtggaacctctgccgatgggcggtcttgaagctatcgcgatgggaaaaaaatacgtgcacaatgacatgtgcctgccagtgcagattgtagtgggggaggctcttctcgcgttaaaaagcgggaaatacgatccggacaaaaccatgataggtatggcgaaagtgttatgcgattgccgtctttccaattatatgcccctcgccagaaaggcccttgacgaggcgggtttcccgcaggtgccgattgttaccaccgatatgacggattcaaaaaacgcccatccaggactgcgttttacacatataacctactgtaaaaccatgtggggcataatccagacggacgccattgaattcctgcggcgcaggatacggccttatgaactgcagaaaggggaaaccgataaaatagttgaaaacgctattgacgaaattgccgaagggctcgctagaagaggcattccgggggcgaacgcagcgttcaagaaagcgataaacgatctgtgcgccgtgcgctatgaccgttcaaaactgagggaacgggtttttattcagggcgagtactatttaacctttcatccgggttcaaattttgaaattgaaaattatcttgaaagaaatggaatggaagtgattctgccaagaatgaacaccgtttaccgtcatctgttcctgcagcacacccttgccgaaatgaatgaattcaaagtgcgtcattccctgtatgacagtttatacgcccgcgccggcagtaaatttatggatatagccgagaaatacgtcgataaaatcgcgtcgaagcatcctctgtacgagcctgagatttcgcttgaagaggcggcaaaatacagcgacgacataatacatcattccatattgtcgggagaatccttccttattgccgcccataccctgcatcatgccgaaaaagggatacgttcgtttatcatactccagcctttcggctgcctgccgaatcatatctgcgggcgcggagtgatcaaaagaatcaaggaattgcatcccgacattcaaatcctgccgcttgattacgagcccgacgtaagttttgccaatatcgaaaacagaatacagatgcttctgatgaacgtgaagaacttgaaagctgcggggtaa

SEQ ID NO: 53256 - protein, 466 aa, Unknown
  Obtained from environmental sample
  misc_feature (1)..(466): Xaa is any amino acid
MDEISGKAPLILKLDESDIAGPLRIRVRSFIETVMIRRKRKAHNVKPLGDPYPVKFTKKEPKKVLLIPNVSRAFCVVLTSALINEGYIVEPLPMGGLEAIAMGKKYVHNDMCLPVQIVVGEALLALKSGKYDPDKTMIGMAKVLCDCRLSNYMPLARKALDEAGFPQVPIVTTDMTDSKNAHPGLRFTHITYCKTMWGIIQTDAIEFLRRRIRPYELQKGETDKIVENAIDEIAEGLARRGIPGANAAFKKAINDLCAVRYDRSKLRERVFIQGEYYLTFHPGSNFEIENYLERNGMEVILPRMNTVYRHLFLQHTLAEMNEFKVRHSLYDSLYARAGSKFMDIAEKYVDKIASKHPLYEPEISLEEAAKYSDDIIHHSILSGESFLIAAHTLHHAEKGIRSFIILQPFGCLPNHICGRGVIKRIKELHPDIQILPLDYEPDVSFANIENRIQMLLMNVKNLKAAG

SEQ ID NO: 53257 - DNA, 663 bp, Unknown
  Obtained from environmental sample
  misc_feature (1)..(663): n is a, c, g, or t
gtgcacctgcttgtgaagggccagcgggaagaattgcaatacttcaatgaaaatttgcaaaaaatggtagaagaaaaaacgcaaagcattctggatatgcagaacgccctcctgaaaacaatggcggaactcgtcgaatgccgcgatgacataacgggcggccacatagagcggacgcagaggggaataaaaatccttctggaagaaattgaaaagagcggcgtgtaccgtgaggaaacaaaaggctgggatgttgacctgctgctccagtccagccagcttcatgacgtaggcaaaatatccatcagcgataacatactcaagaaacccgaaaagctcacggatgatgaatttaatcaaatgaaaaagcacgcgagttttggcgagcaaataattgaaaggattgaggcgctgacaaaggaaagcgattttttacactacgcgaaaatttttgccgcaagccatcacgaaagatgggacggctcaggttacccgcgcgggctgaagagagacgcgatacccctgcttggccgcatcatggcgattgccgacgtgtacgacgcgcttacctccgtgcgcccttacaaaaaagccttcccccacgaggaagccgtgcgcattatcaccgaaaacggcggaacccagtttgatcccgagtggtag

SEQ ID NO: 53258 - protein, 220 aa, Unknown
  Obtained from environmental sample
  DOMAIN (52)...(189): HD domain
  misc_feature (1)..(220): Xaa is any amino acid
MHLLVKGQREELQYFNENLQKMVEEKTQSILDMQNALLKTMAELVECRDDITGGHIERTQRGIKILLEEIEKSGVYREETKGWDVDLLLQSSQLHDVGKISISDNILKKPEKLTDDEFNQMKKHASFGEQIIERIEALTKESDFLHYAKIFAASHHERWDGSGYPRGLKRDAIPLLGRIMAIADVYDALTSVRPYKKAFPHEEAVRIITENGGTQFDPEW

SEQ ID NO: 53259 - DNA, 870 bp, Unknown
  Obtained from environmental sample
  misc_feature (1)..(870): n is a, c, g, or t
atgggaatgcgggaaatgtttattaaaaacggcttcaatgattttctttccaaacccatagacgtttccaaactggatgaaatgcttaataaatggatacctaaagataaaagggaagcgggagcaggaaactcgccaacaaagttggcgcaggaacagggaacccttcgacaggctcaggaaccgaaccccgaaccccgatcccggtaccccgttatccatagctctgaaccttgtaccccgatccccattatccccggcattgacacggcaaaaggcatcgtaatgaccggcgggactgtggccgcttatacaaaagtgttatccctgctttgcaaagatattgaagaacggctgccgtttctgcgaaaagcgctggacgagaatctgcctttggaggacatcctgcccgcgtttgttacgcaggttcacgccctgaaaagcgcgttggcttctatcggcgcgcagagcatatcgtccctcgctgcggggcttgaagcggtaggcaaggcgggggatattgattttatccgtgaaagcctgcccgattttttaggacagcttaccgcgcttggaaaaaatattggcgacgctctggaacaaggcaaacctgaatatcaagatgatccccgttccccgttccctgttcccgcgccaactttgttggcgagttccctgctgaaagaacttgccgaggctctgaaatcccaaaaaatatccgaaattaaacgcatactgaatacgctgaatcagaacacgcaggattcaaaacttaaagatattctcgacaaaatttccgatcaggtgcttataacggaatttgacaaagccgcaaaaatagttgaagaattaattgacgcggaaaattaa

SEQ ID NO: 53260 - protein, 289 aa, Unknown
  Obtained from environmental sample
  DOMAIN (106)...(194): Hpt domain
  misc_feature (1)..(289): Xaa is any amino acid
MGMREMFIKNGFNDFLSKPIDVSKLDEMLNKWIPKDKREAGAGNSPTKLAQEQGTLRQAQEPNPEPRSRYPVIHSSEPCTPIPIIPGIDTAKGIVMTGGTVAAYTKVLSLLCKDIEERLPFLRKALDENLPLEDILPAFVTQVHALKSALASIGAQSISSLAAGLEAVGKAGDIDFIRESLPDFLGQLTALGKNIGDALEQGKPEYQDDPRSPFPVPAPTLLASSLLKELAEALKSQKISEIKRILNTLNQNTQDSKLKDILDKISDQVLITEFDKAAKIVEELIDAEN

SEQ ID NO: 53261 - DNA, 1092 bp, Unknown
  Obtained from environmental sample
  misc_feature (1)..(1092): n is a, c, g, or t
atggaaagcgacaagaaactggtcatacttgtagacgataaccttgccaatctcaaaattggcaataattatttagaaaaaaaatatatcgtcgccaccgcgccgtcagccgcaaaaatgttcagccttttaaaaaacaataaccccgcgataattattcttgatattgacatgccggaaatgaacggctatgaaacgattaaaatactcaagtcaaatccggaaacaaaaaatattccggtgatcttccttaccgcgaaaacggaatccgatgacgaactggaagggctttccttgggcgcggttgactacataaccaagccgttcaatccggatctgcttctcaaacgcatagaagtgcacttgctggtggaaggccagcgcgaaatcctggaaaaacaggcggcggaacttaaaaattttaacgataatttgcggataatggtggaagaaaaaacgcaaagcgtcctggaactgcagaacgccctcttaaaaacaatggcggaattggtggaatgcagagatgacattaccgggggccatatagagcggacgcagcggggaataaaaattctgctggaagaaatcaagaagcacggcgtttaccgggaagaaacaaaagactgggacgtggatcttctgctccagtccagccagcttcacgacgtgggtaaaatatccattgatgacagcatccttaaaaagcccgagagactcgaccaacatgaatttgacgaaatgaaaaagcacgctgcttttggcgagcggattattgaaaaaattgaaacccttgcaaaggaaagcgactttttgaaatacgcgaaaatntttgccgccagccatcatgaaaaatgggacggaacaggataccccagaggacttaagggtgacgaaataccgctgttaggccgcatcatggcgatcgccgacgtatacgacgcgcttacgtcaatgcgcccgtataaggaagccttctcccacgaagaagcggtgcggattatcaccgccagcagcgggacgcagtttgatccaatacttatagaattatttgttaaaaactcggacagatttaatctgaaacatcgcaattaa

SEQ ID NO: 53262 - protein, 363 aa, Unknown
  Obtained from environmental sample
  DOMAIN (178)...(315): HD domain
  misc_feature (1)..(363): Xaa is any amino acid
MESDKKLVILVDDNLANLKIGNNYLEKKYIVATAPSAAKMFSLLKNNNPAIIILDIDMPEMNGYETIKILKSNPETKNIPVIFLTAKTESDDELEGLSLGAVDYITKPFNPDLLLKRIEVHLLVEGQREILEKQAAELKNFNDNLRIMVEEKTQSVLELQNALLKTMAELVECRDDITGGHIERTQRGIKILLEEIKKHGVYREETKDWDVDLLLQSSQLHDVGKISIDDSILKKPERLDQHEFDEMKKHAAFGERIIEKIETLAKESDFLKYAKXFAASHHEKWDGTGYPRGLKGDEIPLLGRIMAIADVYDALTSMRPYKEAFSHEEAVRIITASSGTQFDPILIELFVKNSDRFNLKHRN

SEQ ID NO: 53263 - DNA, 387 bp, Unknown
  Obtained from environmental sample
  misc_feature (1)..(387): n is a, c, g, or t
atggcgattgaaagtacaaataataaatgcccggcgtgcggaggtgtccttaattttccagggggagccgccccgaagttctgtgaacattgcggcacaaaattggatttttcccagagcaagcagccggactctgccgctcaaggcgctgacggtaaacctgcggctgataaaaataaattgtggattgcaaccggcaaagagcctgtttacatgctttctaaaatggtaaacaggcacggacttgtcgccggagctaccggaaccggcaaaaccgtgtctataaaagttttgtctgaagcgttcagcgacataggcgtttcggttttcctggcggacattaaaggagatgtttctggactctgtaaaaagnggcgagcccaataa

SEQ ID NO: 53264 - protein, 128 aa, Unknown
  Obtained from environmental sample
  misc_feature (1)..(128): Xaa is any amino acid
MAIESTNNKCPACGGVLNFPGGAAPKFCEHCGTKLDFSQSKQPDSAAQGADGKPAADKNKLWIATGKEPVYMLSKMVNRHGLVAGATGTGKTVSIKVLSEAFSDIGVSVFLADIKGDVSGLCKKXRAQ

SEQ ID NO: 53265 - DNA, 1083 bp, Unknown
  Obtained from environmental sample
  misc_feature (1)..(1083): n is a, c, g, or t
ttgatggccgagcagagagctaaagacatagaacgcaaaaactacgcgctcgataagataagcgacgcctcggcgcaccttctcggcgtcatcagcgatgtgcttgatatgtcgaaaatcgaggccaatatgctgggattgtcgcccgtcgagtttagttttgagaaaatgctgcaaaaagtggtcgcggtgatcaatttccgcgtgaatgagaaacggcaaaactttaccgtgaatctcgacgacgccatcccgcccgtcatcattgccgacgaccagcgtctggcgcaggtcgtcgccaacctcttgagcaacgcggtcaaattcacgtccgaagagggttccatatcgctgaccgccgtccttatcggggaagagaacggcatttgcaccatacaagtctctgtcagcgacaccggtatcggaataagcgaagaacagcagaaaaaactattcaactcctttcagcaggcggagtccaacacaacgcgcaaatacggcggcaccgggcttggcctcgctatttccaaaagcatagtggaaatgatgggcggcaaaatagaaatccggtcggaacttggaaagggttcggtttttacatttaccgtacaagcccaaaaagcctcttacatagaaaataatgcgagcgcggatgacgcgccggataacgggagggcggacattaccggcattttcgagggcagcagcgttttgcttgtggaagacgtgtaccttaaccgcgagatagtaatagcgttgcttgagcctacgcggctttcgatagattgcgccgaaaacggcgcggaagccgtgcgtatgttcgcagagaatccggacaagtacgccttgattttcatggacgtacagatgccggaaatggacggttacgaggcgacgcggcgcatacgggcaatggacatgcccaaagccaaaaccattccaatcgtagcgatgaccgcgaatgtctttagggaagatatcgagaaatgcgaggcggccggcatggacagccatatcggcaagccgcttgatttggaagagcttctgaacaaactgcggggttacttgcttcataacacgtag

SEQ ID NO: 53266 - protein, 360 aa, Unknown
  Obtained from environmental sample
  DOMAIN (235)...(353): Response regulator receiver domain
  misc_feature (1)..(360): Xaa is any amino acid
MMAEQRAKDIERKNYALDKISDASAHLLGVISDVLDMSKIEANMLGLSPVEFSFEKMLQKVVAVINFRVNEKRQNFTVNLDDAIPPVIIADDQRLAQVVANLLSNAVKFTSEEGSISLTAVLIGEENGICTIQVSVSDTGIGISEEQQKKLFNSFQQAESNTTRKYGGTGLGLAISKSIVEMMGGKIEIRSELGKGSVFTFTVQAQKASYIENNASADDAPDNGRADITGIFEGSSVLLVEDVYLNREIVIALLEPTRLSIDCAENGAEAVRMFAENPDKYALIFMDVQMPEMDGYEATRRIRAMDMPKAKTIPIVAMTANVFREDIEKCEAAGMDSHIGKPLDLEELLNKLRGYLLHNT

SEQ ID NO: 53267 - DNA, 387 bp, Unknown
  Obtained from environmental sample
  misc_feature (1)..(387): n is a, c, g, or t
atggaattcctgctctcntgcgatatcaacgctaacggtccgccatatgatcaaatcatcaaaacaaacaatctacaatgcgccgcgaccccgtataggatccgcggattcattgacctagtccttcgtctaaaaaacgaggattgccccgcccacccataccgttattacatagttgactggaagagcgacacgcttgacaattacgatcctgaattgctacgccggtactgcgtcgaccaaaactatttgctgcagtcgcaaatctacacattagcccttgataagtatcttagcggtattttgggcgaccgctatgataaagaacggcatttgggcggctcgctctacgtcttcctgcgaggcggcgccggggtttttctgtaa

SEQ ID NO: 53268 - protein, 128 aa, Unknown
  Obtained from environmental sample
  misc_feature (1)..(128): Xaa is any amino acid
MEFLLSCDINANGPPYDQIIKTNNLQCAATPYRIRGFIDLVLRLKNEDCPAHPYRYYIVDWKSDTLDNYDPELLRRYCVDQNYLLQSQIYTLALDKYLSGILGDRYDKERHLGGSLYVFLRGGAGVFL

SEQ ID NO: 53269 - DNA, 360 bp, Unknown
  Obtained from environmental sample
  misc_feature (1)..(360): n is a, c, g, or t
atgataagaacaaacgaattaatcaaaaatgttttaaccgacattgagaaaggcgttaaggacggtatcaatgcggatattatcgctaaaaaacacgctttatcggaaagccatttacaaagattattcaaattgacgtttaatcaaccgcttggtttttacattcgtacacataaattagcggaaagtattgatactttgcttaataccgacttaaaaattgtggatatcgcgctggattacggctttgaatatgaacagtcctatataagggcctttaaacgcgaatttggaattacgccgggcaaacttcgtaaatctgagaattatgttatggataagaaggagtggcggacataa

SEQ ID NO: 53270 - protein, 119 aa, Unknown
  Obtained from environmental sample
  DOMAIN (62)...(106): Bacterial regulatory helix-turn-helix proteins, AraC family
  misc_feature (1)..(119): Xaa is any amino acid
MIRTNELIKNVLTDIEKGVKDGINADIIAKKHALSESHLQRLFKLTFNQPLGFYIRTHKLAESIDTLLNTDLKIVDIALDYGFEYEQSYIRAFKREFGITPGKLRKSENYVMDKKEWRT

SEQ ID NO: 53271 - DNA, 1017 bp, Unknown
  Obtained from environmental sample
  misc_feature (1)..(1017): n is a, c, g, or t
ttgcgctttatacttctaaccggcgttagcaagttctcccaagtgagtatcttttccgagttaaaccagataaccgatctgaccttagatccgcgctacgccgacatctgcggagtgacgcaagaagaactagaggccaacttcgggccggaaatagaggacgttttggaaaaaaacggacgtaaccgagatgagtatttagacgatatgcgccgcttctacaacggctaccgcttctccgaaaacccgcttacggtctacaacccatttgggctactcaaacattttaacagcggcggaaaattttccgaacattggtacgaaacctccacgcccacattccttgcggatttaatcgaaaagcacaaggtgaacatcttagagttgggcaacctgcgggtcaaggctgcggatttcggcaagtacgacatagataatatggagatcgcgccgctgttgtgccagaccggctacctcaccataaccgattacgacgaaaagtcgcaacgttttacgttagactatccaaacgaggaagtgcgcgccgctttcgccgaaacgcttgtaaagcacggtcttagggtcccgcctaacaagggagacgctctctacaaccaactgacggacgccctctacggcggcgacgtggacgccgcgctgaacgctataaaaatgttcctcgccgagatcccctacgacctcgtattggataaagagatacattttcaagcgctgttgcgcgtaatattcaaaatgctcggcttcgactgccgcacggaagagagaatcgcgacaggacggatcgatatgctcgtcaagacggatgattttatctattgcttcgagttcaagttagacggtagcgcggaagcggcgttggcgcagattgataataaggagtacgccgttccttgggcggagagcgccaaaaaagtgttcaaggttggggtaaactttgattctaaaaagaggaatatcgcggagtgggtgacgaacgccatgacgtcggaaccgtga

SEQ ID NO: 53272 - protein, 338 aa, Unknown
  Obtained from environmental sample
  DOMAIN (1)...(329): Protein of unknown function (DUF1703)
  misc_feature (1)..(338): Xaa is any amino acid
MRFILLTGVSKFSQVSIFSELNQITDLTLDPRYADICGVTQEELEANFGPEIEDVLEKNGRNRDEYLDDMRRFYNGYRFSENPLTVYNPFGLLKHFNSGGKFSEHWYETSTPTFLADLIEKHKVNILELGNLRVKAADFGKYDIDNMEIAPLLCQTGYLTITDYDEKSQRFTLDYPNEEVRAAFAETLVKHGLRVPPNKGDALYNQLTDALYGGDVDAALNAIKMFLAEIPYDLVLDKEIHFQALLRVIFKMLGFDCRTEERIATGRIDMLVKTDDFIYCFEFKLDGSAEAALAQIDNKEYAVPWAESAKKVFKVGVNFDSKKRNIAEWVTNAMTSEP

SEQ ID NO: 53273 - DNA, 498 bp, Unknown
  Obtained from environmental sample
  misc_feature (1)..(498): n is a, c, g, or t
atgaagattccaacaaagagctgtatatcactctttgaaaataaagtacgagaatggtttaacgacagcgtaagccggaaagattttagccgtctttacaaagcgctttcagacggcgacgcggaactggtgcaggaagaactgggcgacttcctattggagaccataagctacatggatgccaaagaggacttttatcacggaataatgctcggcgtactcgcagggatgcgcaattttaccgcaaaatccaatcgtgaaaccggttgcggccggagcgatattgttttgcggcatgcaagcggccgcggcaaggccgtcatactcgaacttaaatgtacgcccgatatgcgcgaaatagaaaaaaaatgcgaagaggccgtaagacagattgcggacggcaagtatgccaaagaactggaggcggagtgctacaccgatattgtcaaatacgggattgcgttttgtaagaaaagctgcgaagtaaggaaaggatga

SEQ ID NO: 53274 - protein, 165 aa, Unknown
  Obtained from environmental sample
  misc_feature (1)..(165): Xaa is any amino acid
MKIPTKSCISLFENKVREWFNDSVSRKDFSRLYKALSDGDAELVQEELGDFLLETISYMDAKEDFYHGIMLGVLAGMRNFTAKSNRETGCGRSDIVLRHASGRGKAVILELKCTPDMREIEKKCEEAVRQIADGKYAKELEAECYTDIVKYGIAFCKKSCEVRKG

SEQ ID NO: 53275 - DNA, 450 bp, Unknown
  Obtained from environmental sample
  misc_feature (1)..(450): n is a, c, g, or t
atggcgagttcagggggaaaaattgcatggatactggtttctggggacaataggacgcaatactacaatgagcctcaggccatgcggcgatggctggccaagcatggcgtgccacaagacaaaattgtgagcgactatgctgggcggcgcactttcgacagcttgaaacgcacccggatggtgttcgggcaggaaaaaattgtgctggtcacgtcggacttccacatggcccgcgcgctgtacttggcgaaccacttggggctaaaggcgtacggcgtgacttgcagcacggggaaaattgggttgatggccaacgcgagcttttggctgagggaatattttgcgcggcacaaggctgtgctagacgtgtggtttcccccgagcactaaattggggccgacggaagatacgcctggggataggggccaggggttagggattagggattag

SEQ ID NO: 53276 - protein, 149 aa, Unknown
  Obtained from environmental sample
  DOMAIN (2)...(116): DUF218 domain
  misc_feature (1)..(149): Xaa is any amino acid
MASSGGKIAWILVSGDNRTQYYNEPQAMRRWLAKHGVPQDKIVSDYAGRRTFDSLKRTRMVFGQEKIVLVTSDFHMARALYLANHLGLKAYGVTCSTGKIGLMANASFWLREYFARHKAVLDVWFPPSTKLGPTEDTPGDRGQGLGIRD

SEQ ID NO: 53277 - DNA, 651 bp, Unknown
  Obtained from environmental sample
  misc_feature (1)..(651): n is a, c, g, or t
atgacaacgccaccattcgacctagcaaaggccctgctcgatgcaggtgccgtgcgcctttcccccagccagccattcacctgggcctctggcctaaagtcgcccatctattgcgacaacaggctgctgctgggcctcccgcaggtcagggcccaaatcgccattgccctggctgattcactcaaagcgttcccagcggtgccgaccctcatagcgggtgccagcacagcgggcatcccctgggccgcctttgtggccgcccacctcagcctcccgatggcctacgtccgccccgagccaaagacgcacggaatgggccgccaagtcgaaggcccatcggcaagcggccacatcgttgtcttgatagaagatttaataagcacgggcggctcaagcataaaatgcgtggaagccctgcgcttggagggtgcccaatcggtttgtgtcctcgcccttttttcgtacggcctcacaaaggccaagtccgcatttgtcagcgcgagcgttcagcataccaccttggccacattccccgtcctgctggatgcagccgttaaaatgggagccatatccaaagagtcattgcagaccctggaggactggcgccgcgacccccaagcctggagcgacgcccataaagatagaggttag

SEQ ID NO: 53278 - protein, 216 aa, Unknown
  Obtained from environmental sample
  DOMAIN (39)...(161): Phosphoribosyl transferase domain
  misc_feature (1)..(216): Xaa is any amino acid
MTTPPFDLAKALLDAGAVRLSPSQPFTWASGLKSPIYCDNRLLLGLPQVRAQIAIALADSLKAFPAVPTLIAGASTAGIPWAAFVAAHLSLPMAYVRPEPKTHGMGRQVEGPSASGHIVVLIEDLISTGGSSIKCVEALRLEGAQSVCVLALFSYGLTKAKSAFVSASVQHTTLATFPVLLDAAVKMGAISKESLQTLEDWRRDPQAWSDAHKDRG

SEQ ID NO: 53279 - DNA, 492 bp, Unknown
  Obtained from environmental sample
  misc_feature (1)..(492): n is a, c, g, or t
ttggaagtattttactccggaggcggtcaggaaaaaggaataaggggcggaacggaaaacacacagggagccatagaactcgctaattgccttactcggtacgcgaatgaggaaacgacgcgacttgagtattcgcgcgctaaagccagatggaaaaaactgataacctctctcgcggcaatggaacgttgtactttaattcccttctgccgcacccctgaggacgatagattttctccctatattttacaagtcgctttcaaaaacattcccggcgaagttatggcgcgcgctcttgacgatttaggtttcgctgtttcaacaggatcggcttgctcctcctcgtctcccgaacgccccgtccttgccgcaatgggcattgaggaaaatttaagtatcgaaggcattcgcgtctcccagggatactctactacggacgaagaaatcgatctttttttggaggcagtaacggaggtgtcaaaatttctataa

SEQ ID NO: 53280 - protein, 163 aa, Unknown
  Obtained from environmental sample
  misc_feature (1)..(163): Xaa is any amino acid
MEVFYSGGGQEKGIRGGTENTQGAIELANCLTRYANEETTRLEYSRAKARWKKLITSLAAMERCTLIPFCRTPEDDRFSPYILQVAFKNIPGEVMARALDDLGFAVSTGSACSSSSPERPVLAAMGIEENLSIEGIRVSQGYSTTDEEIDLFLEAVTEVSKFL

SEQ ID NO: 53281 - DNA, 705 bp, Unknown
  Obtained from environmental sample
  misc_feature (1)..(705): n is a, c, g, or t
ttgaataatactaaatttttttatatttttacaatagtaaacgataaaaacatggcaaaagttgaatccgttataagaagaatctatcttgattgggctgcctcttccccttattcaaggagcgataattccgttccgtttggaaatccttcgtcccatcaccgcgaaggccgctatgcgaaacaggctcttgaggacgcaagaaagcgatgcgcctctgttttaaacgtgcctcctgaaactctttactttacgtcgggcggaacagagtccaacggcatcgctcttttttccaatctgacgcgcccgggaaaaggaagggtaatgtcatcccttgcggaacattcttccgtcagggagggaatgaaaactttggacaaaatgggaaaaaccaccggcagtattgccgttgactctacaggaagggtaactgccgaaacttttacaaaagcgcttgataaatacggcgacgcgcgttttgcggcggttatgtcggtaaataacgagacgggagcggtaaccgatattgcctctttaatggatgttattaaaaaaagaaaagaatccgcaccaatacattttcattgcgatcttgttcaggcaatcggaaaaataccgattaacatttcaaattgggaaattgattccgcttcaataagcgcccataaatttcaggaccgcgcgggattggacttttatatctga

SEQ ID NO: 53282 - protein, 234 aa, Unknown
  Obtained from environmental sample
  DOMAIN (28)...(234): Aminotransferase class-V
  misc_feature (1)..(234): Xaa is any amino acid
MNNTKFFYIFTIVNDKNMAKVESVIRRIYLDWAASSPYSRSDNSVPFGNPSSHHREGRYAKQALEDARKRCASVLNVPPETLYFTSGGTESNGIALFSNLTRPGKGRVMSSLAEHSSVREGMKTLDKMGKTTGSIAVDSTGRVTAETFTKALDKYGDARFAAVMSVNNETGAVTDIASLMDVIKKRKESAPIHFHCDLVQAIGKIPINISNWEIDSASISAHKFQDRAGLDFYI

SEQ ID NO: 53283 - DNA, 927 bp, Unknown
  Obtained from environmental sample
  misc_feature (1)..(927): n is a, c, g, or t
atgttagtgttaaaatttggaggctcgtccgttggaagccaaaaagggattgagcaaattatcgggatcttaaatgacaaagaatattcgggaaatgtaagcgcggtaatagtttccgcgttttcaggggtgactgacgcgcttattaaaatggcaaatgccagtgtccgcggtgaatcatacaaaaaacagatagaagatctaagcaagcgccataaagactgcgccgagcattttttaaaagcggcggaacttaaaaacgctgttaaagtaatagaagaaaacataactctgcttgcgcagacccttgacggaataactctgttgggtgaattatctttgcgcagcaaagatttggttatgagtttcggggaaaggttaagcgcaaacctgatagcgtctatttttacagctaatggcattaaagccttatttttagacgcgcgggaacttgtaaaaacaaacgccaatttcggcagggcggaagttttaaaaaaggaaaccgaagataacatcaaggcttattttagaaaagcaaagaaaacattgcagattgttacgggctttatcggctctacggcggacggatatacaaccactgtcgggcgcgacggctccgatttaagcgccgctgttttcgccgccgccctaggagctaagaaactcgaaatttggacggacgtagacggaatgttaactgccgatcccgaacaggttaaaaacgctttcctcatagatgaaatttcttataacgaagcgatggaaatttcccacttcggcgcgagggtaattttcccgccgtcggtcaaaccggcgctggaaaaaaacattcccatttttgtacgcaatacgtttaatccaaaatgcggcggtacaaaaattaccgctaatgccgcgccgggaaatcccaactcgtgccgattctga

SEQ ID NO: 53284 - protein, 308 aa, Unknown
  Obtained from environmental sample
  DOMAIN (1)...(283): Amino acid kinase family
  misc_feature (1)..(308): Xaa is any amino acid
MLVLKFGGSSVGSQKGIEQIIGILNDKEYSGNVSAVIVSAFSGVTDALIKMANASVRGESYKKQIEDLSKRHKDCAEHFLKAAELKNAVKVIEENITLLAQTLDGITLLGELSLRSKDLVMSFGERLSANLIASIFTANGIKALFLDARELVKTNANFGRAEVLKKETEDNIKAYFRKAKKTLQIVTGFIGSTADGYTTTVGRDGSDLSAAVFAAALGAKKLEIWTDVDGMLTADPEQVKNAFLIDEISYNEAMEISHFGARVIFPPSVKPALEKNIPIFVRNTFNPKCGGTKITANAAPGNPNSCRF

SEQ ID NO: 53285 - DNA, 594 bp, Unknown
  Obtained from environmental sample
  misc_feature (1)..(594): n is a, c, g, or t
atgcacatggtatgtcttgatcttgaaggagttctggttcccgagatatggatagcgttttccgaagcgacaggtatacccgaattgcggcgtacgacaagggatgagcccgattacgacaagctcatgcgcttccggcttgatctgcttaaaaaaaacaatctgaaactcaatgacatacaacgggtcatttcgggcatggatcccatgccgggcgcggttgaatttatccaatcgctgcaggagcgcacgcaggttgtaatattatccgataccttcgagcaattcgcaaaaccgctgatgaaaaaactcggctggccctgtttactgtgcaacagcctggaaataaaccctgatggggaagtaaccggatacaaactgcgccaaaaaaacggaaagaaagaagcggtaaaggccttcaaatcgctcaacataacggtctttgccgccggggactcctttaacgatcttgccatgatccgcgaggccgacgcaggctgcctgttccgcgcccccgaagcgatcagaaaagactgcgccgacatcccctgcgtcgacacatttgaagacctccttgcccgtgcaacatcataa

SEQ ID NO: 53286 - protein, 197 aa, Unknown
  Obtained from environmental sample
  DOMAIN (1)...(173): haloacid dehalogenase-like hydrolase
  misc_feature (1)..(197): Xaa is any amino acid
MHMVCLDLEGVLVPEIWIAFSEATGIPELRRTTRDEPDYDKLMRFRLDLLKKNNLKLNDIQRVISGMDPMPGAVEFIQSLQERTQVVILSDTFEQFAKPLMKKLGWPCLLCNSLEINPDGEVTGYKLRQKNGKKEAVKAFKSLNITVFAAGDSFNDLAMIREADAGCLFRAPEAIRKDCADIPCVDTFEDLLARATS

SEQ ID NO: 53287 - DNA, 1287 bp, Unknown
  Obtained from environmental sample
  misc_feature (1)..(1287): n is a, c, g, or t
ttgcaggaagccaggtcgacgtttttctccacatcttatggggccacaacgacgataaggccttttttccggaatgccatgtttggacagtccaacctggcgtacaatctgaaaggcattgccgtaagatcaaaatttgttgaaaaggatttgtcggcaataaccaatcaaagtgacaggatcaattttctcgagtcctgggcggaaaacccggaatgggaactggactggggcgattgggacaaggaaaaaataaacacccattcgcttacggcaaatctgtcggcttcgatcatggaaaagacgcaaaccttttcgatgagcgccgaactgccgccaagggacgagaagttaacctggaatacgggcataaatatatggatcaccagcaccaacgcaagctggggaatgcagcgtccggaaggccaggaggaatggaggctggatccattcaatttccgcgagagcgtcaactttggaaactttggcagtctttcttttaacatgacaatggatacagaaggctgggattcgcctgaaacaggtaaaatggaaagaaggttaagctcgcttaccacgtcgctgaatctttcaaaatggggggtctcggcgtcgtattccgcttcccgcatgctgggttatgaatataaggttggaacaagcaacgccgatacgggatggttccagcggacaggggacgagaatatgattctccgccccatgaattttaacctttcctattcaaagaacatcgccatgaaagaaatttggaaaaaaaatattgattttaccgttaacacaaggtcaagcctgaatcttaacctgcagcaatatacgagctccagttttagttttacccttggctttaccctggggataaacagattactcagcatgagcgtaagcgccgagtcaaataattcgcgtatttaccagtactttcatgactggcccggcttcgacgacgctccgatagaattgccccccgacacccagacaaacattttccttgacctttttgattctttccgttttgacaatgaagaattaagaaaaagatccggatttaagatgaagtatttccgaatatcggcaacccaccatctgggggactggaacgccatactgaactggtcaatgtcgccttaccgccctacaggcagccgcagatatgaaattaacaacgaagtgtctttcctgctccagtggatacccatcagtgaaattaagagtgatatttcgtataacaagagcaaaagccccgaatgggtggtgaaaggattatga

SEQ ID NO: 53288 - protein, 428 aa, Unknown
  Obtained from environmental sample
  misc_feature (1)..(428): Xaa is any amino acid
MQEARSTFFSTSYGATTTIRPFFRNAMFGQSNLAYNLKGIAVRSKFVEKDLSAITNQSDRINFLESWAENPEWELDWGDWDKEKINTHSLTANLSASIMEKTQTFSMSAELPPRDEKLTWNTGINIWITSTNASWGMQRPEGQEEWRLDPFNFRESVNFGNFGSLSFNMTMDTEGWDSPETGKMERRLSSLTTSLNLSKWGVSASYSASRMLGYEYKVGTSNADTGWFQRTGDENMILRPMNFNLSYSKNIAMKEIWKKNIDFTVNTRSSLNLNLQQYTSSSFSFTLGFTLGINRLLSMSVSAESNNSRIYQYFHDWPGFDDAPIELPPDTQTNIFLDLFDSFRFDNEELRKRSGFKMKYFRISATHHLGDWNAILNWSMSPYRPTGSRRYEINNEVSFLLQWIPISEIKSDISYNKSKSPEWVVKGL

SEQ ID NO: 53289 - DNA, 1338 bp, Unknown
  Obtained from environmental sample
  misc_feature (1)..(1338): n is a, c, g, or t
atggctaattatgacgacctgactaaagttttaaaagaacggattgaaaattggaagggacaagcttcatcaggcagcagcggctttgttgttcaggttggcgattctgtcgccaccgtttacggtcttaacgacgcggtttacggcgagctggttgaatttgcctcaggcgcgcagggaatagtttttaatcttgaggaagaaaacgccgggtgtgtaattttaacgggcgaagaccttgttaaagacggcgaggaagtaaaaagaacaggcaaggttgtgtctattccttccggtaaagcgtttttcggcagggtggtaaatccgctcggcgaagctcttgacggcaagggaccggtaacagccgaagtttttatgccgatggaagctcccgccgcgcctgtaatcgaccgcggaagcgtggatactccgcttcaaacgggatgtatttccattgacgcaatgattccaatcgggcgcggtcagcgggaactgataatcggtgaccgccagacgggaaaaacagccatcgccattgatacgataattaaccaaaaaggaaaaaatgttatctgtatatactgcgctatcgggcagaaggcgtcttcgatagtggcgattatgaataatcttgagaaacacggcgcaatggactacacctttgtagtactggcgtccgcttccgattcggcggctcttcaatatattgcgccttattcggcggtcgctatggcggaacattttttacatcagggaaaagacgtgcttgtggtttacgacgatctttcaaagcacgccgtcgcttaccgcgcgatcagtttgctcctgcgccgccctccgggacgcgaagctttccccggcgatgtgttttatcttcattcgcggcttttggaacgggcggtaaaactttcaacgtcaaagggcggcggctcaattaccgcaatgcccattgttgagactcaagccggcgacatttcatcctacattcccaccaacgtaatttcgataacggacggacagatttttcttgattccgaattgtttaactcgggtttccgtccggcgatagacgtaggtctttcggtaagccgtgtcggaggttccgcacagacaaaggcgatgcggaaaatttccgggcgtatcaggttagaccttgcgcagtaccgcgagatggcggcgtttgcgcagttcggcagtgatttggatagagctactcaggataaactggcgcagggcgaaagacttatggaagtgcttaaacagccgcagtattcgccgtatcatattgaagaacagattgtaattcttttccttgcggtgggagggttttcttcttga

SEQ ID NO: 53290 - protein, 445 aa, Unknown
  Obtained from environmental sample
  DOMAIN (23)...(91): ATP synthase alpha/beta family, beta-barrel domain
  misc_feature (1)..(445): Xaa is any amino acid
MANYDDLTKVLKERIENWKGQASSGSSGFVVQVGDSVATVYGLNDAVYGELVEFASGAQGIVFNLEEENAGCVILTGEDLVKDGEEVKRTGKVVSIPSGKAFFGRVVNPLGEALDGKGPVTAEVFMPMEAPAAPVIDRGSVDTPLQTGCISIDAMIPIGRGQRELIIGDRQTGKTAIAIDTIINQKGKNVICIYCAIGQKASSIVAIMNNLEKHGAMDYTFVVLASASDSAALQYIAPYSAVAMAEHFLHQGKDVLVVYDDLSKHAVAYRAISLLLRRPPGREAFPGDVFYLHSRLLERAVKLSTSKGGGSITAMPIVETQAGDISSYIPTNVISITDGQIFLDSELFNSGFRPAIDVGLSVSRVGGSAQTKAMRKISGRIRLDLAQYREMAAFAQFGSDLDRATQDKLAQGERLMEVLKQPQYSPYHIEEQIVILFLAVGGFSS

SEQ ID NO: 53291 - DNA, 519 bp, Unknown
  Obtained from environmental sample
  misc_feature (1)..(519): n is a, c, g, or t
atgttccgccatagcgaccgccgaataaggcgcaatatattgaagagccgccgaatcggaagcggacgccagtactacaaaggtgtagtccattgcgccgtgtttctcaagattattcataatcgccactatcgaagacgccttctgcccgatagcgcagtatatacagataacattttttcctttttggttaattatcgtatcaatggcgatggctgtttttcccgtctggcggtcaccgattatcagttcccgctgaccgcgcccgattggaatcattgcgtcaatggaaatacatcccgtttgaagcggagtatccacgcttccgcggtcgattacaggcgcggcgggagcttccatcggcataaaaacttcggctgttaccggtcccttgccgtcaagagcttcgccgagcggatttaccaccctgccgaaaaacgctttaccggaaggaatagacacaaccttgcctgttctttttacttcctcgccgtctttaacaaggtcttcgcccgttaa

SEQ ID NO: 53292 - protein, 172 aa, Unknown
  Obtained from environmental sample
  misc_feature (1)..(172): Xaa is any amino acid
MFRHSDRRIRRNILKSRRIGSGRQYYKGVVHCAVFLKIIHNRHYRRRLLPDSAVYTDNIFSFLVNYRINGDGCFSRLAVTDYQFPLTAPDWNHCVNGNTSRLKRSIHASAVDYRRGGSFHRHKNFGCYRSLAVKSFAERIYHPAEKRFTGRNRHNLACSFYFLAVFNKVFAR

SEQ ID NO: 53293 - DNA, 846 bp, Unknown
  Obtained from environmental sample
  misc_feature (1)..(846): n is a, c, g, or t
atggctgttttagaacgcgcgattattgacatggagctgcgtatccgcactgaagttgcggaacggctccagacagaggaaaattacagaaccgaaatggaagagcagatagaaaaattaagcaacttattgaacagcctgggcgaatatatctgcgttaccgttcctgagacaggcgagattctttttctcaatgacaacttaaggaaggcttttaatatagaagaggacggcttgggccggcgctgctatgaacttctccagacacgcaaaagaaagcggtgcgagttctgtccctggtatcagcttgaaaaagagccggacaagatagttgagtggaaacagcagcacgggaacagaacgcaccgcaagaccggccggattatagactggccgggaggcgttaaagcgcatctggaggttggagtcgatattacggaaatgaaccaggcgcagatgaaagccgaatattacacgaaagtggccaacacactcagcaatacggctcttatgctcctgtcgcaaaaagaagaaacatttgagtccacaatgatgaacggaattggcataattgccgatatgatggatttggacagagttacggtatggcggaacacaatgaaacctgacggtctgtacggagggcaggttttccgctgggacaggaatgacggaggcaagactcctacggccgtgaaattcactgaaattaaagtgtccgagtggacgccgcgatgggaaaagtcctttcggcaggcgaaaccatcaatggtccggcgcgtctgctgcccgaagccgcattgctgcaatcttttggttgtgtatccgtatttatcacccctataa

SEQ ID NO: 53294 - protein, 281 aa, Unknown
  Obtained from environmental sample
  misc_feature (1)..(281): Xaa is any amino acid
MAVLERAIIDMELRIRTEVAERLQTEENYRTEMEEQIEKLSNLLNSLGEYICVTVPETGEILFLNDNLRKAFNIEEDGLGRRCYELLQTRKRKRCEFCPWYQLEKEPDKIVEWKQQHGNRTHRKTGRIIDWPGGVKAHLEVGVDITEMNQAQMKAEYYTKVANTLSNTALMLLSQKEETFESTMMNGIGIIADMMDLDRVTVWRNTMKPDGLYGGQVFRWDRNDGGKTPTAVKFTEIKVSEWTPRWEKSFRQAKPSMVRRVCCPKPHCCNLLVVYPYLSPL

SEQ ID NO: 53295 - DNA, 855 bp, Unknown
  Obtained from environmental sample
  misc_feature (1)..(855): n is a, c, g, or t
gtggacgccgcgatgggaaaagtcctttcggcaggcgaaaccatcaatggtccggcgcgtctgctgcccgaagccgcattgctgcaatcttttggttgtgtatccgtatttatcacccctataattatgaaagaaaaatttttaggctacgtaatgtttgaggacagaaagcgggaacgcatatttacagacggtgaagcagatatcctgcaaactgccagtctgataatttcaagcaccgtaacccgctataaggaagccgaaaaaattcgcgaagcgaacgaacgcttaaaactcatgctggatgccacgccgctcggctgtcaaatcatcgatcataatctcataacgatagactgcaacgaggcagccgtgaaacttttcgggttcaggaataaacaggaatttatcgaacgatgggttgacagctgcaacccgaaatatcagcctgacgggatgagttcggacgaaaaaaggtatatgttcagaaaaaaggcgattgaggaaggcagctgcacatttgaatggatgcaccaaacggtggacgggatgccgctgcctgccgaaataacccttacgcgggtcaaatacgaggacacctttgtcctggtcaggtatacgcgcgatcttcgtaaaattaaagaaatgacagaaaatatcatgtatttcaaaaccgaggctgagaaaatatactttgacccgctgacggatatttacaacagacgctatttggacgaaaacctgaagcacgtcatatcctctctgtcccgctcgggcgttacgctcagtttgatgatgatcgacatcgactatttcaaaaatacaacgacgtttacggtcacaccaaggcgatga

SEQ ID NO: 53296 - protein, 284 aa, Unknown
  Obtained from environmental sample
  misc_feature (1)..(284): Xaa is any amino acid
MDAAMGKVLSAGETINGPARLLPEAALLQSFGCVSVFITPIIMKEKFLGYVMFEDRKRERIFTDGEADILQTASLIISSTVTRYKEAEKIREANERLKLMLDATPLGCQIIDHNLITIDCNEAAVKLFGFRNKQEFIERWVDSCNPKYQPDGMSSDEKRYMFRKKAIEEGSCTFEWMHQTVDGMPLPAEITLTRVKYEDTFVLVRYTRDLRKIKEMTENIMYFKTEAEKIYFDPLTDIYNRRYLDENLKHVISSLSRSGVTLSLMMIDIDYFKNTTTFTVTPRR

SEQ ID NO: 53297 - DNA, 546 bp, Unknown
  Obtained from environmental sample
  misc_feature (1)..(546): n is a, c, g, or t
gtgcggtgggcttacatctggttctggcaacgcagcgtccctcgattgacgttatcaccggccttatcaaagccaatatccccagccgcattgccttcatggttgcccagcaagatggacagccgcatcatcattgacgcggtgggcgcggaaaaacttctgggcaagggcgatatgctctactcgggaataacagaccccttcncaatccgtatgcagggggcctttgtatccgaagaagaagtcgaggcggtggtagcccatgttaaaacattcggcgaacctgattatattgacgatgaaatcttttttgatgaagacgaagaagaaaccgagacgtctcttttctccggagccgatgatcccctgtacgaaaaagccctggaaatcgtactgcagcagggaaaggccagcgccagttacatccagcgccgcctgaaaatcggctacaaccgcgctgcccgccttgtagaagaaatggaacgcaggggcgttgtcggccccgctcaagggtccaagccgagggaattgctgcggggagtgtaa

SEQ ID NO: 53298 - protein, 181 aa, Unknown
  Obtained from environmental sample
  misc_feature (1)..(181): Xaa is any amino acid
MRWAYIWFWQRSVPRLTLSPALSKPISPAALPSWLPSKMDSRIIIDAVGAEKLLGKGDMLYSGITDPFXIRMQGAFVSEEEVEAVVAHVKTFGEPDYIDDEIFFDEDEEETETSLFSGADDPLYEKALEIVLQQGKASASYIQRRLKIGYNRAARLVEEMERRGVVGPAQGSKPRELLRGV

SEQ ID NO: 53299 - DNA, 843 bp, Unknown
  Obtained from environmental sample
  misc_feature (1)..(843): n is a, c, g, or t
atgtttgaattgctccccgcgcccggtgttaagctctcccggattgtcaacttgcaggacaatatctccctgcgccttgccgccgcgtccgtgcgtattgtcgcgcctattccgggaaagcacgccgtgggcattgaggttcccaacgcaaagcggcacattgtgtcgttcagggaaatcatcgagagcgaactgcagcgcgaaggcaaacgcccggagattcccgtggttatggggaaggacgtttcaggcgatacggcgctgacaatcgatctgacacagatgccccatctgttgattgcgggtgctaccggctccgggaaatcggtctgcgtcaactcgttgatcctctcgatactgtaccaactgcccccttcggagtgccgccttattctcatcgatccaaaaattgtggagttgaaactctacaatgatattccccatctgctgactccggttatcaccgagccgaaaaaagcgtttcaggctttgcagtactgcatatatgaaatggagcggcgctatgcctgccttgactcaatgggggtacgcgacatacgcaattacaacaaacgcattaaagagagaaatatagcccaggagcacatgccctatattgttataatcattgacgagtttgccgaccttatggcgactaccggcaaggagcttgagtcaacactggcgcgccttgccgcaatgagccgtgcggtgggcttacatctggttctggcaacgcagcgtccctcgattgacgttatcaccggccttatcaaagccaatatccccagccgcattgccttcatggttgcccagcaagatggacagccgcatcatcattga

SEQ ID NO: 53300 - protein, 280 aa, Unknown
  Obtained from environmental sample
  DOMAIN (56)...(251): FtsK/SpoIIIE family
  misc_feature (1)..(280): Xaa is any amino acid
MFELLPAPGVKLSRIVNLQDNISLRLAAASVRIVAPIPGKHAVGIEVPNAKRHIVSFREIIESELQREGKRPEIPVVMGKDVSGDTALTIDLTQMPHLLIAGATGSGKSVCVNSLILSILYQLPPSECRLILIDPKIVELKLYNDIPHLLTPVITEPKKAFQALQYCIYEMERRYACLDSMGVRDIRNYNKRIKERNIAQEHMPYIVIIIDEFADLMATTGKELESTLARLAAMSRAVGLHLVLATQRPSIDVITGLIKANIPSRIAFMVAQQDGQPHHH

SEQ ID NO: 53301 - DNA, 852 bp, Unknown
  Obtained from environmental sample
  misc_feature (1)..(852): n is a, c, g, or t
atgggaatcttacttgccattgacccaatggaggctttttacgtacgtattgacggcgacgacagacgtgcattgtccaaggctgactctgcagtcgctattgatttgtttgacgctttggatgggtgtgatgcggttggcaaaagctataatgtcaacaaggatgaacctcttaataagaacgaagcgctcaaacttcttaccgacgtactagaatcacagcaaataggtaagataggccacgacctaaagcatctctcaatcgcgcttaaaaacgaggggattacactacgaggcgcctccttcgacgcaatgctggccgcctacgtgatagaccccggtaagcgccgctacgacctgacggagcttgccggcgagcatttgggtatagatataaaaacttgcggcggttggcacaacgagagcgggttcatcgacccgttaaccaatcacacgccattcgccgacccggtctgcgccgctctgctcctacgggagaaactccgccccataatagacgaacgcggttgcgcaaacttattcagggacatcgaactctcattggaagcggtcttggttgagatggaatggaatggcgtactaatagacaccgggcttctatctcgcctctcctccgaatacgccgccgagatcgagcgaatcacacgcggcatatacgccttcgcgggagaagaattcaacctcaactcgcctaagcaattggcggagatactcttcggcaagctcggcttgcacggcggcaaaaaaacaaagggcgggctcgcaatccaacaacgtggaggtgctggaaagtctagcggccgacaatcccgtagtgatgtcgatacttga

SEQ ID NO: 53302 - protein, 283 aa, Unknown
  Obtained from environmental sample
  DOMAIN (14)...(173): 3'-5' exonuclease
  misc_feature (1)..(283): Xaa is any amino acid
MGILLAIDPMEAFYVRIDGDDRRALSKADSAVAIDLFDALDGCDAVGKSYNVNKDEPLNKNEALKLLTDVLESQQIGKIGHDLKHLSIALKNEGITLRGASFDAMLAAYVIDPGKRRYDLTELAGEHLGIDIKTCGGWHNESGFIDPLTNHTPFADPVCAALLLREKLRPIIDERGCANLFRDIELSLEAVLVEMEWNGVLIDTGLLSRLSSEYAAEIERITRGIYAFAGEEFNLNSPKQLAEILFGKLGLHGGKKTKGGLAIQQRGGAGKSSGRQSRSDVDT

SEQ ID NO: 53303 - DNA, 957 bp, Unknown
  Obtained from environmental sample
  misc_feature (1)..(957): n is a, c, g, or t
gtggaggtgctggaaagtctagcggccgacaatcccgtagtgatgtcgatacttgactaccgcgaaaaacaaaaactgctctccacctacatagacgcgataccggcgcagatactgccgcagacggggcgcgtccacacctctttcaatcaagcgataacggccaccggacgcctctcgagcactaatcccaatttgcagaatatccccatacgcaccgagaacggacgcaaaatcagggaggctttcatcgcgccgccggacttcttgctagtctccgccgactactcgcaaatcgagctgcgcatactggcgcacctatccggcgacccgtcgctggtgcaggcatttacggacgacaaggacgtccacgcccaaaccgcgtcggccatatacggcgtgcatcccgatctagtaacgccggagatgcgccgcgccgcgaaaaccataaacttcggcctcatgtacggcatgggcccgatcaacctctccaagcaactcggcacctcctttgcggaagcgagaaacttcatagagtcatacttccaccgattcccgtctatcagagcgttcatggactcggcgatacaaaagacacgcgactgcggatattcggaaacgatattcgggcgcaaacgctacctgccggaaatcaactccacaaaccgaactgtaatggaggccgcggagcgcacggcgatcaacacgcccgtgcagggaaccgccgccgatatcataaaggtcgcgatgatcaagctgtaccaaaaaatgcccgctaagtggccgcaatcaaaaatgctgctgcaagtccacgacgagttgatctttgaaacgccggcggagagcgcgaaagagttcgctctgtgggcgaaggaggaaatgagcggggcgtgcgagctcaaagtaccgttgaaagtcgacgccggcgtcgggaggcattggggggaagcgcactag

SEQ ID NO: 53304 - protein, 318 aa, Unknown
  Obtained from environmental sample
  DOMAIN (1)...(317): DNA polymerase family A
  misc_feature (1)..(318): Xaa is any amino acid
MEVLESLAADNPVVMSILDYREKQKLLSTYIDAIPAQILPQTGRVHTSFNQAITATGRLSSTNPNLQNIPIRTENGRKIREAFIAPPDFLLVSADYSQIELRILAHLSGDPSLVQAFTDDKDVHAQTASAIYGVHPDLVTPEMRRAAKTINFGLMYGMGPINLSKQLGTSFAEARNFIESYFHRFPSIRAFMDSAIQKTRDCGYSETIFGRKRYLPEINSTNRTVMEAAERTAINTPVQGTAADIIKVAMIKLYQKMPAKWPQSKMLLQVHDELIFETPAESAKEFALWAKEEMSGACELKVPLKVDAGVGRHWGEAH

SEQ ID NO: 53305 - DNA, 483 bp, Unknown
  Obtained from environmental sample
  misc_feature (1)..(483): n is a, c, g, or t
gtggctgccttcggcatccggcggcacgatgttgtcggcgcaaggcagatgtttgatgtcgcgctggagttgtggcccgccgcgcattgcggcatttttaccgctgcggtggccgatttttccccggaaccctacgggcgggaaaaattcaagaaagctgaagcggcggagggtttttccctcaaattcacgcccaatccggatattttgaaaaccctggccgcgcggcggcgttccgatcagaagctggtcggcttcgcggcggaaacaagcgaggatctcggcgcggccgcgcgcggcaaactgcgggccaagggcgcggatcttgtggtgggcaaccgcatcggacaggaaggcgcgggcttcggcgctccgaccaatgtcgcgcatgcggcggatgcgacgggacgcgaggaacaatggcctttgatgccgaaaacggaaatcgcctggcggatatgctcatggctgctgcgcttgtga

SEQ ID NO: 53306 - protein, 160 aa, Unknown
  Obtained from environmental sample
  DOMAIN (2)...(147): DNA / pantothenate metabolism flavoprotein
  misc_feature (1)..(160): Xaa is any amino acid
MAAFGIRRHDVVGARQMFDVALELWPAAHCGIFTAAVADFSPEPYGREKFKKAEAAEGFSLKFTPNPDILKTLAARRRSDQKLVGFAAETSEDLGAAARGKLRAKGADLVVGNRIGQEGAGFGAPTNVAHAADATGREEQWPLMPKTEIAWRICSWLLRL

SEQ ID NO: 53307 - DNA, 1554 bp, Unknown
  Obtained from environmental sample
  misc_feature (1)..(1554): n is a, c, g, or t
atgtacggacacctccagggccatgtgcagcgtggcgtcaacgagctggaaacccaaacaaacagcattttaaggcagaaaaccgataccggcgcctttgtccggggtgaaaacgcctattcaattgttaagtgtgcttttaaagataactcagtaaagcccaagactgttacggatgttaagctttccgttaacattctggattcagaacttatcagcccgattttccattaccaggtggctgtggaataccttttaaaagaactgctcagcaatcatcttattgccacaattgaccatgccattgagaaggttaaggaagacagggtagatcagggactggaagaacttacagacagtgaaataatcttcaccaaactcggacaggttcagaactttaccgatgatgatcctgagaatcccaagtccaagcgctatactaacgtttccaaacttgtcatggaaaagatcgcaaatctacgggccgaaatcgatcccgcgacctttgatcagatgaacatgagggaaaatatcaagaagatcgttgatattgaaaacatcaggaacaggggcttcaacaccgccattaactcaatcacttcaattcttgacacctcgaagatgggctatcagtatatcgaaaacttcaagaatgccagggaagtttatattcgggaatatgaggataccgatttggcgaatctgccggatgaaaggtatcagattaagctcaggtattttgacaatgcccagcttgttgaagatcgcaaggcctacgagatccagttaaagagcatcgagaccgagattcagcatctttgggatacccttgatgttatttatgaagattccaagtcaggctttaaaatcgccgattttaacgatttgacaaagaagaagaagcccagcatcaagaagaggattaaggacaagaccggcgagcctttgtacgaggacatcgccaaagtttgggacgagatttcctttgtcggcgtgggcgaaaccgaagttgaacgctccaatagaacgttcctttttgagaaagacaggatcaagaaccgcttaatccttatgcggaaaaagatgaagcagatgtacgattacctttatccgattgaaaggcgggttatggaagaccggcttaactttttggagaaggaatactatcggtttgaatatatgatcaacccctatcacttgcagccggggattcttttggatgtggatattacttccataaagaggaagaaggctacgcttgacgctatggccaacgtgcttaacgaattcctctccggtgtttccaaaggcttctcgggatgccgctttcgcgtccttcagccgccgacgctccacggttcgggaagaccttgctcagtccttcaccgcagccgaggacgagaaacccgcgacttcggcgccttcttcggggggggctccggccgtttcggagggttccgctatcttgatcttgcaccagtgaacctccggccagggttccgactctgcttccagaaagaatgcggcctccaggcgccgcaggggcgccggtaa

SEQ ID NO: 53308 - protein, 517 aa, Unknown
  Obtained from environmental sample
  misc_feature (1)..(517): Xaa is any amino acid
MYGHLQGHVQRGVNELETQTNSILRQKTDTGAFVRGENAYSIVKCAFKDNSVKPKTVTDVKLSVNILDSELISPIFHYQVAVEYLLKELLSNHLIATIDHAIEKVKEDRVDQGLEELTDSEIIFTKLGQVQNFTDDDPENPKSKRYTNVSKLVMEKIANLRAEIDPATFDQMNMRENIKKIVDIENIRNRGFNTAINSITSILDTSKMGYQYIENFKNAREVYIREYEDTDLANLPDERYQIKLRYFDNAQLVEDRKAYEIQLKSIETEIQHLWDTLDVIYEDSKSGFKIADFNDLTKKKKPSIKKRIKDKTGEPLYEDIAKVWDEISFVGVGETEVERSNRTFLFEKDRIKNRLILMRKKMKQMYDYLYPIERRVMEDRLNFLEKEYYRFEYMINPYHLQPGILLDVDITSIKRKKATLDAMANVLNEFLSGVSKGFSGCRFRVLQPPTLHGSGRPCSVLHRSRGRETRDFGAFFGGGSGRFGGFRYLDLAPVNLRPGFRLCFQKECGLQAPQGRR

SEQ ID NO: 53309 - DNA, 921 bp, Unknown
  Obtained from environmental sample
  misc_feature (1)..(921): n is a, c, g, or t
atgctgttggttgataagcttggatataaatcggtttccgtaaatctggaatccgtgctttccgatctccctgccttggcgaatgaattcgccaaatggaacggagtggatcttatagccgcttactaccaccctgatctggggttactgatagctaatcccaaaatagccgaagagctggcaaactttggtatgcttcgcaaaagagagcttttggttttatatgccggcaagggcgcaaatccagcggatgcgagctgccaaaaggccgcggaacttgcggttaaattttttgagggcaagaaagccaaagcgacttcggatcttttgcagggcgaattcaccgtcaaggagctaaagaagagcaaagaagaagaagcagaagaggcagaagaaacgccggccaaggccagagctccgaagaaagccgcaggcagaggcaggaaggccgcgccggctaaagccggcacaagggcgccaacagccgctcccgcgcaagcagcgcccgcacctgccgcgccaaaagaaagcgcccgtgtggcgccgcctgtggttaccgctgccgcccccgcgatttcaaagggcccgacgaggatgacgccgatgtattcggtggttgtcgccaacgagctcttccataacggaaacgtggaagcatggaagcgcattgtcgcgagttataacgccaaatacccggcgcttcaggtgtatatttattatgaaggcgagcgtattctggacattaactccctgtttaaatgggggaaggtgaaacacggaagctcgattcagtttgctgtttccgggaacgatattaaagacgtggccaagctacagcgttatctggttcagggagccagcaagcaatttgaagcgttcctgcacggcccggtaaacaacgtgttaaagctttttggttag

SEQ ID NO: 53310 - protein, 306 aa, Unknown
  Obtained from environmental sample
  misc_feature (1)..(306): Xaa is any amino acid
MLLVDKLGYKSVSVNLESVLSDLPALANEFAKWNGVDLIAAYYHPDLGLLIANPKIAEELANFGMLRKRELLVLYAGKGANPADASCQKAAELAVKFFEGKKAKATSDLLQGEFTVKELKKSKEEEAEEAEETPAKARAPKKAAGRGRKAAPAKAGTRAPTAAPAQAAPAPAAPKESARVAPPVVTAAAPAISKGPTRMTPMYSVVVANELFHNGNVEAWKRIVASYNAKYPALQVYIYYEGERILDINSLFKWGKVKHGSSIQFAVSGNDIKDVAKLQRYLVQGASKQFEAFLHGPVNNVLKLFG

SEQ ID NO: 53311 - DNA, 1356 bp, Unknown
  Obtained from environmental sample
  misc_feature (1)..(1356): n is a, c, g, or t
ttgaagtcagacgtagaaattactatagcgtctttcccaatgggcagttcgggcaaatcatggagcgtaatgatcgcggcgacgaaatcttacatcttaagagaagtagacgagatgaccaaattcaccatcatcattgcgttgatagccattataatagcggcggtaattgtgtacgttgtccttcacaccactacacaaccgatcgttaaggtagccgataccttaaaggacatctccgaaggcgaaggggatctgaccaagtccattaacgtcaactccaaagacgaggtaggcgaccttgccctgtacttcaacaaaaccctgcaaaaaatcaaaaacctggttttgatcattaaaaatgaggcggcaagcctgagcagcgtaggcgctacccttgccagcaatatgacggaaaccgccgcggcgataaatgaaatcaccgctaatatccagagcatcaaggctcgcgtcattaaccagagcgccagcgttacagaaaccaacgccactatggaacaggttatcggcaacatcaacaaacttaacggccatgtggaaagccagagccgcagtgtttcccaggcctcatccgccattgaggagatggtagccaatatcagttcggttaccaacacgctgattaataacgccaccaatgtaaataccttaaaagaagcctccgaaataggccgtagcggactgcaggaagtagcggcggatattcaggaaattgcccgcgaatccgaagggcttttggagattaacgcggtcatggaaaacatcgccagccagaccaacctgctttcgatgaacgcggcgatagaagcggcgcacgccggagaatcgggcaagggcttcgccgtagtcgccgatgaaatccgcaaactggctgaaaattccggcgagcagtccaagacaattggtacggtactgaaaaaaatagcgggatcaatcaataaaattaaaggcgccacagataacgtgctaaccagattcgagtcgattgattcaggcgtaaagacagtagcggagcaggaggagataatacgtcatgcgatggaggagcagggcgaagggagccgtcaactccttcagggaaccagcaatttgaatggaattacccagcaggtaaaggccggttccgaagagatgcttgaaggcagcaaggaagtgatgaaggaaagccggaacctggaaaagacaacggaggagatttccggcggcatgaacgagatggcaacaggcgcggatcaggtaaacatagcggtacataatgtgaacgagctaagcaccagaaaccgcgatggcattgaaaccttaatgcgggaagtttcgcgttttaaggttaaatga

SEQ ID NO: 53312 - protein, 451 aa, Unknown
  Obtained from environmental sample
  DOMAIN (187)...(416): Methyl-accepting chemotaxis protein (MCP) signaling domain
  misc_feature (1)..(451): Xaa is any amino acid
MKSDVEITIASFPMGSSGKSWSVMIAATKSYILREVDEMTKFTIIIALIAIIIAAVIVYVVLHTTTQPIVKVADTLKDISEGEGDLTKSINVNSKDEVGDLALYFNKTLQKIKNLVLIIKNEAASLSSVGATLASNMTETAAAINEITANIQSIKARVINQSASVTETNATMEQVIGNINKLNGHVESQSRSVSQASSAIEEMVANISSVTNTLINNATNVNTLKEASEIGRSGLQEVAADIQEIARESEGLLEINAVMENIASQTNLLSMNAAIEAAHAGESGKGFAVVADEIRKLAENSGEQSKTIGTVLKKIAGSINKIKGATDNVLTRFESIDSGVKTVAEQEEIIRHAMEEQGEGSRQLLQGTSNLNGITQQVKAGSEEMLEGSKEVMKESRNLEKTTEEISGGMNEMATGADQVNIAVHNVNELSTRNRDGIETLMREVSRFKVK

SEQ ID NO: 53313 - DNA, 534 bp, Unknown
  Obtained from environmental sample
  misc_feature (1)..(534): n is a, c, g, or t
atgccccttgaagagctttacagccatttttcagccgtgcatcaggatttcgcaaggtatcaaatcccgctaaaagacaatttgactataggctgcggaaatttcagcgaacaaagcctattatcgcttattgaaaaaatgggattgacagaaaggtttaactccttgcctgagcgtttggataccgatgtcggcaggcttggggattatggcgttgatttttcgggaggcgaatggcagcgcattgccattatacgggcgctgatgcgaaacgcgccaattcaggtaatggacgagcctacggcttcgcttgaccccataagcgaaagggatttgtatgacctgttcgcaaattcgtttcagggcgacattggaattttaatcacccacagattgggcggggcaaaaaacgctgatgaaataatggtgatttccggtgggcgtgtatgcgagcagggaacgcataatgagctaatcacgcgcaaaggcaaatactctgaaatgtacgaagcccaaaggtactggtattcatga

SEQ ID NO: 53314 - protein, 177 aa, Unknown
  Obtained from environmental sample
  DOMAIN (17)...(147): ABC transporter
  misc_feature (1)..(177): Xaa is any amino acid
MPLEELYSHFSAVHQDFARYQIPLKDNLTIGCGNFSEQSLLSLIEKMGLTERFNSLPERLDTDVGRLGDYGVDFSGGEWQRIAIIRALMRNAPIQVMDEPTASLDPISERDLYDLFANSFQGDIGILITHRLGGAKNADEIMVISGGRVCEQGTHNELITRKGKYSEMYEAQRYWYS

SEQ ID NO: 53315 - DNA, 1887 bp, Unknown
  Obtained from environmental sample
  misc_feature (1)..(1887): n is a, c, g, or t
atgaaaaagaaaattaaaagtgttgttcggaaacttcagtttctgaacaacttccttataaaaacagcagttttgcaggctgaaagccgaaaaactgcgagacttgtgagggaaccaacagggttcctgaacaagtccaattttttcaggctttttgtcgatgttttcagggtcgcgcctctcatgttttgcgtcgagtattttttcacggcggtggacagcgttgccctggcgtttatcgctatggcaactgaaagagtttttttaaacgttttgtcattcacgcagggaagcaatgaccttgttcaaataatatattctttggctatacttgccgctctaaatgtcatatccgaagcgggaagcggaatagcgagctaccttggggaagtttacgctgatttgtcaaacagaagactgcatgagcgcgttaatgaaaaaataggcaagctttatgctattagctttgagaatccaaaaacgcttgacagcataaacaaggcttatttaggggcttccgcctcaaggaaggtaacgaacatagtgatggatatattcacgctttatatgccctatttcgttatttatagcgtgtatctgtattcgttgcgcccgatactcgctttttgcgtttttatagtattcattccaacgcttatagcccaggttgtcaaatcaaaaattttcattgagcgtgaagatgaattggcgacgctcagaaggcagaaagagcattacgctgcctgtgtttcgcagcgtgaatatgtaaaagaaacacgcatactcggcgtggtaccgtatttttttaagctttacgacaaaactcttggaacaataactcatctgctgataaagagcaaacgcaaagctgccgctgttgacagttttgcgaaaattctgaatttgcttggctacgcaggtgttttatacctgcttctggattcgattttcaaaggctttataggcatcggcgctttcgttgctgtattcacctcaattaagaccgtatttgaccttatggatgagctgataggttcccgcctcggcgatttttccgagggttacgcaaagctgaaagggtatattgaatttcttaatctggatatgcccgccgataacggcaaatcagtttttgagcatgacggcatccatctggacaatgtgtgttttgagtatcccgatgggccggaagttttgagcaatatcagcttcgccgtcaagaaaggcgaaaccgtagccattgtcggtgaaaacggaagcggcaagtctacgcttgtccgcctgttgcttggcgtatatctgccgaaaagtggcgcaatctatcataacaacttgaacacctctgatttacagtattcggatatgcacaaaaacatatccgctgtattccaagattttaagaaatataaaatgacgcttgaagaaaacgttagaatgggcgatttaagcaaaaatgacaggacaaagcttctttcttcgctcaatatttcaggcgttgatttaagcgaaaagtttgaacttgaaacaaaccttgggcgcgaattcggtggaattgacctttcaatcggcgaatggcagcgtgttgcgattgctcgtggcatataccgtgactcggatgtcatcgcgtttgacgaaccgacagcgtcaattgaccccctgttagagcaccaactatacaaggcgtttgctgaaatttcgcagggtaaaatcgcttttattgttacgcacaggctaagctgtataaaattttgcgacaaaattattgttatgcggcaaggcaaagtggttggtattggaagccatgaaaaactgttaggcgattgtccttattataagactttatggaattctcaggcggaaatgtataaagaagctcttattagctaa

SEQ ID NO: 53316 - protein, 628 aa, Unknown
  Obtained from environmental sample
  DOMAIN (409)...(593): ABC transporter
  misc_feature (1)..(628): Xaa is any amino acid
MKKKIKSVVRKLQFLNNFLIKTAVLQAESRKTARLVREPTGFLNKSNFFRLFVDVFRVAPLMFCVEYFFTAVDSVALAFIAMATERVFLNVLSFTQGSNDLVQIIYSLAILAALNVISEAGSGIASYLGEVYADLSNRRLHERVNEKIGKLYAISFENPKTLDSINKAYLGASASRKVTNIVMDIFTLYMPYFVIYSVYLYSLRPILAFCVFIVFIPTLIAQVVKSKIFIEREDELATLRRQKEHYAACVSQREYVKETRILGVVPYFFKLYDKTLGTITHLLIKSKRKAAAVDSFAKILNLLGYAGVLYLLLDSIFKGFIGIGAFVAVFTSIKTVFDLMDELIGSRLGDFSEGYAKLKGYIEFLNLDMPADNGKSVFEHDGIHLDNVCFEYPDGPEVLSNISFAVKKGETVAIVGENGSGKSTLVRLLLGVYLPKSGAIYHNNLNTSDLQYSDMHKNISAVFQDFKKYKMTLEENVRMGDLSKNDRTKLLSSLNISGVDLSEKFELETNLGREFGGIDLSIGEWQRVAIARGIYRDSDVIAFDEPTASIDPLLEHQLYKAFAEISQGKIAFIVTHRLSCIKFCDKIIVMRQGKVVGIGSHEKLLGDCPYYKTLWNSQAEMYKEALIS

SEQ ID NO: 53317 - DNA, 828 bp, Unknown
  Obtained from environmental sample
  misc_feature (1)..(828): n is a, c, g, or t
atgcaccgcaatgtgaaaaatgttccgcattatatgttcggcaaagggtctctggcgcagcttggcgagcttgtctccgggcgacgcaagatgtcgggagagggggcggttttcttcatcgaccactttttccgggacgggactctggccgcccgtctgcctgtggaaaagggtgacaagattatctatgtggatgtgacggaggaacccaccaccgactacatggatgccctggccgcacaaacgcgggaagcgggtttctctctgccctgctgcatggtggcccttggcggcggcgcgaccatggatacttgcaaagccgtggcgaatctcatgaccaaccccggccgggcggaagagtatcaaggctgggatctggtgaaaaatcccccggcgtataaaatagccgtccccacgcttgccggcacgggagcggaatgttcccgcacctgtgtgctcagcaatatcaaaaagcgtatcaaactgggcatgaacagcgatttttccgtgttcgaccagatcatcatggatccggaactcacccgcaccgcgccgcgcgatcagtattttttcaccggcatggacacctacatgcactgcttcgagacgctcaccggcacgtaccgcaaccgcattgtggacgccttggccganaaggccgtgggcatgtgcgaggatattttcctctctgacgacatgatgagcgacgtgaacctggaaaaactgatgatcgcctcctacctggggggtatggcggccggctttgtaggcgtggtgcatccgttttcgcaggtctgtccgttgccttgcatatgcaccacggcatag

SEQ ID NO: 53318 - protein, 275 aa, Unknown
  Obtained from environmental sample
  DOMAIN (9)...(275): Iron-containing alcohol dehydrogenase
  misc_feature (1)..(275): Xaa is any amino acid
MHRNVKNVPHYMFGKGSLAQLGELVSGRRKMSGEGAVFFIDHFFRDGTLAARLPVEKGDKIIYVDVTEEPTTDYMDALAAQTREAGFSLPCCMVALGGGATMDTCKAVANLMTNPGRAEEYQGWDLVKNPPAYKIAVPTLAGTGAECSRTCVLSNIKKRIKLGMNSDFSVFDQIIMDPELTRTAPRDQYFFTGMDTYMHCFETLTGTYRNRIVDALAXKAVGMCEDIFLSDDMMSDVNLEKLMIASYLGGMAAGFVGVVHPFSQVCPLPCICTTA

SEQ ID NO: 53319 - DNA, 1182 bp, Unknown
  Obtained from environmental sample
  misc_feature (1)..(1182): n is a, c, g, or t
atgcctatcaaggtcaacttcagcggccgcgccctgaaatacgccgaggaagaaatcgccgttgtcgcggacgtcatgcggcacggggaaaccctgacccagggccgtcatcttcaggaatttcagaggaagttcgccgcgtaccaaggcttgccggaaagcgcctgctttgcggtcatgaacggcgtgtccgctctggagctttccgcccaactgtgcctgttcaagccgggcgatgaggtcgtcgttccttcccacacctttaccgcttcggcctatccctttgccaaaaagggcgcgaagctggtctgggccgacattgaccttgcgacccgcgtggttacggcggacacgatcaaggccgtgctgacgccccaaacgcgcgccatcgtggtcgtgcatttgtacggctatgtggcggacatgcctgcgattatggaattggcccgcgcgcgcggcatcttggtcatcgaggatgcggcccagtccataggcgcggatgtcggcggcatacgttccggctcgttcggcgacatgtccatcttttccttccattcgcacaagaacctgaccacgctgggcgaaggcggcatgctcgtcgtgcgcgatgaacgactcgccaggctcgtgcccgcgatgcgccataacggacactgcgcctatcccggcgaacgcccggattactggattcccgccatgggcaacgtggatatgcccatgctcgacgggcagcccctgtggcccaacaactattgcatcggcgagatagaatgcgccctcggcagcgccatgctggatcgcgtagaccgcatcaatgcggaaaaacgcgcgcgcgccctgcgcttcattgacgctttggccgcgtacccggagcttgagtttcaccgcgtggacacgacacggcacaattatcacctgctggccgcgcgcatgacgggcggccggcgcgatgccttcatccgcgccatgtacaacaagcacggcgtgaaatgcgtcgtccagtacctgccgctcaaccgctacgagttttacgtgaaactcggcctgggccaagccgattgccccaatgccgacgccttttacgacaacatggtttccttccccttccagcactggctgacggaggaggagttcaaccatatgctggccgcaagcaaggctgtgctggaagagttacggtaa

SEQ ID NO: 53320 - protein, 393 aa, Unknown
  Obtained from environmental sample
  DOMAIN (5)...(336): Aminotransferase class-V
  misc_feature (1)..(393): Xaa is any amino acid
MPIKVNFSGRALKYAEEEIAVVADVMRHGETLTQGRHLQEFQRKFAAYQGLPESACFAVMNGVSALELSAQLCLFKPGDEVVVPSHTFTASAYPFAKKGAKLVWADIDLATRVVTADTIKAVLTPQTRAIVVVHLYGYVADMPAIMELARARGILVIEDAAQSIGADVGGIRSGSFGDMSIFSFHSHKNLTTLGEGGMLVVRDERLARLVPAMRHNGHCAYPGERPDYWIPAMGNVDMPMLDGQPLWPNNYCIGEIECALGSAMLDRVDRINAEKRARALRFIDALAAYPELEFHRVDTTRHNYHLLAARMTGGRRDAFIRAMYNKHGVKCVVQYLPLNRYEFYVKLGLGQADCPNADAFYDNMVSFPFQHWLTEEEFNHMLAASKAVLEELR

SEQ ID NO: 53321 - DNA, 732 bp, Unknown
  Obtained from environmental sample
  misc_feature (1)..(732): n is a, c, g, or t
atgcgttcgctgagaacaaaaatactgaccatcgtacttgccttcctgatgtttgtcagcgcggcgtttgtcatatactcactgtttgccgccggaaattacaagcgtctgcgtcttgagaacatcaggagaacagtggaatttgagacggaagaggtaaataaaacaattgccgaaattgaacgcagcgcgataatatttgccgcgatcgggcaggaaagttataaagcgcagtcaaaggctttaggcaaagcgatggctttggagttattccgcggctttcccacggttattggcggcggattttggttcgcgccatacgcttatgacgaaaatacttatcgtgagggattttacgcgttctatgacaaagaacaggacgcggtgcggcttgatgacacattctttacggacaagtacgactatcaccattcaagctggtacgttgaaatttccgaaaacctgaccgagccgtatcaggcggtctggactgcgccttattatgatgattccggttctttggcgctgatgacgacggcgggcgcgggcgtttttgacgaaaacggcggccttatcgcgctttctacaattgattgggagattgaggaagttataaaggaattatctgaaataaaacccacggcgggcagttttgtcctgctttgcgctcccgaaaaaaattacatcatttccaacacttatacgagggacggagccggctctcccgcttga

SEQ ID NO: 53322 - protein, 243 aa, Unknown
  Obtained from environmental sample
  SIGNAL (1)...(30)
  misc_feature (1)..(243): Xaa is any amino acid
MRSLRTKILTIVLAFLMFVSAAFVIYSLFAAGNYKRLRLENIRRTVEFETEEVNKTIAEIERSAIIFAAIGQESYKAQSKALGKAMALELFRGFPTVIGGGFWFAPYAYDENTYREGFYAFYDKEQDAVRLDDTFFTDKYDYHHSSWYVEISENLTEPYQAVWTAPYYDDSGSLALMTTAGAGVFDENGGLIALSTIDWEIEEVIKELSEIKPTAGSFVLLCAPEKNYIISNTYTRDGAGSPA

SEQ ID NO: 53323 - DNA, 1230 bp, Unknown
  Obtained from environmental sample
  misc_feature (1)..(1230): n is a, c, g, or t
ttgtcctgctttgcgctcccgaaaaaaattacatcatttccaacacttatacgagggacggagccggctctcccgcttgacagtatttcctggaaaataaccgctgattcatttgagttggacggcgtccaatacatggcgttctggcgcagaatggataacggctggcttttgtcggtacagattccggtttctgagattttcgcggaaatggaaagccagaacaaccgttttacattgattattatagtatcgtcggcgcttatgctgtgctgcgcgttttatctggtttcaagattaatcaacaggccgcttaaaaaactgaccgacgaggtttcacaacttggcctgggcaacctggatatttgcaccagcgttaatacggaagacgaattgggcatactcgccaaaacctttaataaaatgacggcggatttgaaagcgtctatcgagacaagcctgcgggaacgcgccgaaaaagagcgtatcggcgcggagctttcagtcgccacaagtatacaggcgagcatgctgccttgcattttcccggcgttcccccacagaaaagagtttgacatttacgcgaccatgctccccgcaaaagaagtgggcggcgacttctacgacttctttatgataggcgaagataaactcgccgtggtgattgcggacgtgtcaggaaagggcgttcctgcggccctgttcatggtcatcgccaagacgctgattaaaaacaacgcgcaggaagctaaagcgccgcaagaagtgttcaagacggtaaataatctgctctgtgaaaataatgacgcgtgcatgttcgtcacggcgttcatgggggttctcgacataccgacgggaaaatttacctatgtcaacgcgggacacaacgcgccgcttatcaaaagggtgggcggggaatattcgttcctgaaaacaaaacctgccttcatactcgccgggttcgagggaaccgcgtacagcgaagatgaaacaaaacttttggcgggtgatgtgatttatttatacaccgacggcgttaccgaggctatgaacaaaaaaaacgaactgttttcagaccttcgtcttctggagaccgtaaacagatataaggattctccgataaaggaattactgtcgtcggttaagaatgaaatagatattttcgccgaaggcgcgcagcaggcggacgatattaccatgctggcgcttcaaattaaaggaggggtttaa

SEQ ID NO: 53324 - protein, 409 aa, Unknown
  Obtained from environmental sample
  DOMAIN (79)...(148): HAMP domain
  misc_feature (1)..(409): Xaa is any amino acid
MSCFALPKKITSFPTLIRGTEPALPLDSISWKITADSFELDGVQYMAFWRRMDNGWLLSVQIPVSEIFAEMESQNNRFTLIIIVSSALMLCCAFYLVSRLINRPLKKLTDEVSQLGLGNLDICTSVNTEDELGILAKTFNKMTADLKASIETSLRERAEKERIGAELSVATSIQASMLPCIFPAFPHRKEFDIYATMLPAKEVGGDFYDFFMIGEDKLAVVIADVSGKGVPAALFMVIAKTLIKNNAQEAKAPQEVFKTVNNLLCENNDACMFVTAFMGVLDIPTGKFTYVNAGHNAPLIKRVGGEYSFLKTKPAFILAGFEGTAYSEDETKLLAGDVIYLYTDGVTEAMNKKNELFSDLRLLETVNRYKDSPIKELLSSVKNEIDIFAEGAQQADDITMLALQIKGGV

SEQ ID NO: 53325 - DNA, 681 bp, Unknown
  Obtained from environmental sample
  misc_feature (1)..(681): n is a, c, g, or t
atggaaaccgcttcgttttctgtactggaactttttaagttaggcggcatttttatgtggcctctgcttgttttctccatcgccactgtcgcaatttcgctggaacgcgcgttctatcttatttaccacaatctccgagttgacgacattgccgctcaagtctcggaatatgccgataagtcgaattattccgccgcccgcgaatatctttccggcatggccaacaggcggatgggagcgagaattcttcttgccctgtttacgcgcgcaaaaccgggaaaagatttttccgaacacagcgccgagcgcatcgtggaaaccgaggccatgaactgcattaactcacttgagaacggttttaactttcttaccgctcttggttccatctccccgttaacgggctttctgggcacggtttccggaatgataggcgcgttccgctcaatagcagaagctaccgaggtaaacgcgcaaattgtcgcaaacggcatttatgaagcgcttattacaaccgtattcgggcttgtaatagcgattatcgcaatggtttctcactcaatattcacacatcttgtagataaattttcaagcaatatagaaagcatctgttccgatttgataatccagtttgcggaacagcaggatcataagacacatagcaagagtaaacatgaaaattaa

SEQ ID NO: 53326 - protein, 226 aa, Unknown
  Obtained from environmental sample
  DOMAIN (67)...(204): MotA/TolQ/ExbB proton channel family
  misc_feature (1)..(226): Xaa is any amino acid
METASFSVLELFKLGGIFMWPLLVFSIATVAISLERAFYLIYHNLRVDDIAAQVSEYADKSNYSAAREYLSGMANRRMGARILLALFTRAKPGKDFSEHSAERIVETEAMNCINSLENGFNFLTALGSISPLTGFLGTVSGMIGAFRSIAEATEVNAQIVANGIYEALITTVFGLVIAIIAMVSHSIFTHLVDKFSSNIESICSDLIIQFAEQQDHKTHSKSKHEN

SEQ ID NO: 53327 - DNA, 561 bp, Unknown
  Obtained from environmental sample
  misc_feature (1)..(561): n is a, c, g, or t
ttgttgagagcaaggggccgcaggctattatcggcgaaatttgtaaaattcaagtccccaaaggcaaaggcacggtttacgccgaagttggcgggtattcaaaaagagtctcttgaacgtgtttccgcagaatgttttgaaaagcgaattaaaaaaaacatatatacaggcataaaaattattattgaagatttgctgaaaaacggagaaaaagtaatattcgcgacatcgtcatttgattttataataagaccgttagaaaaatattttggaatagaaggctctctcgcctgccggttggaatattcgcagggaataacgacaggaaaattggtaggctacagttttttcggaccaaaaaagaaaaccgccgctcaagcatggatggaaaccaacggtattaatccccaaaatgtcagtttttattcggactcctataccgacctacctcttttgaaatactgcggaaatcccgtggcggtaaaccccgacggtatcctcgcccgtaaagcgaaaaaactcgggtggaaaattttgaggtttacggaagtgttgggataa

SEQ ID NO: 53328 - protein, 186 aa, Unknown
  Obtained from environmental sample
  misc_feature (1)..(186): Xaa is any amino acid
MLRARGRRLLSAKFVKFKSPKAKARFTPKLAGIQKESLERVSAECFEKRIKKNIYTGIKIIIEDLLKNGEKVIFATSSFDFIIRPLEKYFGIEGSLACRLEYSQGITTGKLVGYSFFGPKKKTAAQAWMETNGINPQNVSFYSDSYTDLPLLKYCGNPVAVNPDGILARKAKKLGWKILRFTEVLG

SEQ ID NO: 53329 - DNA, 393 bp, Unknown
  Obtained from environmental sample
  misc_feature (1)..(393): n is a, c, g, or t
ttggggtacatggacagcgaaaattatctttaccttacaggccgcgctaaaaacatgatcgttaccgaaggcggaaaaaacgtatatcccgaagaaatagaaaacgaattccagcttttcgatgagattgaacaggtattattccgaggatacgttcaagataaaaaaacaaaaagcgaaactatgaaagctctcgtatatccaaatcccgaattcaaaaatgaaaaaggagccgttccaacagcgtcggagatgaaagacagaattaacactgtcatttccgatgtgaaccaaagattacagtcttatcaaaagattgacagagttgtgattttggataaaccgatggaaatgactaccacgaaaaagattaaacggggcgggttgaattaa

SEQ ID NO: 53330 - protein, 130 aa, Unknown
  Obtained from environmental sample
  misc_feature (1)..(130): Xaa is any amino acid
MGYMDSENYLYLTGRAKNMIVTEGGKNVYPEEIENEFQLFDEIEQVLFRGYVQDKKTKSETMKALVYPNPEFKNEKGAVPTASEMKDRINTVISDVNQRLQSYQKIDRVVILDKPMEMTTTKKIKRGGLN

SEQ ID NO: 53331 - DNA, 1308 bp, Unknown
  Obtained from environmental sample
  misc_feature (1)..(1308): n is a, c, g, or t
atgtctgttccgtacactgaaaaaccttgggcatttttagaagattacaggggaaaagcttttaagggcgaatggcccacgctgccggaaatgtataaaattaccgtttcccggtttcccgaacgcgcgtgttttaccatttatgagccggacagaataagcctgaattacacggaagcccttaaaataattgagtctatcgcgcgctggcttcacagtaaaggaataaagcgcagcgacaaagtcgccgtcacgggaaaaaacgcgcccgaatggactatagcctaccttggcgttcttttcgcgggcgcaacagttgttcctatagactaccagttaaaaatcgaagaaattgaaatattgataaaaacatccggcgcgaaaattctttttgtagatgaggaaaaatacgaatatttcaataaaactcccggcaagcttgaatctataatttcgcttaaaaagggaattggaacatatatttacgatttggacggaccgagtgcggaaattgaacaggcggttgaatccgatcttgcggcgattctttttacgtcgggaacaatgggcgtgccgaagggagttatgcttacgcacaagaaccttgtctcggattgttatttggcacagggaaccccgcttattgttttccatacggacattttttacgcgatacttccaatccaccattcatacacaatgctcgcggtatttatagaaaccatttccacaggcgcggaagttgttttcggaaaacgcatggtaacatccacaatcttaaaagaccttaaagaagcgaagataaccatgctcctcggcgtgcctttgctttttaacaaagtgctagcgggcattatcagaggcttaaaagaaaaagggcctatagtgtacggcttaatttcctttatgatggctatttcaggaattatcaaaaagatttttaaggtaaacccgggcaaaaaaatgttcggcttcattctggacaaggcaagcttaagatcagttagaatctgtatctcgggaggcggcccgctcgctcccagcgttttcagaaagtacaaccagcttggaatcgactttgtgcaggggtacgggcttacggaaacatccccgattatcacgattaaccctattgagcagtacaaggaaaccagcgtaggccgcacctgcccgcatgttgacatgaagatactagacgccgacgagcgcggaataggtgaggtaatcgtaaagggccctatggtaatgaaaggttattacaatctgccggaagaacagccgcggcgtttacgtccgacggatacctga

SEQ ID NO: 53332 - protein, 435 aa, Unknown
  Obtained from environmental sample
  DOMAIN (56)...(434): AMP-binding enzyme
  misc_feature (1)..(435): Xaa is any amino acid
MSVPYTEKPWAFLEDYRGKAFKGEWPTLPEMYKITVSRFPERACFTIYEPDRISLNYTEALKIIESIARWLHSKGIKRSDKVAVTGKNAPEWTIAYLGVLFAGATVVPIDYQLKIEEIEILIKTSGAKILFVDEEKYEYFNKTPGKLESIISLKKGIGTYIYDLDGPSAEIEQAVESDLAAILFTSGTMGVPKGVMLTHKNLVSDCYLAQGTPLIVFHTDIFYAILPIHHSYTMLAVFIETISTGAEVVFGKRMVTSTILKDLKEAKITMLLGVPLLFNKVLAGIIRGLKEKGPIVYGLISFMMAISGIIKKIFKVNPGKKMFGFILDKASLRSVRICISGGGPLAPSVFRKYNQLGIDFVQGYGLTETSPIITINPIEQYKETSVGRTCPHVDMKILDADERGIGEVIVKGPMVMKGYYNLPEEQPRRLRPTDT

SEQ ID NO: 53333 - DNA, 921 bp, Unknown
  Obtained from environmental sample
  misc_feature (1)..(921): n is a, c, g, or t
ttgccggaagcttttgccctggctcgtgaagcggcaaggcggaaccttggcgagcgcccatatgacgtacaggtgatgggttccattgttcttcaccagggcaagatcgttgaaatgaagacaggtgaaggcaagacattgatgtccgtcgccgcggcctatttaaacgccatacccggcaagggcatacatattgtcacagtcaatgattatctggcaagccgcgacgccgaatggatgcggcctattttcagttatttaggcatgactgtagggacgattctttccgatatggacaacgacaggcgcaaggaaaattacgcttgcgacattacctacggcaccaacaacgaattcggatttgactacctgcgcgacaacatgcaccgcgaaatggaaagaagggtgcagcgcgggcataattactgcattgttgacgagatcgattccatacttatagatgaggcccgcaccccgctgatcatctccggcgccgccgaggacgataccttcaaattcgccgaggttgacaaacttctaagcagcctgaaggaagtccaaaaaaaggaaaacggcgaataccccgatgaaacccagggcgaagaggttgtcggcgattacaagatcaatgaaaaaaataaaaacgtttctttcagcaatcagggccttgccgccattgaggagattttgcaaaagcgcggacttatccagggggcaattgttgacgagggaaattttgaatacatacactactttacccaggcgctgaaagcccacaaactttttcacctggatgttgactatgttgtacaggacggacaggtgcagattgtcgatgaatttaccggacgcattttgcacggcagacgttattcggacggtctgcaccaggcgatagaggcaaaagagcgtattaaatag

SEQ ID NO: 53334 - protein, 306 aa, Unknown
  Obtained from environmental sample
  DOMAIN (165)...(300): SecA preprotein cross-linking domain
  misc_feature (1)..(306): Xaa is any amino acid
MPEAFALAREAARRNLGERPYDVQVMGSIVLHQGKIVEMKTGEGKTLMSVAAAYLNAIPGKGIHIVTVNDYLASRDAEWMRPIFSYLGMTVGTILSDMDNDRRKENYACDITYGTNNEFGFDYLRDNMHREMERRVQRGHNYCIVDEIDSILIDEARTPLIISGAAEDDTFKFAEVDKLLSSLKEVQKKENGEYPDETQGEEVVGDYKINEKNKNVSFSNQGLAAIEEILQKRGLIQGAIVDEGNFEYIHYFTQALKAHKLFHLDVDYVVQDGQVQIVDEFTGRILHGRRYSDGLHQAIEAKERIK

SEQ ID NO: 53335 - DNA, 1575 bp, Unknown
  Obtained from environmental sample
  misc_feature (1)..(1575): n is a, c, g, or t
atgaccggaaccgcggacaccgaggcccccgaattcagcaaaatttacaagctcgaggttgtggttatcccgaccaacctgccggtcgcccgtaaggacgaagacgacgttgtgtacctgaacgagaccgacaagtacaaggcactttgcgatgagatcgcagagtcgaacaaaaaaggccaacccatgcttgtcggcacggtctcgattgagaaatcggagaagatttccgctttactcacaaggcgcggcgtgcgccacgaggtattgaacgccaagaaccacgcgcgcgaggctctgataatcgcggaagccggagcgaagggctcggtgacaatcgccaccaatatggcgggacgtggcacggacatcaagcttggcggcagccccgaatcccgcgccagaagacgcgccggcacgcaggcaagccccgaacaatacgcggaaatctacaaagaagaatacgaaaaatggaagaaggattatgaagaagtaaaatcgcttggaggcctgtacgtcataggcaccgaacgccacgaaagccgccgtatcgacaaccagcttcggggccgctccggaaggcagggggatcccggcaggagcaaattcttcatctccatggacgacgagcttatgaggcttttcggcggcgagaaaatgaagagcgttatgtccaggataggcatggaaggcggtgagcctatttaccatccctggctgaacaaaagtatagagaacgcccagaanaaagtcgaggaacgtaacttcgagattcgcaagcatcttctggattacgacgacgtgctaaaccagcagcgtaaatttatctacgagcagcgggacgctattctgcttgacaaggatctgaaaaacagggtaaacgacgccaccgccggccttgttggggaaatgctcgatgaattcaaccgggaacaaaggcaggacacggccgccgccctgaaaaatttgaaagaacaactccggaccaaattcggctgtcagctaacgatcgatcaaaatgaggctaaaaacccggagctgcttgaaaagaaaatcatcgccgatcttgaaaaggacatgaatgacaaggaagcccttataggcccggactaccttaacttaattatcagggacagctatcttcacgccattgacaacaaatggcttgatcacctggaaaatatggaagcgttacgcgaagccgtttacctgcgccattacgcccagaaaaacccccttaccgaatacaaggtggaaggtttccagatttttgataaaatggttgacgacatacgccaggagatagcgtcgcgcctgcacctggtgaggattcaaatcgcgccctcaggcgacgcccggcgcccaagccgcacgatcgccacatcgcagtcggcgagccacagcagcatggcctctttcggcgccgcttccggcggagccgccaagggttcgcccatggccggggcaagcagtcccgacggcgcgacagtggtacgcagccagcccaaggtaggccgcaacgacccatgcccctgcggcagcggccgcaagtacaaacactgccacgggaaataa

SEQ ID NO: 53336 - protein, 524 aa, Unknown
  Obtained from environmental sample
  DOMAIN (506)...(524): SEC-C motif
  misc_feature (1)..(524): Xaa is any amino acid
MTGTADTEAPEFSKIYKLEVVVIPTNLPVARKDEDDVVYLNETDKYKALCDEIAESNKKGQPMLVGTVSIEKSEKISALLTRRGVRHEVLNAKNHAREALIIAEAGAKGSVTIATNMAGRGTDIKLGGSPESRARRRAGTQASPEQYAEIYKEEYEKWKKDYEEVKSLGGLYVIGTERHESRRIDNQLRGRSGRQGDPGRSKFFISMDDELMRLFGGEKMKSVMSRIGMEGGEPIYHPWLNKSIENAQXKVEERNFEIRKHLLDYDDVLNQQRKFIYEQRDAILLDKDLKNRVNDATAGLVGEMLDEFNREQRQDTAAALKNLKEQLRTKFGCQLTIDQNEAKNPELLEKKIIADLEKDMNDKEALIGPDYLNLIIRDSYLHAIDNKWLDHLENMEALREAVYLRHYAQKNPLTEYKVEGFQIFDKMVDDIRQEIASRLHLVRIQIAPSGDARRPSRTIATSQSASHSSMASFGAASGGAAKGSPMAGASSPDGATVVRSQPKVGRNDPCPCGSGRKYKHCHGK

SEQ ID NO: 53337 - DNA, 549 bp, Unknown
  Obtained from environmental sample
  misc_feature (1)..(549): n is a, c, g, or t
atgcttgcgaatctcgaagttacgttcctcgactttnttctgggcgttctctatacttttgttcagccagggatggtaaataggctcaccgccttccatgcctatcctggacataacgctcttcattttctcgccgccgaaaagcctcataagctcgtcgtccatggagatgaagaatttgctcctgccgggatccccctgccttccggagcggccccgaagctggttgtcgatacggcggctttcgtggcgttcggtgcctatgacgtacaggcctccaagcgattttacttcttcataatccttcttccatttttcgtattcttctttgtagatttccgcgtattgttcggggcttgcctgcgtgccggcgcgtcttctggcgcgggattcggggctgccgccaagcttgatgtccgtgccacgtcccgccatattggtggcgattgtcaccgagcccttcgctccggcttccgcgattatcagagcctcgcgcgcgtggttcttggcgttcaatacctcgtggcgcacgccgcgccttgtgagtaa

SEQ ID NO: 53338 - protein, 182 aa, Unknown
  Obtained from environmental sample
  misc_feature (1)..(182): Xaa is any amino acid
MLANLEVTFLDFXLGVLYTFVQPGMVNRLTAFHAYPGHNALHFLAAEKPHKLVVHGDEEFAPAGIPLPSGAAPKLVVDTAAFVAFGAYDVQASKRFYFFIILLPFFVFFFVDFRVLFGACLRAGASSGAGFGAAAKLDVRATSRHIGGDCHRALRSGFRDYQSLARVVLGVQYLVAHAAPCE

SEQ ID NO: 53339 - DNA, 525 bp, Unknown
  Obtained from environmental sample
  misc_feature (1)..(525): n is a, c, g, or t
atggggttggcggttattgacgttgtatttgtgataattatcgcgattttcgcgcttcgttgcgcgctgcggggtattgtcggcgaactcatgtcaatggcggcggtggtcctgggcatattggcggcgatattcttcttcagaaaaaccgcggaactaatccggggcaagtttatacccgatgtaaaggcgctccctgagatagtagccttcatagcggttttcattatcgttttcgccgctataaaaatacttgaaactatattaaaagatattattgaaagaatacaacttggcgggccggatcgtttcctggggtttttcctcggcattgccgaaggattaattatcgtctgtttgctcctgtttctgataactgtccagccgttcgttgaacccgaactcattctggaaggcagtcttttcgcggataacctgatgccgtatatcatcggaaccaaaagagagctggaatctgtcgtcttgttcaatgagacggcggagggaggattcgccggtgtttga

SEQ ID NO: 53340 - protein, 174 aa, Unknown
  Obtained from environmental sample
  DOMAIN (5)...(159): Colicin V production protein
  misc_feature (1)..(174): Xaa is any amino acid
MGLAVIDVVFVIIIAIFALRCALRGIVGELMSMAAVVLGILAAIFFFRKTAELIRGKFIPDVKALPEIVAFIAVFIIVFAAIKILETILKDIIERIQLGGPDRFLGFFLGIAEGLIIVCLLLFLITVQPFVEPELILEGSLFADNLMPYIIGTKRELESVVLFNETAEGGFAGV

SEQ ID NO: 53341 - DNA, 1419 bp, Unknown
  Obtained from environmental sample
  misc_feature (1)..(1419): n is a, c, g, or t
atgagacggcggagggaggattcgccggtgtttgagaatatcattgcgcaggcggcggcaagccaattaaaagcggatattctttcacacaggcttgccccttccatgcttttcttcgggcccgccgcgtcggggaagagcagtacggcaatggaattggcgcgttccctttcatgcgagaagggggacgcattgtggagttgcgcctgtccttcctgcgtccgtcatcgctcccttatccatgccgatcttgcgatgattgggccgaggatttttaccgcggagatagccgcctcgcgcgccgctttcctgagagacccgtcatcggcggcgggccgttctctttttatccgttccctgagaaaactgctcgcccgtttcgcgccctccgtctgggagtacgagccgaaatcaaataagactaaccccttgccccttcttcattcgctggaagaagagcttgacgagtttgaggcaataacggccgatacttcatcaagtgatacgttgaacgacgataaatataataaactgaccgattcgcttgtcaagaacgccgtcaaacttgacgagtgcataagcgaaggcgtccccatagcgcaggtacgcaaggcggcatactgggcccggctttccccggccgggaaacgtaaaacgctgatcatcgagaacgccgaccgtatggaggagaaagcccgcagcgccctgctcaaactgcttgaagaaccgcctgaatcgatcagcattatcctgaccgccctcaggcgggaggctgtcatgcccacgattctgtcgcgccttcggccctatcgttttacagcccgcagtccgcttgaggaaaaagaaattttccgcagagttttcagggatccccgctggacgcaggaagcggaaggcgcgccttccaaagatgaagcgggaaagacgaactcgcccggccttatcgtgtcgtatcttgaatcctttcttccgcagccatctgacaaactgctgcccctcgccgcgttctttgtcgccgctgtcgcgcgttcggctgttgtttttcaaaaaagccgcggcataatcgaaatacctgatgccgttgccgctttgggaagctattgcgccaggatagcggagtccgcgggtttggaacgccacattgaagccaaagaaaccatttccgcgctgctgtcccagagcagtgattttgagggacggtctttcccccgttttcttgcccttgtgcttgaccttgtgtcatggtcgcttgaacaatgcgctcccaatccaaacctcgtcgcttgcagagaaacatggaggctgcggatcagggaagcgtatgcggcttattctgtctggaaccaaaggccggaagccgcgctggaatcgctgttcttccggctcagggaagaagcggcgggagcagcgttgacatga

SEQ ID NO: 53342 - protein, 472 aa, Unknown
  Obtained from environmental sample
  misc_feature (1)..(472): Xaa is any amino acid
MRRRREDSPVFENIIAQAAASQLKADILSHRLAPSMLFFGPAASGKSSTAMELARSLSCEKGDALWSCACPSCVRHRSLIHADLAMIGPRIFTAEIAASRAAFLRDPSSAAGRSLFIRSLRKLLARFAPSVWEYEPKSNKTNPLPLLHSLEEELDEFEAITADTSSSDTLNDDKYNKLTDSLVKNAVKLDECISEGVPIAQVRKAAYWARLSPAGKRKTLIIENADRMEEKARSALLKLLEEPPESISIILTALRREAVMPTILSRLRPYRFTARSPLEEKEIFRRVFRDPRWTQEAEGAPSKDEAGKTNSPGLIVSYLESFLPQPSDKLLPLAAFFVAAVARSAVVFQKSRGIIEIPDAVAALGSYCARIAESAGLERHIEAKETISALLSQSSDFEGRSFPRFLALVLDLVSWSLEQCAPNPNLVACRETWRLRIREAYAAYSVWNQRPEAALESLFFRLREEAAGAALT

SEQ ID NO: 53343 - DNA, 744 bp, Unknown
  Obtained from environmental sample
  misc_feature (1)..(744): n is a, c, g, or t
ttgcgccgcgccgagaatcttgccagccttaccacgcttgcggccggagtcgcccatgagataaagaaccccctgggggctatttcgattcatctccagcttatgcggaaagccctcgacaaaaaagaaagaaggcatgatacggaaacagacgcgttagtcgataaatatttttccgtgttaaacgaagaagtagaccggctgaacggcatagttatagactttttattcgccgtgcgccccatgtctctggaactctgcgagggagacctcaacgcgctggttaacgggcttggcgaattcatacgcgcggaactggagcagtccaatatacggctcctgcttgaactggatgacaagctcccccccgtgcttttcgacgaacgttatatgaaacaggttctgctcaacctgattaaaaacgcgcaggccgccatgccaaagggagggctgttgaccatcgccaccctgggaaaggacagcgaggtacggataagcgtatgcgacacgggcacggggattagccaggaaaaccttaaaaaaatatttgaaccttatttcacgacaaaaggcaacggcacgggtctcgggctgacccttgtatataaaattatcagggaacaccagggcgagatgtcggtcgattcgagggtaggggagggaacggattttgagatcatccttcccgtctatcagaaagaacagcgtttgattaattattcaggggcaaagaatgaagtttaa

SEQ ID NO: 53344 - protein, 247 aa, Unknown
  Obtained from environmental sample
  SIGNAL (1)...(18)
  DOMAIN (9)...(84): His Kinase A (phosphoacceptor) domain
  misc_feature (1)..(247): Xaa is any amino acid
MRRAENLASLTTLAAGVAHEIKNPLGAISIHLQLMRKALDKKERRHDTETDALVDKYFSVLNEEVDRLNGIVIDFLFAVRPMSLELCEGDLNALVNGLGEFIRAELEQSNIRLLLELDDKLPPVLFDERYMKQVLLNLIKNAQAAMPKGGLLTIATLGKDSEVRISVCDTGTGISQENLKKIFEPYFTTKGNGTGLGLTLVYKIIREHQGEMSVDSRVGEGTDFEIILPVYQKEQRLINYSGAKNEV

SEQ ID NO: 53345 - DNA, 660 bp, Unknown
  Obtained from environmental sample
  misc_feature (1)..(660): n is a, c, g, or t
atgaaacaaaactaccaaacacaaacaataggagaagaaatagccaattctactcttcattttgtcggggctctcctgggaattcttgggttgatctttctggtaaatcacgcacactcctctgtgccggtatatgtgatctttgcttcaacaatgatttttatgttttccgcatcgaccgcctatcacgctgttattccacaaaagataaagcaaattttccgtatcattgatcatcagtcaatttatatatttatcgcgggaacctatacacctttttgccttttggcgctaaaaggttctcttggcctgtttttattcttttttgagtggacgatggcttttacaggggtaatactttctgcctttcagttccgttttataaaaaagatcgaaatggccatttttattcttatgggctgggcaattatcggcggctgtgtacccctcgcgcactcactttcacttcagagcgttgttctcttgttcgctggaggcgcgctatacaccgccggaactttctggtaccgcgctgganaaccaaagcctgatctcaagcagcatcgcttattctgcggccatgttatctggcatctttttgttcttgccggggcggcctgccactggttttcagtatggtttctcttacttgagaaataa

SEQ ID NO: 53346 - protein, 219 aa, Unknown
  Obtained from environmental sample
  DOMAIN (8)...(209): Haemolysin-III related
  misc_feature (1)..(219): Xaa is any amino acid
MKQNYQTQTIGEEIANSTLHFVGALLGILGLIFLVNHAHSSVPVYVIFASTMIFMFSASTAYHAVIPQKIKQIFRIIDHQSIYIFIAGTYTPFCLLALKGSLGLFLFFFEWTMAFTGVILSAFQFRFIKKIEMAIFILMGWAIIGGCVPLAHSLSLQSVVLLFAGGALYTAGTFWYRAGXPKPDLKQHRLFCGHVIWHLFVLAGAACHWFSVWFLLLEK

SEQ ID NO: 53347 - DNA, 1179 bp, Unknown
  Obtained from environmental sample
  misc_feature (1)..(1179): n is a, c, g, or t
gtgttgagaccggaaagagctggggcgatttccactgacagaatttatttggaggttccaatggctcttcttcctataattgttattgccgctttcgcggtattggttatattgtttatattgatcatcctgattcttattaggctttattcagccaggcagcccgatctttctccgcagattatggacttaaagaacgagctgaacgagcttaaaacaaaacaactggaaagccagcaggcctcgcttgccagccagcagcagctcttcctgaatacgcagaactcgcttggttcccaacttcagcaaatgatgaacctgatgggccagagccttaattctgcgcaaagcaatatcgcgaaacagcttgacaattccaacaggataatcggcgacatccatacaaaactcggcactctggaaacaactgccaaaaacatccaggacatcgggaaagacatttcatccctgcaaaatattctgcaagcgccgaagctccgtggaaacctcggcgaattatttctggaagacctcctaaaacaaatattccccgaagcgaattataagattaaatacaactttaaaaacggcactcaggtcgacgcgattataaaacttggaggaaacattgtttctgttgattcaaaattcccgcttgaaagtttcaggcgtcttatagccgcagataacgaggaaagcaagaaaccattcaggaaagaatttgtttccagcgttaaaaggcgcattgacgaaatcgcgaccaaatacattaacccggcggaaggaacatttgatttcgcgatgatgtacatcccggcggaaaatgttttttatgaaaccatcattaacgattcttcaactaacaaggactacgagcttttttattacgccatgtccagacacgttattcctgtttcgccgaacagtttctacgcgtacttaatggcgctggtttacggcttaaagggatttaagattgagcaggaagcgaaaacaatacttggggagctttcgcaggttcaggacaaattcggaaaattcttcagcgaatacagcctcgtgggaaaacaccttaccagcgcgataggtagatacaatgacacggaaaaacacgctgaaaagctaaacgatcaaatcaacaaaatcacagggcaaagaacggaacttatagcccaataa

SEQ ID NO: 53348 - protein, 392 aa, Unknown
  Obtained from environmental sample
  DOMAIN (109)...(392): RmuC family
  misc_feature (1)..(392): Xaa is any amino acid
MLRPERAGAISTDRIYLEVPMALLPIIVIAAFAVLVILFILIILILIRLYSARQPDLSPQIMDLKNELNELKTKQLESQQASLASQQQLFLNTQNSLGSQLQQMMNLMGQSLNSAQSNIAKQLDNSNRIIGDIHTKLGTLETTAKNIQDIGKDISSLQNILQAPKLRGNLGELFLEDLLKQIFPEANYKIKYNFKNGTQVDAIIKLGGNIVSVDSKFPLESFRRLIAADNEESKKPFRKEFVSSVKRRIDEIATKYINPAEGTFDFAMMYIPAENVFYETIINDSSTNKDYELFYYAMSRHVIPVSPNSFYAYLMALVYGLKGFKIEQEAKTILGELSQVQDKFGKFFSEYSLVGKHLTSAIGRYNDTEKHAEKLNDQINKITGQRTELIAQ

SEQ ID NO: 53349 - DNA, 558 bp, Unknown
  Obtained from environmental sample
  misc_feature (1)..(558): n is a, c, g, or t
atggaagagaaggacattcaaagcgagcagcggcgcatcgcgaagacaattactttcggtgtaatgtacggcatgagcgccttcaggcttgccaacgagctgaacatcagccgtaccgaagccgccgcttttatcgaggcgtattttaagacgtacgccggggtaagagattttatcgaaagccttatcaaaaaaacagaggaaaccggctacgcgtccaccatcatgggaaggcggcgctttatacccgcgattaactcgcggaacaaaaccgaaaaagccgccgcggaaagagtcgcggtgaatacgccaatacagggctccgcggcggacattgtaaaaacagccatgataaatctggacaaggcccttgcggcggcaaacagttccgcgaaacttcttttgcaggtacacgacgaattaattctggaatgtccaaaagaaaaagcaaaagaaacggcggcgcttgttaggagcgaaatggaaaacgccgtaaagctaaaaatcccgctcagggtaagtgttgagaccggaaagagctggggcgatttccactga

SEQ ID NO: 53350 - protein, 185 aa, Unknown
  Obtained from environmental sample
  DOMAIN (1)...(184): DNA polymerase family A
  misc_feature (1)..(185): Xaa is any amino acid
MEEKDIQSEQRRIAKTITFGVMYGMSAFRLANELNISRTEAAAFIEAYFKTYAGVRDFIESLIKKTEETGYASTIMGRRRFIPAINSRNKTEKAAAERVAVNTPIQGSAADIVKTAMINLDKALAAANSSAKLLLQVHDELILECPKEKAKETAALVRSEMENAVKLKIPLRVSVETGKSWGDFH

SEQ ID NO: 53351 - DNA, 1647 bp, Unknown
  Obtained from environmental sample
  misc_feature (1)..(1647): n is a, c, g, or t
ttggaaaaagccggaaatgaaaaattaaaccatactgaaaaaaacatcctgcgccgttacagcggtttcggcggtatttccgcatccgatgagcgcggcgtgctttacgattattacacatcgccgccggtcgcgcaccttgtttggcagttgcttgaaaaatccggacaagtaaaagacggcgcaaatattcttgaaccttcttgcggtacgggcgttttctttgaatacgctccaatagcattcaaaaccctttcctttacaggcgtagaacttgatgaaagaacagcgaaagtatcgcaattgcttcatgattcaaagaacattaaaatacataattccagttttgaagcgtttaatctttccgataaggccggatcatttgaccatatcatcggaaacgctcctttcggcgagcgaagcgcagcgctttccgccctcgatatgcctgaagaaaaatcgcttgataattattttgtcagccggtcaatcgacaatcttaaagacaatggtactatggcgttaattgtcgcccccggagtactggaaaacaaaaccaatgaggaattccgtttgtcattaaataaaaaagcgcagtttataggagccgtcaaattgcctaaccgcagttttcatcatacccatacgcaggttatgccggacattcttttattccgtaaataccccaaagacattcaagaacggctgtccgctctcgatgacgagactttcaaaacattgcctttatatgacaacgattttgttagcggcgtttattttgaaaaacaccccgaacatattgccggcacattgagcgaaggaacagggcaatggggaaatgacgaaattaaaggcgatataacgccggaaagccttgaacaaatcctttcttcatttaaaccggcagatattatttcagaggatattttcagacaaacaagagacaattttgaaatttcagatacaacagaaaagaaagaaaaattatttttatcagatgaagaattaaaacaaattgaaaataaaactcttacgcgcggagcgataaaagtttccgaaaataatatttatattctttcaaaatataatcaatgggattttgtttctcaagacacgaaccttacaaataaactaactgaagtaaaagccatctcccataatgtacacattatacaagacgctatgaaagcaggtcataaaaatgaagtttttaattatctgcaaaaagaatgtataactcaacttctcaattatcaagaaaaatacggtaaccttccggcagacgacgcagacttaaaacgatttaccagaaataatcccgcagttaagggaatatatgagacgttcttaaaaccggacgatccgcttttaacccaagaaaacgtatatcgcaaagaagttgaaattcttgacggtcataataccgccgtatcggcgcttttattgcttcgtgaaagaatgaaggaagctactgaagaaaatatccgcgcttctttcccggataccgcagaaacgcttattaaagaaatgcgagcgcataaagacgtttttattacaacggataatatttatcagttacgagaagattttatttccggagacgcatggaagaaaatcgatgagctaaagacactcgtgccgatctga

SEQ ID NO: 53352 - protein, 548 aa, Unknown
  Obtained from environmental sample
  DOMAIN (12)...(281): N-6 DNA Methylase
  misc_feature (1)..(548): Xaa is any amino acid
MEKAGNEKLNHTEKNILRRYSGFGGISASDERGVLYDYYTSPPVAHLVWQLLEKSGQVKDGANILEPSCGTGVFFEYAPIAFKTLSFTGVELDERTAKVSQLLHDSKNIKIHNSSFEAFNLSDKAGSFDHIIGNAPFGERSAALSALDMPEEKSLDNYFVSRSIDNLKDNGTMALIVAPGVLENKTNEEFRLSLNKKAQFIGAVKLPNRSFHHTHTQVMPDILLFRKYPKDIQERLSALDDETFKTLPLYDNDFVSGVYFEKHPEHIAGTLSEGTGQWGNDEIKGDITPESLEQILSSFKPADIISEDIFRQTRDNFEISDTTEKKEKLFLSDEELKQIENKTLTRGAIKVSENNIYILSKYNQWDFVSQDTNLTNKLTEVKAISHNVHIIQDAMKAGHKNEVFNYLQKECITQLLNYQEKYGNLPADDADLKRFTRNNPAVKGIYETFLKPDDPLLTQENVYRKEVEILDGHNTAVSALLLLRERMKEATEENIRASFPDTAETLIKEMRAHKDVFITTDNIYQLREDFISGDAWKKIDELKTLVPI

SEQ ID NO: 53353 - DNA, 792 bp, Unknown
  Obtained from environmental sample
  misc_feature (1)..(792): n is a, c, g, or t
atggataaagaaattaaaagtgccgggcaaaaactggaggacaagctctattttaatcccaaaaactgctgggaagatctggaaccgaaatatgaaaaagacattgaggaatttgccgaatcatacaagcattttttaaacaattgtaaaactgaaagagaatgtgtaaattataccgttgaactgcttgagaaacagggttttattaatattgaaaaattcagaaacagaaaaccaaaagcgggaacaaaaatttttcaaaatatcaagggaaaagcccttattgccgcggttcttggtgaaaataaacctgccgaaggatgtaatattctgggcgcgcacatcgactcgcccagaattgacctgaaacaaaatcctctttatgaagaaagcggcctgggtttttttgacactcactactatggaggtattaagaaatatcaatggaccgccatacctcttgccatgcacggtgtgtttataagggatgacggaagcaaaatagaagttaaaatcggagagggtccggatgatccggtatttacgattactgatttgctgccccaccttgcgcatgaccaaatgcagaaaaaagcctcagaagttattgaaggtgaagacctggacatacttatcggctcccgtccgtataatgacaagaaagtaaaaaagaaaatcaaactcaaattactttcattattgcatcaaagatatggcatcgtggagaaagattttgcctgcgctgaaattgaatttgttcccgcgttccaggccagagctcggccgatctga

SEQ ID NO: 53354 - protein, 263 aa, Unknown
  Obtained from environmental sample
  DOMAIN (45)...(263): Aminopeptidase I zinc metalloprotease (M18)
  misc_feature (1)..(263): Xaa is any amino acid
MDKEIKSAGQKLEDKLYFNPKNCWEDLEPKYEKDIEEFAESYKHFLNNCKTERECVNYTVELLEKQGFINIEKFRNRKPKAGTKIFQNIKGKALIAAVLGENKPAEGCNILGAHIDSPRIDLKQNPLYEESGLGFFDTHYYGGIKKYQWTAIPLAMHGVFIRDDGSKIEVKIGEGPDDPVFTITDLLPHLAHDQMQKKASEVIEGEDLDILIGSRPYNDKKVKKKIKLKLLSLLHQRYGIVEKDFACAEIEFVPAFQARARPI

SEQ ID NO: 53355 - DNA, 570 bp, Unknown
  Obtained from environmental sample
  misc_feature (1)..(570): n is a, c, g, or t
atggaaaacgctttaatagtttcaagttcagaaaaagaaacagttttatttaccggctttttaaacactgcctccattcctcatgttacttcttcgctgtcatgcgacagcgcccgcgggcttattctgaagcaggatttcgatttaataattgtcgactcgcccttacaggatgaatccggcgaaagtttttcccgccaggccgccgccaatggcataagacaggtgatcctccttatagagagcggctcttttgattcaatatccgccgcctgtgaggacgacggcattttagtcatcgcgaaaccggcggacaaatctcttttatggtccgcgctgtcgctggcccgatcggttcaaagcagggtaaagcggatgcggacagaaaactaccagcccaaacaaaagattgaggacttacgcattatcgaccgcgcaaaatggattttgatttcttccatgaaaatgagcgagcaggaagcgcacaggtacatagaaaagcaggcgatggatatgcggttgtcgcggagaattatcgcggaagagatactgaaacgatacgagaactga

SEQ ID NO: 53356 - protein, 189 aa, Unknown
  Obtained from environmental sample
  DOMAIN (129)...(184): ANTAR domain
  misc_feature (1)..(189): Xaa is any amino acid
MENALIVSSSEKETVLFTGFLNTASIPHVTSSLSCDSARGLILKQDFDLIIVDSPLQDESGESFSRQAAANGIRQVILLIESGSFDSISAACEDDGILVIAKPADKSLLWSALSLARSVQSRVKRMRTENYQPKQKIEDLRIIDRAKWILISSMKMSEQEAHRYIEKQAMDMRLSRRIIAEEILKRYEN

SEQ ID NO: 53357 - DNA, 1128 bp, Unknown
  Obtained from environmental sample
  misc_feature (1)..(1128): n is a, c, g, or t
gtgaaaagccggcgaaacaataccatggaatntgacagcgcggaaaagggcggttatccgcatttcatgcttaaggaaatcatggagcagccgaaaattctgcgggatactattaattccgcggtaaaacacaacagttataaaaacatttttgacaatcttgacgttacgcgctttaccaagatcgtgataagcgcntgcggttcggcctacaacgcgggagtcgtcgccggatatgtatttgaaaagctgtgcagatttccgtcgattgaaacagagcttgccagcgagttccgctacaaggacgccgttattgacgaaaagacgctggttattctgatcagccagtcgggcgagaccgcggatactatcgcggcaatgcgggaggcaaagcgcaaaggcgccgttaccctgtcaatcgtcaatgttgtcggcagcactatcgcaaaagaatccgactactgcatgtttacggcggcgggccccgaaattgccgtggcgacgacaaaagccttttcggcccagcttgtgctgctgtatattctggcgatatggttcgccgccaaatcgggaaaattatcgcgggaaagggaactggaattgttagctgaaatcgacgccctgcccgaaaaaacggaacgcctgctgaaacagatcgacgctgttcagatgtacgcttccacctgcatcggctataagagcatcttcttcatcggcagaaacattgattatgccatcgcgctggaaggctcgctcaaactcaaagagatttcctatattcattcagaagcctacgcgggcggcgaattgaagcacggcactatttccctgattgaacaggatacgctggttgtcgccatctccaactgcgccccgctgtacggcaaaattatgagcaacacggaacaggtgataagccgcggcgcgaaagtgctgcttataggcaattgcccgaacgcgaaaccggatgaaaaactcttccatatcgccctgccggaaagccttgatctgttttccccttccctgtcggttattgttttacagcttttcagctattacgtggccgccaacaagggtttggatatagacaagcctagaaatctggccaagagcgttaccgttgaatag

SEQ ID NO: 53358 - protein, 375 aa, Unknown
  Obtained from environmental sample
  DOMAIN (226)...(361): SIS domain
  misc_feature (1)..(375): Xaa is any amino acid
MKSRRNNTMEXDSAEKGGYPHFMLKEIMEQPKILRDTINSAVKHNSYKNIFDNLDVTRFTKIVISACGSAYNAGVVAGYVFEKLCRFPSIETELASEFRYKDAVIDEKTLVILISQSGETADTIAAMREAKRKGAVTLSIVNVVGSTIAKESDYCMFTAAGPEIAVATTKAFSAQLVLLYILAIWFAAKSGKLSRERELELLAEIDALPEKTERLLKQIDAVQMYASTCIGYKSIFFIGRNIDYAIALEGSLKLKEISYIHSEAYAGGELKHGTISLIEQDTLVVAISNCAPLYGKIMSNTEQVISRGAKVLLIGNCPNAKPDEKLFHIALPESLDLFSPSLSVIVLQLFSYYVAANKGLDIDKPRNLAKSVTVE

SEQ ID NO: 53359 - DNA, 507 bp, Unknown
  Obtained from environmental sample
  misc_feature (1)..(507): n is a, c, g, or t
atgaaagctcttggcgcatatgtaattggcattcgccgtactgcccatgtcaaacctgattatatggacgaacttctgcttccgtcccagctggaagaagctttgccgcgtgccgacgtgatcgctatggctgtgcctgctaccaaagagacggctggcctcataggccgtagtcagttggcgaaaatgaagaagggcgttgtgattataaacgccgggcgaggttcatgtatcgatacggatgccctctgtgacgcgcttgaatcgggcaatttggggggagtcggccttgacgtaaccgatccagagccattgccggcggatcatcgcctctggaaactggaaaacgctgtaattaccccgcatgtggcaggcgcccgcttcatgaaggaaacaggcgagtacatgatgaagatcaaccttgaaaacgccaggcgttttattctaaatgagcctctggagaaccttgtagattataaaacaggctacagaatgaccaaggagtga

SEQ ID NO: 53360 - protein, 168 aa, Unknown
  Obtained from environmental sample
  DOMAIN (1)...(124): D-isomer specific 2-hydroxyacid dehydrogenase, NAD binding domain
  misc_feature (1)..(168): Xaa is any amino acid
MKALGAYVIGIRRTAHVKPDYMDELLLPSQLEEALPRADVIAMAVPATKETAGLIGRSQLAKMKKGVVIINAGRGSCIDTDALCDALESGNLGGVGLDVTDPEPLPADHRLWKLENAVITPHVAGARFMKETGEYMMKINLENARRFILNEPLENLVDYKTGYRMTKE

SEQ ID NO: 53361 - DNA, 444 bp, Unknown
  Obtained from environmental sample
  misc_feature (1)..(444): n is a, c, g, or t
atggataatgtacttgtactttttgaaaccgatccggtttttcgcgctgaactaaatacaattttaggcgattttaaggttgtttttcatgaaagcggggacacatcttctattgatgccgagaccgcaaagaatacggttgcaatttttggcaatccaaaagccggttttttaacgctctgtccccgtcttaaatggcttcagcttcaaaccgcaggcgcaaacgactatataaacggagaactgggtgacagtgtaatgctttcatgcgcgacaggagcctatggacacgccgtttcggaacatatgctggctctaaccttcgaactcttgaagaaactgcatctttaccgggatgaacaggctctaggccgctggaaagaacgggaaaagtcaaaagcatccgtaatgcggtcgtcctggttatcggtcttggggacatag

SEQ ID NO: 53362 - protein, 147 aa, Unknown
  Obtained from environmental sample
  misc_feature (1)..(147): Xaa is any amino acid
MDNVLVLFETDPVFRAELNTILGDFKVVFHESGDTSSIDAETAKNTVAIFGNPKAGFLTLCPRLKWLQLQTAGANDYINGELGDSVMLSCATGAYGHAVSEHMLALTFELLKKLHLYRDEQALGRWKEREKSKASVMRSSWLSVLGT

SEQ ID NO: 53363 - DNA, 363 bp, Unknown
  Obtained from environmental sample
  misc_feature (1)..(363): n is a, c, g, or t
atgagtaccgggggtataaccattgcgagccttgcaggctacntgatcggggaatttagcaattccgtggttctttcccgcctaaaagtcgctatgaaaggcaacgctctctgggtgagggcaatagccagcagcctggtgggagagttactggatagtctgacttttgtgttttttgcaagtctgacgggcgtcttcggctgggaactttttctatcccttgttctgacaaattacctttttaaggttttaattgaagtattggtgttcccgttaacatttttagcggtaaaaaaacttaaaaaagccgaggggattgacgcttatgacgttggcgtcaaactgaaccctttcaggggatga

SEQ ID NO: 53364 - protein, 120 aa, Unknown
  Obtained from environmental sample
  misc_feature (1)..(120): Xaa is any amino acid
MSTGGITIASLAGYXIGEFSNSVVLSRLKVAMKGNALWVRAIASSLVGELLDSLTFVFFASLTGVFGWELFLSLVLTNYLFKVLIEVLVFPLTFLAVKKLKKAEGIDAYDVGVKLNPFRG

SEQ ID NO: 53365 - DNA, 417 bp, Unknown
  Obtained from environmental sample
  misc_feature (1)..(417): n is a, c, g, or t
gtgggcatagacactgacaaaggggagccaaatgcccggtctttaaggccgggcattccagtttatcgttattctgacattttgatggccttttttgtggccattctcgttaccagcaatgttgcctcctcggcaaaaatcgtggatttaggggtaagtctctttggcttttggggaattccctctgtccctctggcttttgacggcggaacccttctttttcccatagtttatgttttgggagatgtttttaccgaagtttacggtttccgctttgcccgccgggtaatctggacaggttttattgctctgtccctctgttctctgcttttttttgtcctggcccgcctacctgccgatgcagtctgggaaggctatgccggaaccgccgctttgacgctatcctcggcgggatga

SEQ ID NO: 53366 - protein, 138 aa, Unknown
  Obtained from environmental sample
  misc_feature (1)..(138): Xaa is any amino acid
MGIDTDKGEPNARSLRPGIPVYRYSDILMAFFVAILVTSNVASSAKIVDLGVSLFGFWGIPSVPLAFDGGTLLFPIVYVLGDVFTEVYGFRFARRVIWTGFIALSLCSLLFFVLARLPADAVWEGYAGTAALTLSSAG

SEQ ID NO: 53367 - DNA, 1407 bp, Unknown
  Obtained from environmental sample
  misc_feature (1)..(1407): n is a, c, g, or t
gtggtttcccgcaatatgtggaaaaatctttggccggagcttcccctggacgaagtccctatcagccatgtgactaacggtgttcacccgcgtacatgggtttccagcaatatgagcgaacttcttgccaggtatttcggccctcgttttgacgagacgcccacggatctttcaatctggaaccggatggaccggatttcggacgaggaactatggcggactcatgaacgccgcagggagcggctggtggcgttcgcgcgggataggattcgcgagcagtacaaacgaacaggcgctatggaacgccgcgtcaggcaggctgaagacgctctgtccccatataccctgaccctttgtttcgcccggcgttttgcgacctataagcgtggtaccctgcttttgcgtgatccggaccgccttctcaggcttataagagataatgatcgtccgattcagcttatcttcgccggtaaggcccatccccatgatatgccaggcaaagagctaatccgcgaaattgtacattttgctgaaaaaaatgacgtttccagccgaatcgtgtttatagagaactatgatatgactgtggcaaaataccttacctctggcggcgatgtttggcttaacaccccaaggcggccattggaagcttccggtaccagcggtatgaaagccgccgtcaatggggttcttaactgctccatactggacggctggtgggatgaggcctataacccggaggttggatgggcaataggccgcggtgaagaatacgaagacaccaatctgcaggatgaaatcgagagcaaggctctttatgatctgctcgaacgggaaaacaatccccccctttatcagaggggaagggatggtctcccccgagaatggatcaaaatgatgaaaacttgcatgaaggaaatcggtcagtccatgtcgagccacagaatgtgnatggattattccaataaattttattttccggcccttaaaaactatcgccggataatcaaggacgatttcaaggaatccaaagctctggcagcctacctcacaaagctgcgccaggcttgggacggtataactatcagcaaaatcgagtccaattcgaagccggtaatgcagcgcggggatttcctgactgtaaatgccaagattgagcttggcccccttgccccggatgaagtacaggtggaactttaccacggttctgtatcaaatcagacttccgacattaaaaatgccaggcattcggagatgaaggccatagggaaggatggaaacgcctatcgttatcaggtcaggattgaatgtaatgatacgggtttccagggacacatcatcaggattcttcccaaacatgaagctctggttcatccttaccgtagtggtttcatcaagtgggcatag

SEQ ID NO: 53368 - protein, 468 aa, Unknown
  Obtained from environmental sample
  misc_feature (1)..(468): Xaa is any amino acid
MVSRNMWKNLWPELPLDEVPISHVTNGVHPRTWVSSNMSELLARYFGPRFDETPTDLSIWNRMDRISDEELWRTHERRRERLVAFARDRIREQYKRTGAMERRVRQAEDALSPYTLTLCFARRFATYKRGTLLLRDPDRLLRLIRDNDRPIQLIFAGKAHPHDMPGKELIREIVHFAEKNDVSSRIVFIENYDMTVAKYLTSGGDVWLNTPRRPLEASGTSGMKAAVNGVLNCSILDGWWDEAYNPEVGWAIGRGEEYEDTNLQDEIESKALYDLLERENNPPLYQRGRDGLPREWIKMMKTCMKEIGQSMSSHRMXMDYSNKFYFPALKNYRRIIKDDFKESKALAAYLTKLRQAWDGITISKIESNSKPVMQRGDFLTVNAKIELGPLAPDEVQVELYHGSVSNQTSDIKNARHSEMKAIGKDGNAYRYQVRIECNDTGFQGHIIRILPKHEALVHPYRSGFIKWA

SEQ ID NO: 53369 - DNA, 603 bp, Unknown
  Obtained from environmental sample
  misc_feature (1)..(603): n is a, c, g, or t
atgatagatgtacttattaattttacgccacattcccgaacaaaaattttttcttctcctccgcgaactctgcgcctctgcgtgaggattttcttttttctcttttcttttttctcttttcttttaccggctcaagctcaaacatggacggacacccgaatttacactcttgacgaaacgctaagtatcctgtattcggtttccaataaaggccgggaggaattccgctgggatcctttcttccaggaaggttcattctccattggggggcattacggggttttttccacatcacataaacccggcgataacggttttcttatgctggataacagggacatataccctgttgttctgccatacctggacaaagggcatttggtttttcccgatcaatttgtaatgaccgccaaagaggcctttacccgcactattgatgaagattcgtccaattaccggatcgcagccattattattgatccgggtcacggagggaaagatccgggagccattggcaacgtggaaatcaacgggaaacggcaaaaaataatcgagaaagatattgccttcaacgcgtcaaagattctaaaggatctgcggtaa

SEQ ID NO: 53370 - protein, 200 aa, Unknown
  Obtained from environmental sample
  misc_feature (1)..(200): Xaa is any amino acid
MIDVLINFTPHSRTKIFSSPPRTLRLCVRIFFFLFSFFSFLLPAQAQTWTDTRIYTLDETLSILYSVSNKGREEFRWDPFFQEGSFSIGGHYGVFSTSHKPGDNGFLMLDNRDIYPVVLPYLDKGHLVFPDQFVMTAKEAFTRTIDEDSSNYRIAAIIIDPGHGGKDPGAIGNVEINGKRQKIIEKDIAFNASKILKDLR

SEQ ID NO: 53371 - DNA, 1035 bp, Unknown
  Obtained from environmental sample
  misc_feature (1)..(1035): n is a, c, g, or t
ttgtgtaccgcggcgagatcacgatctgcggccttgccgaccggcatatttttttctctcccctgctttatcgagatggggcataccatgcccacctccatcgcatcagaacagcaggacgcgcttctggagactttttgcgccgatgtgcgttcacttggtctggccggtgacaagagcattggcgcggcaaaaggcgatattaaactaaccccggctggacctatgatcggtgaaatcgcggcaaggctctcgggtggctatatgtcgggctggacatacccgtattcttccggggtggaaccgatccgcgcagcaatccttgccgctattggccgcaagccggattgtcttgttccgctcaagacctggacaagcgccgagcgtgccttcatctcaatacccggaactgtcaaatcaatttcaggaatggacgcggcccgcaatcggccttttgtaaaagatctgtttttcagaatcgcctgcggggacagagtcgatttcccccggaacaatgtctctaaatgcggtaatatcctcagtgccgcgcctgaccgcgcctcggctgttgaggccgccgaaagtgccgcccgttctattctgatccgccttgatccgtcaaaccctgaaacagaggaattcctttcaaatgcagggacagggaacagggaacagggaacaggctttccccctgacgcttaccctcttggtcctgaactcaaggtggctcttgccgccctgcctgatacaagaattgaagggcaaagggaaagccttcaaatagtcccgttcccggcctttcaaacctctggtttaaaagactatgtcggacgcagtgtgatggagagccttgaggcggtgcgggagcttagcggccttaaattgccggaattttatgttgaaaatgccataaatacccccaaatcttccgataataacagaaataacttcctgggaaaagagttctgggcggcgttgattcgcggcggctatcaaggggctgtgtactatatagataaaatcaatgagcaatag

SEQ ID NO: 53372 - protein, 344 aa, Unknown
  Obtained from environmental sample
  misc_feature (1)..(344): Xaa is any amino acid
MCTAARSRSAALPTGIFFSLPCFIEMGHTMPTSIASEQQDALLETFCADVRSLGLAGDKSIGAAKGDIKLTPAGPMIGEIAARLSGGYMSGWTYPYSSGVEPIRAAILAAIGRKPDCLVPLKTWTSAERAFISIPGTVKSISGMDAARNRPFVKDLFFRIACGDRVDFPRNNVSKCGNILSAAPDRASAVEAAESAARSILIRLDPSNPETEEFLSNAGTGNREQGTGFPPDAYPLGPELKVALAALPDTRIEGQRESLQIVPFPAFQTSGLKDYVGRSVMESLEAVRELSGLKLPEFYVENAINTPKSSDNNRNNFLGKEFWAALIRGGYQGAVYYIDKINEQ

SEQ ID NO: 53373 - DNA, 759 bp, Unknown
  Obtained from environmental sample
  misc_feature (1)..(759): n is a, c, g, or t
atgcaggaacaaataatcattttaggcgccggagtcatgcaggggccggcgatcaggatagcgaaagagttgggtttgtttacggttgtggcggacggcagttccgcggccccatgcatcccaatggctgacaagttcgagcagattgacctcaaagacaaggaaggtatcgagaccctggctcgctcgctgcaaaattcaggcggcctggtcggaattatgactgcgggaaccgatttttccgccacggtcgcctgggccgcagaaaaactcgggcttccgggcatcccctacgaggcggcgctgaacgcctcggacaaggcccgcatgagatcctgcttcaaaaaagcaggcctgccttcgccggaattcaccgccattaccggggctgaactgcaagataagcccgttctgcctttccctctggtggtaaagcccgtggacaatatgggagggcggggctgccgccgtgtaaataatatagaagaataccgcgaagcggcggctgaagcgattcggttttcccgttcaggcagggccatcgtggaagcgtttatggaggggccggaattctccgtggacgcgattgtgtaccgcggcgagatcacgatctgcggccttgccgaccggcatatttttttctctcccctgctttatcgagatggggcataccatgcccacctccatcgcatcagaacagcaggacgcgcttctggagactttttgcgccgatgtgcgttcacttggtctggccggtga

SEQ ID NO: 53374 - protein, 252 aa, Unknown
  Obtained from environmental sample
  DOMAIN (105)...(223): Phosphoribosylglycinamide synthetase, ATP-grasp (A) domain
  misc_feature (1)..(252): Xaa is any amino acid
MQEQIIILGAGVMQGPAIRIAKELGLFTVVADGSSAAPCIPMADKFEQIDLKDKEGIETLARSLQNSGGLVGIMTAGTDFSATVAWAAEKLGLPGIPYEAALNASDKARMRSCFKKAGLPSPEFTAITGAELQDKPVLPFPLVVKPVDNMGGRGCRRVNNIEEYREAAAEAIRFSRSGRAIVEAFMEGPEFSVDAIVYRGEITICGLADRHIFFSPLLYRDGAYHAHLHRIRTAGRASGDFLRRCAFTWSGR

SEQ ID NO: 53375 - DNA, 636 bp, Unknown
  Obtained from environmental sample
  misc_feature (1)..(636): n is a, c, g, or t
atgacaaaaagcggcataataatttccggcgatgccggtgcggttaatttccgtgaaatcagcgcaggaaatatcgcgccaaatacgctttatcgcagcagccatcccatcaaggacgacaggcaggaaccggttatttcaatgcttgcgtcaagcgcgcggattgccgcggtaataaatttatctgactttgacgctgaaataaaaagaaaagctttctttgccccctggtacaataagctccttataaacaaccgggttatcgccctgggcatggactttagccaaaccagtgagtattttcagaaaaagctgaagaaagggctgcaatttatcatcaataccgaagggccctggcttattcattgccacgcgggaattgaccgtaccggttttgtttgtattgtgctggaatcccttatgggggcgacgctggatgagattataaacgattaccttcagtcatttaacagcatatataattcgagcatttatggcgaagtaaataaaggggattctcttgtagttatgaagcttttatccgctatgggcgattatatgccgttagatgaccggaatctgcgggcaatcgccgaacattatctgattactgccattaaactttccgccgcctga

SEQ ID NO: 53376 - protein, 211 aa, Unknown
  Obtained from environmental sample
  misc_feature (1)..(211): Xaa is any amino acid
MTKSGIIISGDAGAVNFREISAGNIAPNTLYRSSHPIKDDRQEPVISMLASSARIAAVINLSDFDAEIKRKAFFAPWYNKLLINNRVIALGMDFSQTSEYFQKKLKKGLQFIINTEGPWLIHCHAGIDRTGFVCIVLESLMGATLDEIINDYLQSFNSIYNSSIYGEVNKGDSLVVMKLLSAMGDYMPLDDRNLRAIAEHYLITAIKLSAA

SEQ ID NO: 53377 - DNA, 2013 bp, Unknown
  Obtained from environmental sample
  misc_feature (1)..(2013): n is a, c, g, or t
atgcgcggcgaaaatgactctcatttaatgggtgaaaacgctacaattcaggacaatataaacgttttgaaaaaagcaattactgttcaaaaccgtcttataaaagaaacttttaattcacagttgagtgaaatcccgagaatgttcgccatttacaaggaagtggaagatttctttttcgatgtgaagggaagcgacgggctgcgcgactgggacgaaattaaagatgtcattcttttattaagcgatgacaatcacggactgttacgcgcaataccgcagcctcaggacaaaccgcactgcggcggctacggtatttattatcattttgactatcacggcgggccttgcagttatgaatggcttaaccatacaaacatggtacgcgcatgggaacagctgacaatggcctatgagtacggtatacgcgagatgtggatagtcaatgtaggcgatataaaaggaaacgagtacccgctcagcttttttatggatttagcgtatgattatgacgaatggggaatttcccgtccggacagcgcggcggaatatacaaaccagtggttagatacgcagtttggaaacgcgcttacatcttcgcaaaaaacgcaagtccgcaatttattggacacatacactacatggagcgcgctgagaatccccgaaacgcttaatcctgatgtctttaaaaacaattttcatgaaattgaaaatacatataaaactgtttcaaacataatggcgcaaacatcagttttgcgtaatgaattgcccgggcaatctcttgcggcgtttgaaagcatgatttattttccgttaatggctttttttaataccatgctgataaatctggaagcaggaatgaatcatacccacgcacaaagaggaacattgattgccaatcagtactcggtttcattattggaaaagatttcaatggatcgcgtatatattaatgaatttcacaggattttaaacggtaaatggaatcacatgatggaatcggcgcatatgtgtttccgcacatgggatgataataactggacttatccgattgtaaaaagcatagctcccattccgcacccgaaaattgttgtaagttttagaggcgataatacttacaatctgggacatcattggcaggacaggattcctgtctgcaattcggaaatgacacggcctgacataaataaaataatatttgatatagacagccgcagtgatattgactttaatttttcaataacctgcgataaacaatggctttctttttcacataacagtggaaaatcaaacttgaaggaacagccgcgaacatcaatagaagtgtttttagacagggaaaaactgggtaaagacagcgaagaaattgctttaattcagattaaatttgaattttcggatggaacagaaaaaacggctctgttgaatgttaaggcaaataataacaaccattcacatcatcccggcgcgtttcttgaatcacaaaattatatttgcattaacgcttctcattaccatgaaaagacggatatagacggcatggggtggcggattgtttcacgtctgggcagaaacggggatgcgataaaattttttcctgttacaaaaaaatgggaaaacgaaaccagccgcccttatgtaaaatacgattttattgtcagtgaaacacaggaatacacagtctgtttttatttatcgccaagaaacccgatgataaaaggcggcgcgttaaaaggttttttcagcgttaatgacagccagccaaaaccgtttgatataatcggatcaggctattacgcgggaggctctgacaaggattggtcttacggcgcaacaaatagtatacgaaaaatcagtatttccgtttctcttaacaaaggttttaattatttaaaattttacgcatcagaggcaaatgttattctggaaaatattgttatatatccaaaagatatcccaatccctgaaacacatttagcgcctcctgaaagttatcgcataccggaatag

SEQ ID NO: 53378 - protein, 670 aa, Unknown
  Obtained from environmental sample
  misc_feature (1)..(670): Xaa is any amino acid
MRGENDSHLMGENATIQDNINVLKKAITVQNRLIKETFNSQLSEIPRMFAIYKEVEDFFFDVKGSDGLRDWDEIKDVILLLSDDNHGLLRAIPQPQDKPHCGGYGIYYHFDYHGGPCSYEWLNHTNMVRAWEQLTMAYEYGIREMWIVNVGDIKGNEYPLSFFMDLAYDYDEWGISRPDSAAEYTNQWLDTQFGNALTSSQKTQVRNLLDTYTTWSALRIPETLNPDVFKNNFHEIENTYKTVSNIMAQTSVLRNELPGQSLAAFESMIYFPLMAFFNTMLINLEAGMNHTHAQRGTLIANQYSVSLLEKISMDRVYINEFHRILNGKWNHMMESAHMCFRTWDDNNWTYPIVKSIAPIPHPKIVVSFRGDNTYNLGHHWQDRIPVCNSEMTRPDINKIIFDIDSRSDIDFNFSITCDKQWLSFSHNSGKSNLKEQPRTSIEVFLDREKLGKDSEEIALIQIKFEFSDGTEKTALLNVKANNNNHSHHPGAFLESQNYICINASHYHEKTDIDGMGWRIVSRLGRNGDAIKFFPVTKKWENETSRPYVKYDFIVSETQEYTVCFYLSPRNPMIKGGALKGFFSVNDSQPKPFDIIGSGYYAGGSDKDWSYGATNSIRKISISVSLNKGFNYLKFYASEANVILENIVIYPKDIPIPETHLAPPESYRIPE

SEQ ID NO: 53379 - DNA, 495 bp, Unknown
  Obtained from environmental sample
  misc_feature (1)..(495): n is a, c, g, or t
ttgatcagatcggccgaggtcggggcgatcctgccgcggcaagcgcggaacgaagttatcctctcctatcccggttttcaggcgattacagtacaccgcatggcgcactttttatggacgcgcaatattccccttatacccagaatgatgaacgagcttatacatacgcggaccggaatagacatccatccgggcgctcaaatcggggagtcattttttatcgatcacgggacaggtattgttatcggcgaaaccacaataatcggcaataatgtcaaactttatcagggcgttacgcttggagcgctttccgttaaaaaagaggagagcggcaggaaacgccatcccacaatagaagacgatgttacaatttacgcaaacgctacaattctgggcggagacactgtaatcgggcgcggcagtataatcgggggcagcgtatggattacccaatccgttcctcaggggagtaaaatttacttaaagaaagagtaa

SEQ ID NO: 53380 - protein, 164 aa, Unknown
  Obtained from environmental sample
  misc_feature (1)..(164): Xaa is any amino acid
MIRSAEVGAILPRQARNEVILSYPGFQAITVHRMAHFLWTRNIPLIPRMMNELIHTRTGIDIHPGAQIGESFFIDHGTGIVIGETTIIGNNVKLYQGVTLGALSVKKEESGRKRHPTIEDDVTIYANATILGGDTVIGRGSIIGGSVWITQSVPQGSKIYLKKE

SEQ ID NO: 53381 - DNA, 1848 bp, Unknown
  Obtained from environmental sample
  misc_feature (1)..(1848): n is a, c, g, or t
atgactagcagtcatgtgactggcagtcacacaattagcggccacacaatcagcgggcatataaaacgtatttcagggccggttatccgcatcgcgggtcttagcggggcaggccttttcgacgtggtggaagtaggcaaaaaaaagctcatcggtgaaatcgtcaggcttgagcagcacgaagcggttgttcaggtttatgaggacgagaccgggcttatgatagggtctgaagcggtatcgaccggacggcctttgtccgtgcttttgggacccggcctaatcgggacaatatacgacggtattcagcgccccctcgaaaaactttttgatcaaaacggggcgttcatggaatcaggaagccgcggcgaaccgctggacacggaaaaaaagtggccctttgttccggatcctgttttggccgcaaaaatagcctcaggcgaaaaagttcccgccgttcccggtcttttacttggtacggtaaaggaaaccgagagcgttacttgcaagattatggcgcctgcgccgaatacgcgttcggtgcatatagacaacattacagagcttagtccccaggcggaacttacggtgtcttccgttgtggcaaggacggacgagggcagggaaattacacttgcccattggtggcctgtacgcattccaaggccaagcgccgagcggctttcccccgatacgccgcttattaccggccaaagggtgatcgacgtttttttccccatttccaagggcggaaccgccgccatacccggaggcttcggcacaggcaagaccatgacccagcatgccatcgccaagtggtgcgacgcggacgtgatcatctacataggctgcggagaacgtggaaacgagatgaccgacgtgcttacagaatttcctaatcttatagatccccgcagcggcaggtcccttatggagcggactgtgcttattgccaacacttccaatatgccggtagcggcgcgggaagtttcaatctacacgggcgttaccatagcggagttttaccgcgacatgggctaccacgtcgccataatggcggattccacaagccgctgggcggaagccctgcgggagctttccgggcgcatggaagaaatgcccgccgaggaaggtttccccgcgtacctgccgactcggcttgctgagttttacgagcgcgccggaagggtaaaaaccctttccggcgaagaaggatcggtttcccttatcggcgcggtttcccccccgggcggcgatttctcggagccggtaacccagcatacaaaaaggtttatccgctgtttctgggcgctggatcgcgagcttgcaaacgccaggcattaccccgctatttcgtggatcgacagttacagcgagtacgccgccgaggttgagccctggtgggaaacggtaaacccacagtgggcggcggtgcgccgcagcgcgatagagcttttgaaaagggaacagcgcctttcggaaatagtccacattataggggctgacgccctgccggacaatcaaaggcttatcctgcttgccgcggaaataatcaagaacggatttttgcagcagaacagttttgacgaagttgatatgtactgcgttccggccaaacagatacggcttttggaactaatcatggaattttatgaaagggccagtacctgtataaaactcggagctcctcttttgaaaatcacatccctttcgcttcgcgagggtctttcaaggctcaagagcagcgtaaagaacgacgatcccggcggcttcgcggaatttgagcaggaaatgaaggccgatttggaaacgcttgagcggggctaccgcaacagggaaactttatga

SEQ ID NO: 53382 - protein, 615 aa, Unknown
  Obtained from environmental sample
  DOMAIN (21)...(83): ATP synthase alpha/beta family, beta-barrel domain
  misc_feature (1)..(615): Xaa is any amino acid
MTSSHVTGSHTISGHTISGHIKRISGPVIRIAGLSGAGLFDVVEVGKKKLIGEIVRLEQHEAVVQVYEDETGLMIGSEAVSTGRPLSVLLGPGLIGTIYDGIQRPLEKLFDQNGAFMESGSRGEPLDTEKKWPFVPDPVLAAKIASGEKVPAVPGLLLGTVKETESVTCKIMAPAPNTRSVHIDNITELSPQAELTVSSVVARTDEGREITLAHWWPVRIPRPSAERLSPDTPLITGQRVIDVFFPISKGGTAAIPGGFGTGKTMTQHAIAKWCDADVIIYIGCGERGNEMTDVLTEFPNLIDPRSGRSLMERTVLIANTSNMPVAAREVSIYTGVTIAEFYRDMGYHVAIMADSTSRWAEALRELSGRMEEMPAEEGFPAYLPTRLAEFYERAGRVKTLSGEEGSVSLIGAVSPPGGDFSEPVTQHTKRFIRCFWALDRELANARHYPAISWIDSYSEYAAEVEPWWETVNPQWAAVRRSAIELLKREQRLSEIVHIIGADALPDNQRLILLAAEIIKNGFLQQNSFDEVDMYCVPAKQIRLLELIMEFYERASTCIKLGAPLLKITSLSLREGLSRLKSSVKNDDPGGFAEFEQEMKADLETLERGYRNRETL

SEQ ID NO: 53383 - DNA, 507 bp, Unknown
  Obtained from environmental sample
  misc_feature (1)..(507): n is a, c, g, or t
atgatcacgtccgcgtcgcaccacttggcgatggcatgctgggtcatggtcttgcctgtgccgaagcctccgggtatggcggcggttccgcccttggaaatggggaaaaaaacgtcgatcaccctttggccggtaataagcggcgtatcgggggaaagccgctcggcgcttggccttggaatgcgtacaggccaccaatgggcaagtgtaatttccctgccctcgtccgtccttgccacaacggaagacaccgtaagttccgcctggggactaagctctgtaatgttgtctatatgcaccgaacgcgtattcggcgcaggcgccataatcttgcaagtaacgctctcggtttcctttaccgtaccaagtaaaagaccgggaacggcgggaactttttcgcctgaggctatttttgcggccaaaacaggatccggaacaaagggccactttttttccgtgtccagcggttcgccgcggcttcctgattccatgaacgccccgttttga

SEQ ID NO: 53384 - protein, 168 aa, Unknown
  Obtained from environmental sample
  misc_feature (1)..(168): Xaa is any amino acid
MITSASHHLAMACWVMVLPVPKPPGMAAVPPLEMGKKTSITLWPVISGVSGESRSALGLGMRTGHQWASVISLPSSVLATTEDTVSSAWGLSSVMLSICTERVFGAGAIILQVTLSVSFTVPSKRPGTAGTFSPEAIFAAKTGSGTKGHFFSVSSGSPRLPDSMNAPF

SEQ ID NO: 53385 - DNA, 1224 bp, Unknown
  Obtained from environmental sample
  misc_feature (1)..(1224): n is a, c, g, or t
ttgactcatccttgtattataatcgtttttgaggccgcagcaagctgcggggtattaaaccaaatgcttcccaataaacaaatattaaatgaatacataattttaaaagaacagtacgtcctgttggtatacaagcgctttgtgtgtagcgccgagcaattgcttgaagatgaaaagcagcaactgttatttgccgaggaagatgaacagcctgaaacaaatgaagaaaagtcagaagagcttcaaacggttaaatcatttacacgcaagaagaatggcgggcgcaagccgattagcgcgaaccttgaacgaaggccgagagtcatagacataccagaaagtgaaaaaacatgcgcttgcggggcgaatttgactcggattggcgaagaaaccagtgaaaagctggttataataccaccacagatttatgtggaccagatagtcaggccgaaatacgcctgcaggcaatgcgaggggacagaagaggaagaggagcctgcggtgcgcatcgcgcctgtagagcctgcgattattcccaagagcatagcgagccccagcttgctggcgaccatcttcacgcaaaagtttgaaatgcaccttccctattacaggcaggagaaacaatttgagcagataggggcagcaataagccgccaggatatgagcaactggcagcagcaggcgtatgaaaaattagagccgttattcgccatgctggaagaaacggtaaaaagcggccctgtgctgcagatggatgagagtgaggtacaggtaataggggaagaagaccggagcgacacacagaaaagctatatgtggcttgctcgcggcggtcctttaggcaaaaaagtaattttgtataagtaccgtccgactcgcgccgcatataacgtcatggaattcctccaagggtacagaggctatctgcaaacggacgggtacaaagggtatgacagcgcggccaaagaccttaccggaataatacaggtgggatgttttgcacacgcaaggcggaagttttttgaggctgccaaaataagctctaaaggcaggtctgccgaggaaggcataaaatatatccgtagcctatacgcgatagaaaatgaattgcgggataagaatattgatagcggcatgtttttgtctaaaaggaaggcccgcgcggggcctgtattggagaagtttaaggcatggcttttaaagcgcaaagatgaagttccctga

SEQ ID NO: 53386 - protein, 407 aa, Unknown
  Obtained from environmental sample
  DOMAIN (124)...(326): Transposase IS66 family
  misc_feature (1)..(407): Xaa is any amino acid
MTHPCIIIVFEAAASCGVLNQMLPNKQILNEYIILKEQYVLLVYKRFVCSAEQLLEDEKQQLLFAEEDEQPETNEEKSEELQTVKSFTRKKNGGRKPISANLERRPRVIDIPESEKTCACGANLTRIGEETSEKLVIIPPQIYVDQIVRPKYACRQCEGTEEEEEPAVRIAPVEPAIIPKSIASPSLLATIFTQKFEMHLPYYRQEKQFEQIGAAISRQDMSNWQQQAYEKLEPLFAMLEETVKSGPVLQMDESEVQVIGEEDRSDTQKSYMWLARGGPLGKKVILYKYRPTRAAYNVMEFLQGYRGYLQTDGYKGYDSAAKDLTGIIQVGCFAHARRKFFEAAKISSKGRSAEEGIKYIRSLYAIENELRDKNIDSGMFLSKRKARAGPVLEKFKAWLLKRKDEVP

SEQ ID NO: 53387 - DNA, 819 bp, Unknown
  Obtained from environmental sample
  misc_feature (1)..(819): n is a, c, g, or t
atgcctgttatagaaatgaagggcatcaagcgggaataccgcatggagacccgcgggaaaaaatcaaaggacgcgcaggcggtagttgtgcgcgccctgcggggcgtggatttttccgctgacgcgggcgaatttgtctccgttatggggccttccggttccggcaagtccaccctgatgaacatactcggttgccttgacaagccaagtgcgggtacgtacacgctggacggcattgaaacttccaaatcggattcggatacctttgcgtatatcagaaaccgcaaaatcggtttcgtgttccagtccttcaacttgcttgcaaggacaacggccctggaaaatgtcgagcttccccttttttactcgcgcccgtgggcgcgccgccgccttttaaatgaaaaaaaagaaaacgctcaaacccgcaaagagcgggcgatttcagcgttgaaaacggtggggctggacacgcgtatggatcattacccctcgcagctttcaggcggccagcagcagagggtcgccatagcccgcgccattgtaaacgatccggcttttatccttgcggacgagccgacaggcaaccttgacaccggcatgacccttgagataatggggcttttccaggaactcaacaggcggggaaaaacgataatcatggtgacgcacgagcccgaacttgcggcctacacgcggcgcatcattaccctgcgcgacggcgagcttgtttcagacaaacaggttacggacaggcgcggcgcgttagacgatcttgagcagtggaagaaagatcacgcgcttcttgccgggcagggttag

SEQ ID NO: 53388 - protein, 272 aa, Unknown
  Obtained from environmental sample
  DOMAIN (43)...(240): ABC transporter
  misc_feature (1)..(272): Xaa is any amino acid
MPVIEMKGIKREYRMETRGKKSKDAQAVVVRALRGVDFSADAGEFVSVMGPSGSGKSTLMNILGCLDKPSAGTYTLDGIETSKSDSDTFAYIRNRKIGFVFQSFNLLARTTALENVELPLFYSRPWARRRLLNEKKENAQTRKERAISALKTVGLDTRMDHYPSQLSGGQQQRVAIARAIVNDPAFILADEPTGNLDTGMTLEIMGLFQELNRRGKTIIMVTHEPELAAYTRRIITLRDGELVSDKQVTDRRGALDDLEQWKKDHALLAGQG

SEQ ID NO: 53389 - DNA, 702 bp, Unknown
  Obtained from environmental sample
  misc_feature (1)..(702): n is a, c, g, or t
atgcagattgaagcggctgtaggcgagcttgacgttacttccatatacaaaggccagcaggtgcgctttaccctggaaagttttccgggacgaatgtttttcggggttgttgaaaatctgagaatgattcccgtaacgacgaataacgtagtaagttacacggttattatcaatgtggaaaaccgcgacggttctttaatgccgggcatgacgtgcgccgtggactttatcgtggaacgcgcacaggacgttcttatggtttcaaacgccgccctgcgctacaggccgacgcatttaacggctgaacaaatttcagagatgatttttaacgccagccttgcgaacatggacgacgaacagcgcaaagcggcaattgaagcgagagcgaagtctcaggagcagaacaggcagcaggcggctcaaaattcaaacaacggcattgcgggaataatgatggggcagcccggcggcaggacaagaatgcccggacagaggaggcggtcttcaggtcaaggtccggggcaggggcaaggccctgaacggcctgtccagattgttatgcgaaacctgtggtttgtaaacgatgagggtaaaattgactgtatgcaggtgcgcgccggcataagcgacggctcgtccaccgagataatttcggaagaggactttgaagggcggcaggtaattcttcgggagaaaatataa

SEQ ID NO: 53390 - protein, 233 aa, Unknown
  Obtained from environmental sample
  misc_feature (1)..(233): Xaa is any amino acid
MQIEAAVGELDVTSIYKGQQVRFTLESFPGRMFFGVVENLRMIPVTTNNVVSYTVIINVENRDGSLMPGMTCAVDFIVERAQDVLMVSNAALRYRPTHLTAEQISEMIFNASLANMDDEQRKAAIEARAKSQEQNRQQAAQNSNNGIAGIMMGQPGGRTRMPGQRRRSSGQGPGQGQGPERPVQIVMRNLWFVNDEGKIDCMQVRAGISDGSSTEIISEEDFEGRQVILREKI

SEQ ID NO: 53391 - DNA, 1824 bp, Unknown
  Obtained from environmental sample
  misc_feature (1)..(1824): n is a, c, g, or t
ttgaatactgattcaaacaggaataactgcgcaaaatgggaagattttcttgtaactgatcctttcgatccttctttaatccgcgattccgttttttacggactggttagaattggtgttcttagaaacgttcttcttaaacaccacgatttttgtatacctgcgggaatccggaacagcgtaattatttcctgcgacatcggcgatgatacagcaatacaaaactgtgcgtatatttcacattatatcatcggagacaactgcattcttgctgaaataaatgaaatacaggcgactaaccattccaaattcggcaacggtgttgtaaaagacggtgaagccgaagaagtgcgggtctggatcgatgttatgaacgaagcgggcggacgctctattctgccgtttgaagatatgatagcggcggacgcttatttatgggcggcgtatcgtgacgataccgcattaacggaaaaattggcggaaattacacagaaacagtactgcggattgcggggaagctacggaacaatcggtagcggaactgttataaaaagctgctcaattatcaaggacacagcggtaggagagtgcgcatacatcaagggagcgaacaaattaaaaaaccttactatacaatcttccgctgacgaaccgacgcagataggcgaaggagttgaaatggtaaacggcattgtaggttacgcctgcagcgctttttacggttcaaaggctgtgcgttttgttatgggcagaaacagtaacctgaaatacggagcgcgtctaattcactctgtgttaggtgacaattcaacagtatcgtgctgcgaaattttaaacaacctgatctttcccatacatgaacagcaccataataattcatttttaatagcaagtcttgttcagggaatgtcaaacatggcggcggcggccacaataggcagtaaccacaacagccgcgccaatgacggtgaaatacgggcaaaacgcggtttttggcccggccttgctgtaagcatcaagcactcaagcgtctttgcttcgtttgttatcatcgcaaaaggcgagtatccgtcagagttgaatatttctctgcccttttctcttgtaaacaacaatgttcataaaaaccggcttgaagtaatgcccgcttatttttggattcataatctctatgcgcttgagcgtaattcatggaaaaccaaaaaccgcgacagacgaaaaattaaaatccagcggattgaaagcgattatcttgcgcccgatacggcggaagaaattatcgcagctctttcgcttctggacggctggctgggtgaatccggcttttcgccgatggacatgacgggcgcggaagatgttacggtcagccatattatatgccgccactttgagcgcagtaaaaggggacaggtaattataaagccgcttgaagctattgccgcttaccgtcaaatgctgcgttattatgcggttaaaacaatcgtaaacttttttgatacgcagccgtctttggattataaaaatttatgcagcctgcttggttctcccgctccgaatgaacgcataaaggattgggaaaatttcggcggacaaattgttccggctttccgtgttgataaattacgcgaagaaatcgggaaaggcgaatataaaaactggaatgagattcatggggtgtacgatctttgggataaagagtaccagtttgataaatgccgtcatgcatggtcagtgcttgcgcttctgcatgagacagacaaagctccggacgccgccggatcaagagagagcttacaacagttcttgatattcgccgctggatag

SEQ ID NO: 53392 - protein, 607 aa, Unknown
  Obtained from environmental sample
  misc_feature (1)..(607): Xaa is any amino acid
MNTDSNRNNCAKWEDFLVTDPFDPSLIRDSVFYGLVRIGVLRNVLLKHHDFCIPAGIRNSVIISCDIGDDTAIQNCAYISHYIIGDNCILAEINEIQATNHSKFGNGVVKDGEAEEVRVWIDVMNEAGGRSILPFEDMIAADAYLWAAYRDDTALTEKLAEITQKQYCGLRGSYGTIGSGTVIKSCSIIKDTAVGECAYIKGANKLKNLTIQSSADEPTQIGEGVEMVNGIVGYACSAFYGSKAVRFVMGRNSNLKYGARLIHSVLGDNSTVSCCEILNNLIFPIHEQHHNNSFLIASLVQGMSNMAAAATIGSNHNSRANDGEIRAKRGFWPGLAVSIKHSSVFASFVIIAKGEYPSELNISLPFSLVNNNVHKNRLEVMPAYFWIHNLYALERNSWKTKNRDRRKIKIQRIESDYLAPDTAEEIIAALSLLDGWLGESGFSPMDMTGAEDVTVSHIICRHFERSKRGQVIIKPLEAIAAYRQMLRYYAVKTIVNFFDTQPSLDYKNLCSLLGSPAPNERIKDWENFGGQIVPAFRVDKLREEIGKGEYKNWNEIHGVYDLWDKEYQFDKCRHAWSVLALLHETDKAPDAAGSRESLQQFLIFAAG

SEQ ID NO: 53393 - DNA, 390 bp, Unknown
  Obtained from environmental sample
  misc_feature (1)..(390): n is a, c, g, or t
atggataatgccggaaagaaaaaggttttattgattgatgatgatgaaatgcatctgataacagctgagttgtacctgaaaaatgactacgaaattctaaaagtcaaatcaggagaggaagcgttaagtaaattaaataataacgaatttgttcctaatttaattttactggatattgtaatggagggaatgaatggatgggaagttttcaaaaaaataagagcgataccttccctaaaaaatcttccgatagcgtttttaacttctgaaaatgatcaagcggaaaaagatcgcgctaccaaattgggagctgctgactatattacaaaaccgtttaatatgacgcttctaaaaagtaaagtaaaagatatattaagcaaaaagaaataa

SEQ ID NO: 53394 - protein, 129 aa, Unknown
  Obtained from environmental sample
  DOMAIN (7)...(122): Response regulator receiver domain
  misc_feature (1)..(129): Xaa is any amino acid
MDNAGKKKVLLIDDDEMHLITAELYLKNDYEILKVKSGEEALSKLNNNEFVPNLILLDIVMEGMNGWEVFKKIRAIPSLKNLPIAFLTSENDQAEKDRATKLGAADYITKPFNMTLLKSKVKDILSKKK

SEQ ID NO: 53395 - DNA, 408 bp, Unknown
  Obtained from environmental sample
  misc_feature (1)..(408): n is a, c, g, or t
ttgctctcaattcttgacgtaatcgttattgtactaacatggcgattttacgcccaaatagaagcctcgtcattcgactctgaatttgcccgtacaagaggcgtccccgtcgatttaatttttcttttactgcttggagtaaccgccgccgccatcgttcttcttcaaacctacataggtataatgatggtcattgcaatgctcacacttccgtcaggctgcgccacagttttttcccgaagtctcggcggtatgatgctttccagttgtctattctcagtatttttttcaatcttcggactaataaacggctggcttttcgatcttcccgtaggagcaatgacggtaatcattgcgggctttgtgtttttagggttttcggtgtatcgggttatcaggaagcgttag

SEQ ID NO: 53396 - protein, 135 aa, Unknown
  Obtained from environmental sample
  DOMAIN (1)...(130): ABC 3 transport family
  misc_feature (1)..(135): Xaa is any amino acid
MLSILDVIVIVLTWRFYAQIEASSFDSEFARTRGVPVDLIFLLLLGVTAAAIVLLQTYIGIMMVIAMLTLPSGCATVFSRSLGGMMLSSCLFSVFFSIFGLINGWLFDLPVGAMTVIIAGFVFLGFSVYRVIRKR

SEQ ID NO: 53397 - DNA, 354 bp, Unknown
  Obtained from environmental sample
  misc_feature (1)..(354): n is a, c, g, or t
gtggaggtttttatgaaacatttgtttgctttttttgtggttgtcgttatttgcggctgtgcggcgcttaccgcaaggcggggattgagcgagggagagctggaaatctttgagggagtggggcaggggtttcggggacctatttccgtacaggtgcgtgtgagcgagggcagtattacggagattgaaattatcgactctatggaagatcgttttgtggggggagcggctatggaggaattaatcgatcttgttattatgtataatactgcggatattgacgcggtttctggcgcaacggaaacgagcgaggggtttttagaggcggtaagaaatgctatacttaaacaatga

SEQ ID NO: 53398 - protein, 117 aa, Unknown
  Obtained from environmental sample
  SIGNAL (1)...(25)
  DOMAIN (43)...(117): FMN-binding domain
  misc_feature (1)..(117): Xaa is any amino acid
MEVFMKHLFAFFVVVVICGCAALTARRGLSEGELEIFEGVGQGFRGPISVQVRVSEGSITEIEIIDSMEDRFVGGAAMEELIDLVIMYNTADIDAVSGATETSEGFLEAVRNAILKQ

SEQ ID NO: 53399 - DNA, 768 bp, Unknown
  Obtained from environmental sample
  misc_feature (1)..(768): n is a, c, g, or t
atgaacggcgtaatgcccgccgcgcagctgctgccggataagccggacatacacggcattgtcgccttctgctggcattggcgggcaggcgaggcaaaagaattttataccaacaagacgttttttttcatcccatataataacggcaaactggataccgccaatgagtattacaacgccattatcaatgatcttgacaaggttgccgctttgctgcagatactcaaagacaaggatattcccgtgctatggcggcccctgcacgaagcctcaggccgctggttctggtggggggcgggcgggcccgaaccctacatcgccctgtgggaatttatgtacgattattttacctatgtaaaggggctgaataaccttatttgggtgtggaacggggatcatgccgactggcttcccgatcctgcgacagtggacattgtgggccgcgacttgtatacgaacagttatggttctcaaaaaatggaatttgaaaaagcccgcgcgatggttcccggacagaaccgcatgatagccctgacggaaaacggcagaatccccgatccggacgaatgtataaaggatgaggcgatgtggctgtggtttatgacctggaatgaccgcagccgttccgtccagggcgaaaccaacaaggaaaaccactggaccggggaattccacaatacccaacagcataaggaaaaagtttaccatcatccgtcggtactcactttggacaagctgccggatttaaccaaataccggcttgaataa

SEQ ID NO: 53400 - protein, 255 aa, Unknown
  Obtained from environmental sample
  DOMAIN (2)...(245): Glycosyl hydrolase family 26
  misc_feature (1)..(255): Xaa is any amino acid
MNGVMPAAQLLPDKPDIHGIVAFCWHWRAGEAKEFYTNKTFFFIPYNNGKLDTANEYYNAIINDLDKVAALLQILKDKDIPVLWRPLHEASGRWFWWGAGGPEPYIALWEFMYDYFTYVKGLNNLIWVWNGDHADWLPDPATVDIVGRDLYTNSYGSQKMEFEKARAMVPGQNRMIALTENGRIPDPDECIKDEAMWLWFMTWNDRSRSVQGETNKENHWTGEFHNTQQHKEKVYHHPSVLTLDKLPDLTKYRLE

SEQ ID NO: 53401 - DNA, 429 bp, Unknown
  Obtained from environmental sample
  misc_feature (1)..(429): n is a, c, g, or t
ttgaagaaggggcctggggcctggggaccggggactggggtctttgtacgtaatcgtcgcttgtttctttcacgctcagattacgaaccaaaacattgctcattgctcattgctcattgtttattgtttattcagtccctactccccactccccactccctactcccttttcttttgatatttattttacctctcttctcatgtccttcccagccggacccgactgagccgcctcctccaacagatcagggcattacggcgggtctttcgcctaacgcaaaacggcttgtgaactacctgcttgacgagtacggtaaacacattatctcaggccaaatggatacagcttggactacaaacagcacaatggacatgatagcccgcgtgtataccgacacgggcaagtatccggctctcaaagggctttga

SEQ ID NO: 53402 - protein, 142 aa, Unknown
  Obtained from environmental sample
  misc_feature (1)..(142): Xaa is any amino acid
MKKGPGAWGPGTGVFVRNRRLFLSRSDYEPKHCSLLIAHCLLFIQSLLPTPHSLLPFLLIFILPLFSCPSQPDPTEPPPPTDQGITAGLSPNAKRLVNYLLDEYGKHIISGQMDTAWTTNSTMDMIARVYTDTGKYPALKGL

SEQ ID NO: 53403 - DNA, 1515 bp, Unknown
  Obtained from environmental sample
  misc_feature (1)..(1515): n is a, c, g, or t
gtgttagacgaaagccgtccggtcgattacgagcggattaagaaggaaggggaaaagataaacgataattcccttattgagatggtgaacaaccttctggataacaagctttttcaagcgaccctcggctcgctgcttgcggaattatcgggtaaggtcagttcccttgaagaaaccgttaaaggcgtcttcgcgcttttatgcaacgcctgcaggtcggagatgtgttccataatgataaaggacgcggacgacgcccttgtggtatacaacgccaacaacgcggggtacacggaggcgattgcggaagattttaaggctatcaccatcgccgattttaacacccgcttttccgactataaggttgtctccaaagaggtccatgatttcttccccgcgggagagaaaaacgaaagaatcgaatcctatattctgatcccgcttacaagttcgggcgaggaattcgccacggttcatatcggcacttccgttaaagaatatttctccccgcttattctggaaaatattaacgtgtttctttccgcggcgagtccaataatcgcgaacgccctgcatctgaagcagatggaaaccctgcaaaagaaaacaagggccgcctttgcccgctatgttcccatagacgtaatggacgagataatcaaaaagtcatcgtcgccggcaagccagagcgaaagcagagttgtaacgattctgttttccgatatcagaagttttacaaaaatatcggaaaataccccggccagggaactggtagatttcctgaacatgtatttttccgcgatgggcgatcagattattgccgagggcggcaatatcgacaagttcataggcgacgcgataatggcgatctttggcgctcccaaaacgctggaaaattcagccgtaagcggcgtcagagcggcgatacggatggtcaaagcccttccccaagtggacacctcaaacattaccctgccggatatcgggtttggcgcgggcataggcctgaattgcggcgagtgtgttgtcggcaacctcggctttcagaacaagatggactacacggtgataggcgataccgtcaatctcgcctcacggcttgaggggattaccaagtattaccatcagacaatagtcgtatcggaatatatttataccgcggccaaagacgatttcattttccgtaaggccgacagcgtgcgcgtaaagggaaaagaccagccggtaggactttacacggtgtatgcctgttttcggggcgaaggggacgaaggggtgccgccggttctggttatagaccgtgaagccctggatcaatacaacaaaggtcttaaacttttcgccatgcgcgaatttgaaactgcaaaacaatattttaacacaaccctgtccattgaggaaaaagcgggtaagtcagattatctcgcgtctctgtacctttcccgaatcgatgaattcctggttaaccctcccccgcccgactgggacgggactataaccatgactgagaaataa

SEQ ID NO: 53404 - protein, 504 aa, Unknown
  Obtained from environmental sample
  DOMAIN (227)...(416): Adenylate and Guanylate cyclase catalytic domain
  misc_feature (1)..(504): Xaa is any amino acid
MLDESRPVDYERIKKEGEKINDNSLIEMVNNLLDNKLFQATLGSLLAELSGKVSSLEETVKGVFALLCNACRSEMCSIMIKDADDALVVYNANNAGYTEAIAEDFKAITIADFNTRFSDYKVVSKEVHDFFPAGEKNERIESYILIPLTSSGEEFATVHIGTSVKEYFSPLILENINVFLSAASPIIANALHLKQMETLQKKTRAAFARYVPIDVMDEIIKKSSSPASQSESRVVTILFSDIRSFTKISENTPARELVDFLNMYFSAMGDQIIAEGGNIDKFIGDAIMAIFGAPKTLENSAVSGVRAAIRMVKALPQVDTSNITLPDIGFGAGIGLNCGECVVGNLGFQNKMDYTVIGDTVNLASRLEGITKYYHQTIVVSEYIYTAAKDDFIFRKADSVRVKGKDQPVGLYTVYACFRGEGDEGVPPVLVIDREALDQYNKGLKLFAMREFETAKQYFNTTLSIEEKAGKSDYLASLYLSRIDEFLVNPPPPDWDGTITMTEK

SEQ ID NO: 53405 - DNA, 963 bp, Unknown
  Obtained from environmental sample
  misc_feature (1)..(963): n is a, c, g, or t
atgcaccttccctattacaggcaggagaaacagtttgagcagataggggctgcgataagccgccaggatatgagcaactggcagcagcaggcgtatggaaaacttaagccgttattcgccatactcaaagaaacggtaaaaagcggccctgtgctgcagatggacgagaccgaggtacaggtaataggggaagaaaaccgaaacgatcttcagaaaagctatatgtggcttgcccgcggcggccctgtcggcaaaaaagtaatttggtatgaataccatccgacccgcgctgcatataacgccattgaattccttcaagggtattgtgggtatctacaaacagatgggtacgatgggtacgacagcgcggctaaagaattgcccggaataatacaggtgggatgcttcgcccacgcaaggcggaagttttttgaggctgccaaaataaacaagaaaccacagtctgccgaggaaggcataaaatatatccgcaggctctaccagcttgaggatacgctgcggagcaaatggaaagacgaccttgaaaaattccatgaagaccggaaaaaagaagcggcccccatattagctgaatttgagcagtggcttttaaaacgggtggatgaagtgccgcctaaggtactgttgggagaagcgatacgctatacccttaaccaatgggacaaattgataaagtacattgaaagcccctatttgactcccgacaacaatgcctgcgaaaacgcgatacggccttttgtcatcgggagaaaaaactggctgttctgtcagagcgtagacggggccaaaagttcatgcggtatgtttacccttatagagactgcaaagcagaatggccttgttccgtttaaatatctgatggctgtttttgagaaagccccgtttgccttaactcctgaagactgggaaaaactgcttccctggaacatttttaccgcttaa

SEQ ID NO: 53406 - protein, 320 aa, Unknown
  Obtained from environmental sample
  DOMAIN (1)...(129): Transposase IS66 family
  misc_feature (1)..(320): Xaa is any amino acid
MHLPYYRQEKQFEQIGAAISRQDMSNWQQQAYGKLKPLFAILKETVKSGPVLQMDETEVQVIGEENRNDLQKSYMWLARGGPVGKKVIWYEYHPTRAAYNAIEFLQGYCGYLQTDGYDGYDSAAKELPGIIQVGCFAHARRKFFEAAKINKKPQSAEEGIKYIRRLYQLEDTLRSKWKDDLEKFHEDRKKEAAPILAEFEQWLLKRVDEVPPKVLLGEAIRYTLNQWDKLIKYIESPYLTPDNNACENAIRPFVIGRKNWLFCQSVDGAKSSCGMFTLIETAKQNGLVPFKYLMAVFEKAPFALTPEDWEKLLPWNIFTA

SEQ ID NO: 53407 - DNA, 846 bp, Unknown
  Obtained from environmental sample
  misc_feature (1)..(846): n is a, c, g, or t
atgcaaagaattttagacacatctgagttaatccctgtaatcgccgcgcttgcgaagaaagcttgttacgaattgggcgatgacgtgatcacgcccctgcgtgatgcgcaaaccagggaggaatcgccctacggcagggactgcctgcgccagcttgtcgaaaacgccgaatacgcgaaaaaagaacagatcgcctgctgccaggacaccggcacctgcaatgtaatactggaaatcggccaggaagtttcatggaaaggcatgcccctgtccgacgcggtcaacgagggcgtgcgccggggctacgaggaaggctttctcaggaaatccattgttaaagatccctttgacagaatcaacacgggcgacaataccccggcgatgctgcacacggagatcgtggcgggcgacaaggtgtcggtcaccgtaatgcctaaaggcggcggctgcgagaacatgggggcgttttgtaccctgctgccctccgacggggtacagggtgtaatacagtttataatacaaaccgtggataaggccggcggaaagccctgccctcccctgcttgtaggcgtaggaatcggcggcagcatggacaagtgcgtgtggctggcaaaaaaggcattgctccgtccaataggcagccgcaacaccaatcccttctattcaagcctggaaacagagctgctggagaaaataaacaaccttggcataggccccatgggaacgggcggcaggatcaccgccctggatgttcatgccgaatactccccatgtcatataacggccctgcctgtggcagtaaacctccagtgccacgccagccgcagcgcccgggcggaattataa

SEQ ID NO: 53408 - protein, 281 aa, Unknown
  Obtained from environmental sample
  DOMAIN (10)...(281): Fumarate hydratase (Fumerase)
  misc_feature (1)..(281): Xaa is any amino acid
MQRILDTSELIPVIAALAKKACYELGDDVITPLRDAQTREESPYGRDCLRQLVENAEYAKKEQIACCQDTGTCNVILEIGQEVSWKGMPLSDAVNEGVRRGYEEGFLRKSIVKDPFDRINTGDNTPAMLHTEIVAGDKVSVTVMPKGGGCENMGAFCTLLPSDGVQGVIQFIIQTVDKAGGKPCPPLLVGVGIGGSMDKCVWLAKKALLRPIGSRNTNPFYSSLETELLEKINNLGIGPMGTGGRITALDVHAEYSPCHITALPVAVNLQCHASRSARAEL

SEQ ID NO: 53409 - DNA, 693 bp, Unknown
  Obtained from environmental sample
  misc_feature (1)..(693): n is a, c, g, or t
gtgttttcagtcgcgggccaatccagctaccgccacgtcgacgccggggcaatcgcctcctcatatataaaagaaatattaatacatgaccgttccattatccccatgaacctggaagtcaaccagccgtcgttttcgcaggcgttccgtaccgcgagggaggcaaacgcggatttcttcctgttggtttccacaatggaaaacgagcgcgacatctcccttaaaggcgagttattcgtcggcaggaccggctcggccgcggcgtctttttacgcctaccgcaccggcgtggacaggatgcgcaacgcgtcgcggggcattgtcgagcaaatggggaacgccctccccctgcggggaaagctaatacagcggcgtcaggctcagggccttatcgacaagggccgtgccgacaaggtcaaggaagccgccgtatacgatattgtcaaaaaagaaagatcccagctcgcgaaccagggaattggccttgtttattcgcctgaggatctggtgggaaaaattacaatcgaagctgttgatgaggaagtggcttccggaaaacttgtccgcaacggattctttgaccgtatagaagaaggcgatgaagttttcttcatccctgaaggcggttataaagcccccgcagagacggccgcaaaccctgaactaagggccctgttgcgtaccttgcgatag

SEQ ID NO: 53410 - protein, 230 aa, Unknown
  Obtained from environmental sample
  misc_feature (1)..(230): Xaa is any amino acid
MFSVAGQSSYRHVDAGAIASSYIKEILIHDRSIIPMNLEVNQPSFSQAFRTAREANADFFLLVSTMENERDISLKGELFVGRTGSAAASFYAYRTGVDRMRNASRGIVEQMGNALPLRGKLIQRRQAQGLIDKGRADKVKEAAVYDIVKKERSQLANQGIGLVYSPEDLVGKITIEAVDEEVASGKLVRNGFFDRIEEGDEVFFIPEGGYKAPAETAANPELRALLRTLR

SEQ ID NO: 53411 - DNA, 831 bp, Unknown
  Obtained from environmental sample
  misc_feature (1)..(831): n is a, c, g, or t
atgcctagaaaaaagaacgtgattgcggcagaagcaaggggtttggataagttgcaagcagaaagggaagctgcagatcgtctttatggtgatggctttccgtttgaacaatcacgagtagaagcaagaatcaaagcacgtaatgccaatactgccgaaattatgcttttaaacggaaaagatcatcgttggatgaaagaatatcttaatcatggagagtttattgccgctgtggaacgtacaggagtctcccggacatgggcgtactattgtatgcgaaccattgaaatgttttcaaatgttcacagtgtgaacatttcagattttaactatcaacaggttcgtgctcttactgttcttgataaacctatcgttgaagagttcctaaatggaggcgatctcggcgatataccccatgacgatgtttccaaaatgtcaggccctgaacttgagaaagagacccgtagactccgtaaactgttggatgaaaaaactaaatccctcgaaggaatcatcaggcaaaaaagctcaaagattgacgaattggaatacgaggttcggaccggggatcaactgacaaaagaaaagaaagccgagaaagccctacagaaataccgcgaccccataatcgacagcatccatgacgcgacggagcggataaatcgggcaaccgcggcgatagacgaagcccagaagatcccccacgtgccttttgacgcgctggaaaaactaatagaaccctggaagaaaagctttgacgtattccttgaagccgccgaggacttcagcgatgccttcaggaatatccatgtggacaaaagcaggggatga

SEQ ID NO: 53412 - protein, 276 aa, Unknown
  Obtained from environmental sample
  misc_feature (1)..(276): Xaa is any amino acid
MPRKKNVIAAEARGLDKLQAEREAADRLYGDGFPFEQSRVEARIKARNANTAEIMLLNGKDHRWMKEYLNHGEFIAAVERTGVSRTWAYYCMRTIEMFSNVHSVNISDFNYQQVRALTVLDKPIVEEFLNGGDLGDIPHDDVSKMSGPELEKETRRLRKLLDEKTKSLEGIIRQKSSKIDELEYEVRTGDQLTKEKKAEKALQKYRDPIIDSIHDATERINRATAAIDEAQKIPHVPFDALEKLIEPWKKSFDVFLEAAEDFSDAFRNIHVDKSRG

SEQ ID NO: 53413 - DNA, 564 bp, Unknown
  Obtained from environmental sample
  misc_feature (1)..(564): n is a, c, g, or t
gtgaacggccttgcgggacagattcgtaccgctttaggcggacagttgggtcttacagataaaaacaagtttgatttctgctttatcgtagacttcccgatgttcggtacaaacgaggaaacaggcgcggtagaatttacacacaatcctttttccatgccgcagggcggtcttgaagcgcttaacacaaaaaacccgcttgatattcttgcgtggcagtatgacgtagtgtgcaacggcgtggaactttcctcaggagctgtgcgaaaccatctgccggaagttatggtaaaggcgtttgaaacagccggttatacccaaaacgacatagaaaccaagttttccgctttattcaacgctttccattacggcgcgccgcctcacgcgggtatggcccccggcattgaccgtattgtaatgctgctcgctgatgaggagaatattcgcgaagtaaccgcgttcccaatgaacagcaacgcacaggacttgctgatggatgctccctgcgaagttacggaacagcagttgagagaagtgcatattaaattacggcagaaacattaa

SEQ ID NO: 53414 - protein, 187 aa, Unknown
  Obtained from environmental sample
  DOMAIN (1)...(159): tRNA synthetases class II (D, K and N)
  misc_feature (1)..(187): Xaa is any amino acid
MNGLAGQIRTALGGQLGLTDKNKFDFCFIVDFPMFGTNEETGAVEFTHNPFSMPQGGLEALNTKNPLDILAWQYDVVCNGVELSSGAVRNHLPEVMVKAFETAGYTQNDIETKFSALFNAFHYGAPPHAGMAPGIDRIVMLLADEENIREVTAFPMNSNAQDLLMDAPCEVTEQQLREVHIKLRQKH

SEQ ID NO: 53415 - DNA, 1113 bp, Unknown
  Obtained from environmental sample
  misc_feature (1)..(1113): n is a, c, g, or t
gtggcgcatgaggaaaagccctggttcgggcttcagttccatcccgaagtaacccactgcgaaggcggggacgatatgcttggcgcgtttgtgtttaacgtttgcgagtgcaataagagttggagcatggagcgttatatagaagaattgaataaaacgctcaaggaacgcgcgggagagaatccggtactgcttttgatttcaggcggcgttgactccaccgttgcgggagctgcgctgttaaaaacattaaagagcgaacaggtgcatttaatgtacatggataccggtcttatgcgaaagaatgaaacggcggctgtccgcgcgaatctggaaaaacttggggcgaaaaatttgcacataatcatgtgcgagaacgaatttcttgacgcgcttaaaggaaaagcggagccggaagaaaagcgcagaataatcggtgatttgtttatcacgatacaggagagggaagtcgcccgccttaaactgcctgacagttatttgcttgcgcaagggacgctgtacaccgatttaatcgaaagcggaaaaggcgtcggcaaaaaagcccatgtaataaaaagccaccacaatgtcgcaagcccgcttgtggacgcgaagcgcaaagccggaaaaatcatcgagccgctcgaccgcctgtacaaggacgaagtgcgcaaactcggacgcattatcggcgttgatgaggaaattgtccgccgccatccgtttccggggccgggtcttgccgtgcgcatacttggagaagtaacaagggaaaagtgcgatattctgcgcgaggcagatgctatttttattgaagaattaaagcgccgcacaagtcctgccggagtcagtctntacgatgaaatctggcaggctttcgccgtactcctgccaatccgctcggtgggagtcgcgggagatgtacgcaaatacggctgggttcttgcattgcgcgcaatcacaagcgcggacggaatgactgccgatgtttacccgtttgaaacccgcgatcttcttgaaatatcaacgcacataaccaactcggtaaaagaaattgggcgcgttacatacgatatttcaagcaagccgcccgctacaattgagtgggaatga

SEQ ID NO: 53416 - protein, 370 aa, Unknown
  Obtained from environmental sample
  DOMAIN (46)...(280): NAD synthase
  misc_feature (1)..(370): Xaa is any amino acid
MAHEEKPWFGLQFHPEVTHCEGGDDMLGAFVFNVCECNKSWSMERYIEELNKTLKERAGENPVLLLISGGVDSTVAGAALLKTLKSEQVHLMYMDTGLMRKNETAAVRANLEKLGAKNLHIIMCENEFLDALKGKAEPEEKRRIIGDLFITIQEREVARLKLPDSYLLAQGTLYTDLIESGKGVGKKAHVIKSHHNVASPLVDAKRKAGKIIEPLDRLYKDEVRKLGRIIGVDEEIVRRHPFPGPGLAVRILGEVTREKCDILREADAIFIEELKRRTSPAGVSLYDEIWQAFAVLLPIRSVGVAGDVRKYGWVLALRAITSADGMTADVYPFETRDLLEISTHITNSVKEIGRVTYDISSKPPATIEWE

SEQ ID NO: 53417 - DNA, 792 bp, Unknown
  Obtained from environmental sample
  misc_feature (1)..(792): n is a, c, g, or t
atggaaaacctgaatctcacactggaaggcaatttacggattatggatccgttcgtaattaggataggattcatcgcgttgagtacattattggcagtgttacctataatcttgttgatgcgtgtttcagcggaaaggaatgacgcggaagaacgaatgcggattatatttaatgccatgcctttgggcgcgaattttcacaataaaaattttgatttttttgactgtaacgagaacgctattaacctgtttgggttttcaagcaaacaggaatatttggcaaatttttatcaaatttcgccggagtatcagcctgacgggagcctgtcaaaagacaagatgggtgaatatattgataaggcttttaccaaaggttactgccgttttgaatggatgcaccaaaagctaaacggcgaaccgatcccctgcgaagttacgcttgtacgtgtaaagcataacaacgaatttgctttggccgcatatttacgtgatttgcgcgagctaaaaaccagctttgaacaaatatatgaatctgagcaatcactcaatattttgtcaaatatattgaacggactggacgcgatggtcttcgttacagttcctgaaacaggcgagattctttttttgaacgatcaaatgaaaaaagaattcaacataaaggatgagggtatcgggctactatgttatgaagtttttcaggacggaatgaacgagatatgcgatttttgcccatgttcccggcttcaagaggaaccggaaaaaattgtcacatgggaaaacacaacccaataa

SEQ ID NO: 53418 - protein, 263 aa, Unknown
  Obtained from environmental sample
  misc_feature (1)..(263): Xaa is any amino acid
MENLNLTLEGNLRIMDPFVIRIGFIALSTLLAVLPIILLMRVSAERNDAEERMRIIFNAMPLGANFHNKNFDFFDCNENAINLFGFSSKQEYLANFYQISPEYQPDGSLSKDKMGEYIDKAFTKGYCRFEWMHQKLNGEPIPCEVTLVRVKHNNEFALAAYLRDLRELKTSFEQIYESEQSLNILSNILNGLDAMVFVTVPETGEILFLNDQMKKEFNIKDEGIGLLCYEVFQDGMNEICDFCPCSRLQEEPEKIVTWENTTQ

SEQ ID NO: 53419 - DNA, 942 bp, Unknown
  Obtained from environmental sample
  misc_feature (1)..(942): n is a, c, g, or t
atgcgatttttgcccatgttcccggcttcaagaggaaccggaaaaaattgtcacatgggaaaacacaacccaataacgaaacgcacatatcgtaacacggatcgatatatagaatggcaaaacggcagaattgtccatatccagtactctgtcgatgtaactgagttgattgaggcaaaagagctggcggaacaaagaaaccgctccaagaatcagtttctttcgcgtatgagccacgaagtacgcacccccatgaatgcgatcctgggcatcaccgaaattcaaatggaaaaagaaactctttcgtcagatacgaaagaagctttcggcgagatttacaattcaggctacttgctgctgagtattatcaatgacatattggacttgtctaaaattgaggcgggtaaactggaattgacgccatcggtctatgatgtcccaagcctaataaacgataccgtacatctcaatatcgtgcggtacgatagcaagccgattgaatttattctaaatatcgacgaaaacatcccttcaaagctatacggtgatgaactgcgtattaagcaaattttaaataacctgctctccaatgcctttaaatatacagataggggcgaaatatcattttcagtcgccgtcaaatatgccccacaggaagcccgggatataacgctcatgttcagcgtgagtgatacaggacaaggcatgaacggagaacagctggacaaactattcgacgaatacacgcgttttaatatggaagccaatcgcacaaccgagggcactggcctgggtatgaacataacgaggcttttggtcaacatgatgggcggagaaatttccgtagaaagcgagccgggcaaagggtcgacttttaccgtatgtctgccgcaaaagatcgccggggggggtctcaagcgttataggcagggaattggctga

SEQ ID NO: 53420 - protein, 313 aa, Unknown
  Obtained from environmental sample
  DOMAIN (69)...(135): His Kinase A (phosphoacceptor) domain
  misc_feature (1)..(313): Xaa is any amino acid
MRFLPMFPASRGTGKNCHMGKHNPITKRTYRNTDRYIEWQNGRIVHIQYSVDVTELIEAKELAEQRNRSKNQFLSRMSHEVRTPMNAILGITEIQMEKETLSSDTKEAFGEIYNSGYLLLSIINDILDLSKIEAGKLELTPSVYDVPSLINDTVHLNIVRYDSKPIEFILNIDENIPSKLYGDELRIKQILNNLLSNAFKYTDRGEISFSVAVKYAPQEARDITLMFSVSDTGQGMNGEQLDKLFDEYTRFNMEANRTTEGTGLGMNITRLLVNMMGGEISVESEPGKGSTFTVCLPQKIAGGGLKRYRQGIG

SEQ ID NO: 53421 - DNA, 1176 bp, Unknown
  Obtained from environmental sample
  misc_feature (1)..(1176): n is a, c, g, or t
atgaagaaaaaaataattttggcttattcaggcgggttggatacgactgttattattccgtggctgaaagaaaatcacgattgtgatgttatcgctgtctgcgtcgatgtggggcaggctgcggactggaaggcgatttccaagcgggcgatgtctacgggggcgagcgcttgctatgtcgccgatgttaaaaaagaatatgttgaagaatatatttggcctgctctgaaagctggcgctgtctatgaagataagtatcttctgggcacttcgacggctagaccgcttatcgctaaggtgcttgtcgattacgcaagaaaagaaaaagcggacgctatcgctcacggcgcgacaggtaagggtaacgatcaggttaggttcgatcttggtattatggctcttgctcccgatatcgaaattatcgctccgtggaggacttggaagctgaaaagcaggcaggacgagatgaggtatctggctcggagaaaaattcctgttcctatgaagaaaaaaaattcctacagtatggacgataatctttggcatatttctcatgagggactggagcttgaagaccctgcgaatgagccgcagctgagaaaaatgcttaatatgattgttccgcctgaaaaagcgcctaacaaggctgaatatgtggaaattgaatttgaaaagggtattcctgtgtctcttaacggcagaaaaatggaaggggtgcagttgattaacgctcttaataaaatcggcggcgctaacggggttggtattgttgacttggtggaaaatcgggttgtgggtatgaaaagccgaggtgtttacgaaactccgggcggcactattctctactacgctcatcaggagcttgaacatctttgtcttgacaggcagacttactctttcaaacagcaggtttctcttaaattaagcgagcttatttacggcggtctttggtttacgccgttacgggaagcgttatgcgcttttattgacagcactcaacagactgtaagcggcaaggtaaggcttaaactttacaagggttcgataaacgccgccggtgttacgtccgcctactcgctttacaacacgagtcttgcaagttttactacgggcgactttttaatcacgccgacgcaagggggttatnaaactctatgggcttcctgtgctttgtag

SEQ ID NO: 53422 - protein, 391 aa, Unknown
  Obtained from environmental sample
  DOMAIN (6)...(389): Arginosuccinate synthase
  misc_feature (1)..(391): Xaa is any amino acid
MKKKIILAYSGGLDTTVIIPWLKENHDCDVIAVCVDVGQAADWKAISKRAMSTGASACYVADVKKEYVEEYIWPALKAGAVYEDKYLLGTSTARPLIAKVLVDYARKEKADAIAHGATGKGNDQVRFDLGIMALAPDIEIIAPWRTWKLKSRQDEMRYLARRKIPVPMKKKNSYSMDDNLWHISHEGLELEDPANEPQLRKMLNMIVPPEKAPNKAEYVEIEFEKGIPVSLNGRKMEGVQLINALNKIGGANGVGIVDLVENRVVGMKSRGVYETPGGTILYYAHQELEHLCLDRQTYSFKQQVSLKLSELIYGGLWFTPLREALCAFIDSTQQTVSGKVRLKLYKGSINAAGVTSAYSLYNTSLASFTTGDFLITPTQGGYXTLWASCAL

SEQ ID NO: 53423 - DNA, 1539 bp, Unknown
  Obtained from environmental sample
  misc_feature (1)..(1539): n is a, c, g, or t
atgggcaagttcgcgcggtttgggctgacgctgctgttgacgacggcgacgattgtgggggcggtcgcgggcgagccgtctttcggaatattcaccgacacaagagacgggcagacgtaccgtatggtaaagattggcgaacaaacttggatggctaagaatctcaattatcaaacggacagcgggtcttggtgttatgaagacaagaccgataactgcaagaaatacggcaaactatacgattggaaaactgcgacaaccgtttgtcctaagggatggaagttgccgtctcgcgaagaatgggatagtttggttgcgacggcgggcggaaaagaggtcgctggtaagacgttgaaagcgaaaagcggactgaataatcgtgtatggtggtacgcatacaatcataatagcacggatgatttcgggttttcggcgctgcccggcggcgatttcttccacacggggggcttcggcagaggcggctaccgaggctactggtggacgtccgcgaagcgcggcaaagtttacaatcgggttatgtacgacgaccaagacttcgtgcaagaacgcgacgacggccaaggctacttcgactattcggtgcgctgcgtgcaaggatcgcccgcgccgcaagaaaaaccgcaaacgacaatgaacaattgcagcgattccgtttcgtcatccttagaaaagccgcgaacgaaaaaaaacgagagcgacgattccgtttcgttatccttaaaaacaacgcaatcaaaaatgaacgatgatagcaatcccgataccttgtctcccccaaaagccgccgaccccaaaaaacgatggtggcaattctggcgcgttacccccaaaaaaccgctaactaaaattaatgttgatacgggcgacggttcacatcctttaccgcaagaaacgccgcaaccgaaaacaatcgcggtaagcggttccggcacattcaccgacgagagggacgggaaaatatacaaaacggtaactataggcggtcaaacatggatggcggagaatcttaactatgagacgccgtggggcaaatcttggtgctatgccgacatacgccccaattgcgacaaatactacggcagactctacgactggaacacggcgagaagagcttgcccctccggctggcatttgccgtctaatcaagaatgggaagagttggtcacaacggtcggttcccccgccgccacatcgttgaaagcgaaggctctttgggagaaaggcggtatcggtaatgataaatacggattttcggctttgcccggcggctaccggaacaacaatggcactttctactatgtcggcagtaatggttattggtggacggccacgaaaggcgttggtagaggcgtaaacaacttgcgcgtgtcatacgacgaggaattcgcctactaccaagaaatggattgcgaaaacgacctcgtggatgacgagggctgggtgtacgtccgcctagtggacactaaccaagacctaaacacggggacggggtattctgttcgttgtgttcaggaataa

SEQ ID NO: 53424 - protein, 512 aa, Unknown
  Obtained from environmental sample
  SIGNAL (1)...(23)
  misc_feature (1)..(512): Xaa is any amino acid
MGKFARFGLTLLLTTATIVGAVAGEPSFGIFTDTRDGQTYRMVKIGEQTWMAKNLNYQTDSGSWCYEDKTDNCKKYGKLYDWKTATTVCPKGWKLPSREEWDSLVATAGGKEVAGKTLKAKSGLNNRVWWYAYNHNSTDDFGFSALPGGDFFHTGGFGRGGYRGYWWTSAKRGKVYNRVMYDDQDFVQERDDGQGYFDYSVRCVQGSPAPQEKPQTTMNNCSDSVSSSLEKPRTKKNESDDSVSLSLKTTQSKMNDDSNPDTLSPPKAADPKKRWWQFWRVTPKKPLTKINVDTGDGSHPLPQETPQPKTIAVSGSGTFTDERDGKIYKTVTIGGQTWMAENLNYETPWGKSWCYADIRPNCDKYYGRLYDWNTARRACPSGWHLPSNQEWEELVTTVGSPAATSLKAKALWEKGGIGNDKYGFSALPGGYRNNNGTFYYVGSNGYWWTATKGVGRGVNNLRVSYDEEFAYYQEMDCENDLVDDEGWVYVRLVDTNQDLNTGTGYSVRCVQE

SEQ ID NO: 53425 - DNA, 408 bp, Unknown
  Obtained from environmental sample
  misc_feature (1)..(408): n is a, c, g, or t
atgctggtatatcacggcggcagtgcgccaattgtagaaatagatttacaaaaatgcagaccatataccgattttggaaaaggtttttacgtaacaaaatacaagaaacacgccgagaattgggctaaaagatcaagtaatcaacaaaataacggttatgtgacaacatacaattatatcgaaagccaatttacagattatatttgtaagataaaaaagtttgacggatatacaaatgaatggttggattttatcgtaaataacagaaatgaagaatccaatattcaagctcatggatatgatattgtagaaggtccggttgcaaatgataaaattcaaaacaaattgcatgtttatttacgcggagaaatacaaaagaaactttttaaaagaactggaataccatga

SEQ ID NO: 53426 - protein, 135 aa, Unknown
  Obtained from environmental sample
  misc_feature (1)..(135): Xaa is any amino acid
MLVYHGGSAPIVEIDLQKCRPYTDFGKGFYVTKYKKHAENWAKRSSNQQNNGYVTTYNYIESQFTDYICKIKKFDGYTNEWLDFIVNNRNEESNIQAHGYDIVEGPVANDKIQNKLHVYLRGEIQKKLFKRTGIP

SEQ ID NO: 53427 - DNA, 2412 bp, Unknown
  Obtained from environmental sample
  misc_feature (1)..(2412): n is a, c, g, or t
gtgtctctaaaagagaacgatggcagcgttatggaagctgctattcagatcaggcaaaatagcgaaacattatttcattttgagcgttccagactaaacaatcttttcatggaagccgtaaaatatcccctggtcgttgtatgcgcgggggccggttacggcaagaccagcgcagttcatgattttttggagaaatacgaagcgaccacagcatgggtacagcttacggatatggataatgatcgggcgcatttttgggaaaccaatgtccatgccatagggcagataaatcaggatctggccaaagcaacaaacaaatttggctttcctgataccaaagaaaagctaaattattatgcggccattatgcaaaaacatactgacctaaaaaggcgtatcattgtatttgatgactttcattgcattgacgatccgctgataattcgcttcgtggaagagtgtgttctttctaaaataccgctgggtacttcggtatttttaatttcccgttctcccccgcatattaaagtagccagcatgatctacaaggatcagattttcaacatcagtgaagatgatcttcgctttaccgagagtgaactcgctcaatattttcacagccggaacaattccattcaggcggaaagcctgcgcgaaatcatacaggatacaggcggctgggcattcgcgattaacctcatcgcgcggtcgtttcaaaaggcgccgggctacggtggttatttgcaaagcgcgatgaagacaaacatcttccagcttatagaaactgaaatctgggatgaaatctccgaacgtttacagacctttttgatacgcctttctcttatagatcatctttccgtggatttgatctccctgttgaccgaatgtgatgaaaccttgattgccgagcttgaacggcagaacgcgtatgtgcgccgcgacagctacgttaacgcgtaccttgtccaccctttgtttttggaatttctgcgccaaaaacagggactcctttctgaggatcaaaaacagaaaacatacgcgatagcaggggactggtgcaggaagaacggttttaggattgacgcactctcatactatgataagacaaaaaattatcagggaatcgtatcactcctgggtgaattaaccacccaaattccacaagacattgttaattacgcggctgcgattctggatagggcaccggaaaatgcgtgctataatatagctttttttgcggacatgcacctgcgtagctacatatgtcaggggttactgcaaaaatcacttgagctggtgaaacactacgaagcgaaattccttaaacttccggataatgacatcgtaaagaaacgcaacctgacaagactctatatttgctggacatacatacgctgcctgatgagcgtaacagatgacatcttcgattatgatgtttacactgaaaaagcctgcaaatgtgtacatgaggcggattcgggtaagctcgacatcaattaccctggagcatggcttagctatgccggttcttcaagaaagggctctccggaagaatatattgccgccataacacgtaatcaggcgcatatatcacaaagtcatcttaaggggttcatggccggagaactggaactggctaaaggcgaacttgaattctatcgcggtgatacttcttcagcggagcctcatattgtccttgcgatgaagcaggcgcgggcggaaaaacagtttggtcttatgcacagggcattgttatacaccctgcgtattgccgccgcgcagggaaattttgcgcttatggaacaaactcttaaagagacaaaagcccaacttgacgaagttgattatgtgaatcgttttattgattatgatatttccctttcatggtattactgttttcttggaatgccggaaaaaactgttgattggctaaaggaagattttttagcttacagccacgccgcttccattgacaattttgcgaatcaaataatagcgcgtctttgttatgcgacgcgaaactattcccctttgctgtcgtatatcgaggaaatgaagcggcgggaatcgtttttattcggacgggtggaaatgctggcaatggaagcgtgtattcattacaaaatgaaaaacaaagttaaagcatttgccgtatttgaggaagcgtacaaaaacgcggaacctaacggtatattgatgccgtttatcgaaatgggaaaagatatgcgcactttggcgtccgcgatgctcaaagaatcaaaaaagattattcccgccgcatggctggaagatattaatcataaatcagccacttatgccaaacgccgctctcatgttatcgctaagtatacgcaggcaagcggcacggcgggcggcattgcttgtccccggtctcggccgaatctgtcatga

SEQ ID NO: 53428 - protein, 803 aa, Unknown
  Obtained from environmental sample
  misc_feature (1)..(803): Xaa is any amino acid
MSLKENDGSVMEAAIQIRQNSETLFHFERSRLNNLFMEAVKYPLVVVCAGAGYGKTSAVHDFLEKYEATTAWVQLTDMDNDRAHFWETNVHAIGQINQDLAKATNKFGFPDTKEKLNYYAAIMQKHTDLKRRIIVFDDFHCIDDPLIIRFVEECVLSKIPLGTSVFLISRSPPHIKVASMIYKDQIFNISEDDLRFTESELAQYFHSRNNSIQAESLREIIQDTGGWAFAINLIARSFQKAPGYGGYLQSAMKTNIFQLIETEIWDEISERLQTFLIRLSLIDHLSVDLISLLTECDETLIAELERQNAYVRRDSYVNAYLVHPLFLEFLRQKQGLLSEDQKQKTYAIAGDWCRKNGFRIDALSYYDKTKNYQGIVSLLGELTTQIPQDIVNYAAAILDRAPENACYNIAFFADMHLRSYICQGLLQKSLELVKHYEAKFLKLPDNDIVKKRNLTRLYICWTYIRCLMSVTDDIFDYDVYTEKACKCVHEADSGKLDINYPGAWLSYAGSSRKGSPEEYIAAITRNQAHISQSHLKGFMAGELELAKGELEFYRGDTSSAEPHIVLAMKQARAEKQFGLMHRALLYTLRIAAAQGNFALMEQTLKETKAQLDEVDYVNRFIDYDISLSWYYCFLGMPEKTVDWLKEDFLAYSHAASIDNFANQIIARLCYATRNYSPLLSYIEEMKRRESFLFGRVEMLAMEACIHYKMKNKVKAFAVFEEAYKNAEPNGILMPFIEMGKDMRTLASAMLKESKKIIPAAWLEDINHKSATYAKRRSHVIAKYTQASGTAGGIACPRSRPNLS

SEQ ID NO: 53429 - DNA, 744 bp, Unknown
  Obtained from environmental sample
  misc_feature (1)..(744): n is a, c, g, or t
atgagcctttccaatggctctatagcggccgttatatgcgccgcaggttcctccgcccgcatgggtggtgtcaaaaaagaatacctgccgttgcctggcgcctctgattcccgtaccgtgctgggtgcggctgtttccgcttttaccgttgttcccgaaatcaatactatcgtcatcgttgtaccggaggatatggaaacaggggaagccgcggcgcgaaacgtcctgccccctgaaatccttgccgggaatgctggcccgacagtgcgtttcaccaccggcggaagtacccgccgcgcttctgtgtttaacgcccttcgcgtgcttgccgcagagtctccaaattatgtgcttatccatgacggtgcccgcccctggatcagtactgctctaatcgagcgtgtgattaggtgtgtaaaacaataccgcgccgttatccccctgctccccctgacggaaacccccaaggaaactgacttgccgcttgacggttctctcggcaacggccctgtttttatcaggcggcagctaaagagggagttcatcggaactgcccagacaccccaggcctttgcctttcctgaaattctcgctgcccatgaaaaagccgtttctcaggatggcagagagttcaccgatgacgccaaagtctgggcggagttttaccgccctgtcgcggtcatccccggcgagatccgaaaccgaaaaataactttcaaggaaaatatttcatggttgaagtag

SEQ ID NO: 53430 - protein, 247 aa, Unknown
  Obtained from environmental sample
  SIGNAL (1)...(22)
  DOMAIN (8)...(244): Uncharacterized protein family UPF0007
  misc_feature (1)..(247): Xaa is any amino acid
MSLSNGSIAAVICAAGSSARMGGVKKEYLPLPGASDSRTVLGAAVSAFTVVPEINTIVIVVPEDMETGEAAARNVLPPEILAGNAGPTVRFTTGGSTRRASVFNALRVLAAESPNYVLIHDGARPWISTALIERVIRCVKQYRAVIPLLPLTETPKETDLPLDGSLGNGPVFIRRQLKREFIGTAQTPQAFAFPEILAAHEKAVSQDGREFTDDAKVWAEFYRPVAVIPGEIRNRKITFKENISWLK

SEQ ID NO: 53431 - DNA, 561 bp, Unknown
  Obtained from environmental sample
  misc_feature (1)..(561): n is a, c, g, or t
gtgcataagttgccccctattcaatttattctcttttgtgctataatatacacaatgggtaagtcaaagaaggtttttgtagttgatcaaaaagtagtgtatcccagccagggagtcggcataattaaatccattgtacagaaaaaattcaacggggccaaaattccctactatattatctacattgaagcctcggatatgactattatggcgccggtagacaaggcggtggaactgggaatacgtccaaccgtttccagagacgaggctatgaaggccctggagttgataggcgaggattttgaacctattccgtcggactggaagctccgttaccagatgaatctggatcttttgaaaaagggctcgataaaagatattgcctgtatagtccgttccctgtaccaccgaagcaaggtaaaggaattgccgattttggaaaagaaactgtacgactcggcccaaaaactcctggaggacgaactctccatttcgcttcgcaagaccaaaaaagaagtggaagtcatgatccatgaacgcctggaaccgccggaaaaatga

SEQ ID NO: 53432 - protein, 186 aa, Unknown
  Obtained from environmental sample
  DOMAIN (25)...(135): CarD-like/TRCF domain
  misc_feature (1)..(186): Xaa is any amino acid
MHKLPPIQFILFCAIIYTMGKSKKVFVVDQKVVYPSQGVGIIKSIVQKKFNGAKIPYYIIYIEASDMTIMAPVDKAVELGIRPTVSRDEAMKALELIGEDFEPIPSDWKLRYQMNLDLLKKGSIKDIACIVRSLYHRSKVKELPILEKKLYDSAQKLLEDELSISLRKTKKEVEVMIHERLEPPEK

SEQ ID NO: 53433 - DNA, 387 bp, Unknown
  Obtained from environmental sample
  misc_feature (1)..(387): n is a, c, g, or t
ttgtacaaaccggtaaaaaaagcagaaactattaatatcattatgaaaaacaaaataacagagagttatgtacgcggtttagtaagcagaaatctcagacgcttaagatccgttcataacatatcgcagttaaatcttgcgattaacgcgggtcttgcgcataactttatcaatgacatcgaaaactgcaaaaagggcatctccgttaaaacacttgcaaaactttctgtcgctcttgacgcggaaccgtatcagtttttcctgccggatactatgtcagataacaacatgtcgcattatgtgaccgattttaacgattcgctccaaaaagttgttaaagagctgacccagcattaccttacgccgggaaacaaacctaaaagctga

SEQ ID NO: 53434 - protein, 128 aa, Unknown
  Obtained from environmental sample
  misc_feature (1)..(128): Xaa is any amino acid
MYKPVKKAETINIIMKNKITESYVRGLVSRNLRRLRSVHNISQLNLAINAGLAHNFINDIENCKKGISVKTLAKLSVALDAEPYQFFLPDTMSDNNMSHYVTDFNDSLQKVVKELTQHYLTPGNKPKS

SEQ ID NO: 53435 - DNA, 936 bp, Unknown
  Obtained from environmental sample
  misc_feature (1)..(936): n is a, c, g, or t
atgactgaaaaaaataccgccccggttgacctttccgtcaacattgccggcgtccgcctgcggaatccggttatagccgcgtccggaaccttcggctacggcagggaatacgccgggataatcgacgcgtcccgactcgggggcgtatgcacaaaggggcttacgctgaacccaaggcaaggcaatacgggcatccgtgtatgggaaaccccggcggggatgttgaattccatcgggcttgaaaaccccggcatcgccgcttttatagagaaagaactgccttttctgcggaagctcggcccggcggtcatcgcgaacctttcgggctccaccgtggaggaatacgcgcaaggggctgcgctgctcaatgagagcgaagttgacatgatcgagctgaacatctcctgccccaacgtcaaagccggcggcatgactttcggccttgacccccaggcggcggcggcggtgacggggccggtccgccgggcgttaacccgcaagcccctcatggtaaaactttcacctaacgcgccggacctgatcgccgtcgcaaacgcctgtatcaactccggagcggacgcaatttcgctggtaaatacattcaaggcaatggcaatagacattcaaaaccgcaggccggtctttgataatatcagcgcggggctttccggtccggctatcaagccaattgccctgcgcatggtgtgggaactctgtaatgccgtcactgtcccggtagttggtctgggcggcattgcctgcgccgatgacgcgctggaattcctgatggcgggagcaactgcgctgcaggttggttctgcgacattttcgcatcccaatacgatgatcgaaatcattgacggcgttgaaagttatatgcgcagttacaaactttccgccgtgggggaaatttccctgaaaaagagagagggttaa

SEQ ID NO: 53436 - protein, 311 aa, Unknown
  Obtained from environmental sample
  DOMAIN (10)...(293): Dihydroorotate dehydrogenase
  misc_feature (1)..(311): Xaa is any amino acid
MTEKNTAPVDLSVNIAGVRLRNPVIAASGTFGYGREYAGIIDASRLGGVCTKGLTLNPRQGNTGIRVWETPAGMLNSIGLENPGIAAFIEKELPFLRKLGPAVIANLSGSTVEEYAQGAALLNESEVDMIELNISCPNVKAGGMTFGLDPQAAAAVTGPVRRALTRKPLMVKLSPNAPDLIAVANACINSGADAISLVNTFKAMAIDIQNRRPVFDNISAGLSGPAIKPIALRMVWELCNAVTVPVVGLGGIACADDALEFLMAGATALQVGSATFSHPNTMIEIIDGVESYMRSYKLSAVGEISLKKREG

SEQ ID NO: 53437 - DNA, 669 bp, Unknown
  Obtained from environmental sample
  misc_feature (1)..(669): n is a, c, g, or t
gtgaaaatcctctgtatttccgatcaaattgaccctttagtatactctccttccataaaaacccgtttttccgatatagatctgatcctttgcgccggagacctgccgctggattaccttgattatatcatttccagccttaataagccgctgtattttgtttttggcaaccatcataccgaagatttaaggcattttaagagaacatgggattccccgcttatagaagacaacagggaattttttgcctgcggcgcggttcacgcaggttctaaggtcttaaccgaggggaaattcattatcgcaggcctgggcggttcaatgcgttacaacaacggagctaaccagtttacggagcttcaaatgttcatggaagcgttaaaacttgttcctaaactttggtggaaccgtatttttcacggccgctttttggatattcttcttacccacgcgccgccaaaaggcatacatgacaagaacgacaaatgccattgggggtttaaaacttatctttggtttatgaaggcgtttaagccgaagtatttggttcacggccatattcacctgtacgatttattagctgtgcggtgtaccaagtggaaatatacgaccgtaataaacgcttacggtcattatgtaattgatttgggagattcaaatgaatattga

SEQ ID NO: 53438 - protein, 222 aa, Unknown
  Obtained from environmental sample
  DOMAIN (1)...(190): Calcineurin-like phosphoesterase
  misc_feature (1)..(222): Xaa is any amino acid
MKILCISDQIDPLVYSPSIKTRFSDIDLILCAGDLPLDYLDYIISSLNKPLYFVFGNHHTEDLRHFKRTWDSPLIEDNREFFACGAVHAGSKVLTEGKFIIAGLGGSMRYNNGANQFTELQMFMEALKLVPKLWWNRIFHGRFLDILLTHAPPKGIHDKNDKCHWGFKTYLWFMKAFKPKYLVHGHIHLYDLLAVRCTKWKYTTVINAYGHYVIDLGDSNEY

SEQ ID NO: 53439 - DNA, 696 bp, Unknown
  Obtained from environmental sample
  misc_feature (1)..(696): n is a, c, g, or t
atgaaaaaaaacataattgccgtattttggctgttttttgcgtttttttgctacgcgcaggagaatttatcaagaggcgagtctcttttgatgcagaacaagcctattgaggctgtaaactttctgctaaacgcgctgtcggacgacagttccaatcccaaaacctatctttacctaggcattgtttatgaacagcttggcagtcataacgacgccgtcgcggtatacaggcaggctctgcctattgcgggcagtttttcagccaatgtcgccaataatcttgggaatgtttattttcaaaccggaaacaacgaaatggccgagcagttctattcgcaggcaataggctttaactcggcgttttccaaagcgtaccttggcagggccaatacgcgggtaaaagccggaaacttaaaaaacgccgtatccgattacgaacagtatttaacgcttgaaccgcgttcaatccagaaatcaaatattgaacagcttgtagcgcttatcaagagcgaatttgcggcggaggaaagaaaaagaattattgccgaggaagaggcccgcaggttagctgaagaaaggcagaaacttctggattcagtttccgcgtctttgcactcggcggcggacttaagcaagagcctgtcttccggggcggaaagcgtcgagcaatatgacggtgagtttgaactggattaa

SEQ ID NO: 53440 - protein, 231 aa, Unknown
  Obtained from environmental sample
  SIGNAL (1)...(19)
  DOMAIN (122)...(155): Tetratricopeptide repeat
  misc_feature (1)..(231): Xaa is any amino acid
MKKNIIAVFWLFFAFFCYAQENLSRGESLLMQNKPIEAVNFLLNALSDDSSNPKTYLYLGIVYEQLGSHNDAVAVYRQALPIAGSFSANVANNLGNVYFQTGNNEMAEQFYSQAIGFNSAFSKAYLGRANTRVKAGNLKNAVSDYEQYLTLEPRSIQKSNIEQLVALIKSEFAAEERKRIIAEEEARRLAEERQKLLDSVSASLHSAADLSKSLSSGAESVEQYDGEFELD

SEQ ID NO: 53441 - DNA, 732 bp, Unknown
  Obtained from environmental sample
  misc_feature (1)..(732): n is a, c, g, or t
atgcgacgaatcttttcccggcggcatccggtggggcaaacacttcgctatagaaacattcctttaaaggtaatagggctactaaaaagcaaaggaacctctggatttgggcaagaccaagacgatgttattttagctcccttttcagcagttcaaaggcgtattttggcaacaacaaatgttagaaccatttatgctggcgccagtgatgagcaaagcacaccacttgcggttgaagaagcacaggaaatcttgagcgaagaacacaaactcccttacggcaacgaagcctttcgtattcaaacccagcaggaacttctggacatggtttctagcacggcaaatcttttaaccactgttttaaccgtcattgcaggcattagccttttggttggaggaattggaattatgaatataatgtatgtttcagtaaccgagcgtacccgcgaaataggtcttagaatggcaataggagcaagaggctttgatattttaatgcaatttttgattgaagcagttcttataagtttaacgggtggattagttggaattatgtttggcggcttagcttcttttttggtgacgtattttgccaactggccagttaccgtcaccttctccagcattgtaatcagtttttctgtttgttttgccaccggagttttctttggctggtatccggcacgcaaagccgctaggttggatcctattgaggcactaaggtacgaataa

SEQ ID NO: 53442 - protein, 243 aa, Unknown
  Obtained from environmental sample
  DOMAIN (61)...(236): Predicted permease
  misc_feature (1)..(243): Xaa is any amino acid
MRRIFSRRHPVGQTLRYRNIPLKVIGLLKSKGTSGFGQDQDDVILAPFSAVQRRILATTNVRTIYAGASDEQSTPLAVEEAQEILSEEHKLPYGNEAFRIQTQQELLDMVSSTANLLTTVLTVIAGISLLVGGIGIMNIMYVSVTERTREIGLRMAIGARGFDILMQFLIEAVLISLTGGLVGIMFGGLASFLVTYFANWPVTVTFSSIVISFSVCFATGVFFGWYPARKAARLDPIEALRYE

SEQ ID NO: 53443 - DNA, 414 bp, Unknown
  Obtained from environmental sample
  misc_feature (1)..(414): n is a, c, g, or t
ttgatgcagacaaggaggtttctaagaaactacaaaagcctcattcaaactatgggcagggcgagcagaaatgtgaaaggcagggttattctctacgcagacaaaatgaccgactctatgaaaaaagccattctggaaacaaaccgccgccgaaacaagcaaattgaattcaacagacaacacaatataaccccaaaaaatgtgcagagaaagctggaagatttaatggaaattcaagaccccttaatggatgttcgtggcaaaaataagaaaattggcgataaacggaaaaaggattcaagttcagacaatattgaggaattggagcaggcaatgaaaacggcggcagcacggcttgattttgaggaagcggcacggattagggatattattcgtaccttagtgcctcaatag

SEQ ID NO: 53444 - protein, 137 aa, Unknown
  Obtained from environmental sample
  DOMAIN (102)...(137): UvrB/uvrC motif
  misc_feature (1)..(137): Xaa is any amino acid
MMQTRRFLRNYKSLIQTMGRASRNVKGRVILYADKMTDSMKKAILETNRRRNKQIEFNRQHNITPKNVQRKLEDLMEIQDPLMDVRGKNKKIGDKRKKDSSSDNIEELEQAMKTAAARLDFEEAARIRDIIRTLVPQ

SEQ ID NO: 53445 - DNA, 300 bp, Unknown
  Obtained from environmental sample
  misc_feature (1)..(300): n is a, c, g, or t
atgcccacatctttggacgccacggaatacctgctcagcaagggcatagcgttcttcccgggcaaagccgccaacgccggcggtgtcgcgacatcagggcttgaaatgtcccagaacagcgcgcgcctttcatggtcgtttgaagaagtagacgccaaactgaaaaacatcatggtcaacattttccacagcatagacgacgcttccaaagaatacggaaaaccgaacaactttgtagttggcgccaatatcgccggcttcctcaaagtcgccggagcaatgctggatcagggagtttaa

SEQ ID NO: 53446 - protein, 99 aa, Unknown
  Obtained from environmental sample
  DOMAIN (1)...(98): Glutamate/Leucine/Phenylalanine/Valine dehydrogenase
  misc_feature (1)..(99): Xaa is any amino acid
MPTSLDATEYLLSKGIAFFPGKAANAGGVATSGLEMSQNSARLSWSFEEVDAKLKNIMVNIFHSIDDASKEYGKPNNFVVGANIAGFLKVAGAMLDQGV

SEQ ID NO: 53447 - DNA, 1257 bp, Unknown
  Obtained from environmental sample
  misc_feature (1)..(1257): n is a, c, g, or t
gtggtaatcgcggtattaaatctggacagcgaagaaggcattacggaagaacagtttgtggtttaccgttatgtccacgacgcggcaaagccgctttacattgcctgtattggtttcgacgagcaaagcagaaaatacaaaagaagatgggacgctcccacttcttcgacacgttcggaaaccatatcgcttttcatgcaggacttaatcggggacaggaacaactgtatcattgtaaccggaatgaacaataaatacgaacacacaatgaccattttcaggcgggacagttctttgccgaaagaacagccttacaaaaaaatagcggaattgcagattgacggttccatagtcattcaggaaacttcccgttccctggcgtatcaacagggcattacaaacggacagagttttaacattgccgcgtacggccatgacaactcctcggccaatatcatggaccagcttgagactatctattcttacagtacgtcaacaaatcaatatgaaagagccaatgtttccagaatacccggcgttcaaatagaacagcggaaggtgaaggaaattttaagcggcgctccgggggtttttgaaaactttacgcacgacctttggtactatgtaaacccgagcggcactatagacacaaagcagtatatcttttttgacccggcaagcagggaaattatctttgtcggcgatgaggcccaacaggtatttcaatggcagcattccacgccgacacgttacgggctttacataagaagccagaatatttcaataaccaccttactgcgttttattgatatagaactggaaactatagacagcattaaattgagggtatttgaagacgtaagattgaaaatcatagtaaacacatcatgggacggaacctaccggcgcgccggggcggtaaaaacggaaaaacccaaatcgtcgattaagtcgtcaataaacgcgctttacgacagttctttgggaaaactgcgcttttatgattccggagcgtacacgcttacaacggggaatacatcaaaaaacggaaggtatgtcttctataaggtagacgaaaacgaccttctggaactccgtcccgacgacgcggtaaacgaagcccatgaaggccgtatggtttataaagttgaagcaatcggcaattcagcctttatcttatcccgcgtgcggttaggcaccacgggaatacaaaataccatggaaccgccgattatgctttcccctattgaaaattaa

SEQ ID NO: 53448 - protein, 418 aa, Unknown
  Obtained from environmental sample
  misc_feature (1)..(418): Xaa is any amino acid
MVIAVLNLDSEEGITEEQFVVYRYVHDAAKPLYIACIGFDEQSRKYKRRWDAPTSSTRSETISLFMQDLIGDRNNCIIVTGMNNKYEHTMTIFRRDSSLPKEQPYKKIAELQIDGSIVIQETSRSLAYQQGITNGQSFNIAAYGHDNSSANIMDQLETIYSYSTSTNQYERANVSRIPGVQIEQRKVKEILSGAPGVFENFTHDLWYYVNPSGTIDTKQYIFFDPASREIIFVGDEAQQVFQWQHSTPTRYGLYIRSQNISITTLLRFIDIELETIDSIKLRVFEDVRLKIIVNTSWDGTYRRAGAVKTEKPKSSIKSSINALYDSSLGKLRFYDSGAYTLTTGNTSKNGRYVFYKVDENDLLELRPDDAVNEAHEGRMVYKVEAIGNSAFILSRVRLGTTGIQNTMEPPIMLSPIEN

SEQ ID NO: 53449 - DNA, 495 bp, Unknown
  Obtained from environmental sample
  misc_feature (1)..(495): n is a, c, g, or t
gtgcgggcttggcacgaaacctataaattagataccgttgtcacccgttgctcaaataactacggaccataccaattccccgaaaaactgataccacttgcggttacaaacttgatgcagggcaaaaaaatccctgtttatggcaagggactcaacattcgcgactggcttcacgtggaagaccattgccgtggaattttgcttgcgcttgaaaagggagagtccggcaggatatacaatattggcgggagcaatgaatggaaaaacatagatattgcaaaagaactcgttaaaataatgaaaatggacgaaaccaaaattgaatttgtcaccgacaggcttgggcacgatttgcgctacgccatagatgctacccgcattcgcaaagaactcggctgggaacctagatacacattcagtactggactcccagaaactgtaaagtggtatgtggaaaacgaagcttggtggaaaccgcttaaagctaagggttaa

SEQ ID NO: 53450 - protein, 164 aa, Unknown
  Obtained from environmental sample
  misc_feature (1)..(164): Xaa is any amino acid
MRAWHETYKLDTVVTRCSNNYGPYQFPEKLIPLAVTNLMQGKKIPVYGKGLNIRDWLHVEDHCRGILLALEKGESGRIYNIGGSNEWKNIDIAKELVKIMKMDETKIEFVTDRLGHDLRYAIDATRIRKELGWEPRYTFSTGLPETVKWYVENEAWWKPLKAKG

SEQ ID NO: 53451 - DNA, 759 bp, Unknown
  Obtained from environmental sample
  misc_feature (1)..(759): n is a, c, g, or t
atggttatgcgccgtgaaaacgaccgcatcaagcgttatgtgcatctttcaacaggcaactataacgacaggacggcaaaatattacgaggatatttgcctatttacatgcagggaagacatcgcctatgacgcgggaattctttttaatatgctgacaggctattcttccgtaagtcagatgatgaggcttacttcggccccttccggtcttaaacggcgttttttggaactaatcgaaagggaggcgaataggtcccggcataagtatccttccaaaattacggcgaaaatgaactctcttaccgacatagacataataaaagcgctgtatgcggcttcctgcgccggagtaaaaatatccctgtgcgtgcgcggaatctgcaccttaatacccggcattcccggagtttcggaaaacatccgcgttatcagcattatagaccactaccttgaacattccagaatttattactttgccaacggcggcgcggaagaactctacctttccagcgcggactggatgacgcgtaaccttgaacggcgcgttgaactgctcttccccattcaggatgaaaaaatcagggcggaactgcatgatattctaaacgattatttccgcgataactgtcaggcttctgtctggacaatgaaggtaaatggactctgctttctcctttggcggatgaaaaacctctccgtgttcagaaaaaaatgctttcccgtgcggcaagagacagtgaaaatcctggacccgtaa

SEQ ID NO: 53452 - protein, 252 aa, Unknown
  Obtained from environmental sample
  DOMAIN (1)...(241): Polyphosphate kinase
  misc_feature (1)..(252): Xaa is any amino acid
MVMRRENDRIKRYVHLSTGNYNDRTAKYYEDICLFTCREDIAYDAGILFNMLTGYSSVSQMMRLTSAPSGLKRRFLELIEREANRSRHKYPSKITAKMNSLTDIDIIKALYAASCAGVKISLCVRGICTLIPGIPGVSENIRVISIIDHYLEHSRIYYFANGGAEELYLSSADWMTRNLERRVELLFPIQDEKIRAELHDILNDYFRDNCQASVWTMKVNGLCFLLWRMKNLSVFRKKCFPVRQETVKILDP

SEQ ID NO: 53453 - DNA, 669 bp, Unknown
  Obtained from environmental sample
  misc_feature (1)..(669): n is a, c, g, or t
ttgaatatacggtgcggcgcagtccgcccgcagacaggagttaatatgtttaatatgtattttgatcaatactatttattgttggtagtgcctactctgattttatcgctttgggcgcagattatggttaaatctacttttgcgaaatattcaaggataccgtcttcgcgggcaattacgggcgttgatgcggcggctcttttgttaagatcaaataatatcagagatgtaaaggttgagcgtatcgcaggttctcttaccgatcattattcgcctatggataaaaaattacggctttcccagcccgtatttggctcaacttcgattgccgctgtaggagtcgccgcacatgaagccggacacgccattcaacacgccgtacactggagccctcttgccatgagaagtacgcttgtacctgtggcgaatatcggctcatcaatcggcccctggcttgctatagcgggacttgctttttcttccgatccttctttctccggcattgccaatctgttattcaagattggaattctgctttttagcggagctgtgcttttttatgtcattacccttccggttgaaataaacgcttccaaaagagcaatatccgttttacgcgccaataatgttttaacagaaaaagaactaaaaggcgtaaaaaggttttaa

SEQ ID NO: 53454 - protein, 222 aa, Unknown
  Obtained from environmental sample
  DOMAIN (23)...(221): Putative neutral zinc metallopeptidase
  misc_feature (1)..(222): Xaa is any amino acid
MNIRCGAVRPQTGVNMFNMYFDQYYLLLVVPTLILSLWAQIMVKSTFAKYSRIPSSRAITGVDAAALLLRSNNIRDVKVERIAGSLTDHYSPMDKKLRLSQPVFGSTSIAAVGVAAHEAGHAIQHAVHWSPLAMRSTLVPVANIGSSIGPWLAIAGLAFSSDPSFSGIANLLFKIGILLFSGAVLFYVITLPVEINASKRAISVLRANNVLTEKELKGVKRF

SEQ ID NO: 53455 - DNA, 684 bp, Unknown
  Obtained from environmental sample
  misc_feature (1)..(684): n is a, c, g, or t
atgacctatttcgggaaaggcatttatacactgacaaccgccgctaaaattctcaaaatgaatccacaaaaaatgcgccgatggattaaaggatatacttatcataaaaacatggagtgtcattcctataaacctctttttaagactgaatttgactacgattccaatgatgtaattatcagttttcttgatctgacggaactgctttttatcaatagttttattcaatatggtattagtattcagaaaataagaaaagccgctattatcgcatcagatttattaaaaacttcacatccttttgctatacggaagatgtttaccgatggaaagtcaatattcgcaaaaatagctgaaaaagagaacgatacatctcttttggatcttttaagaaatcaataccaatttgagaaaattattgaaccgttattatatgaatgtatagattttggcaaacatgattatgcggaaaaatggtggcctttaggaaaaaaagggaatattgtattagacccatcaagaaatatgggacagccaattcttaataaatacaatgttaaaactgaattgatctatgaactatataaaacagatcacagcgttaatgaaatcagtgagtggtacgaactggatgaagcggcaatagaaacagctattagttttgaaaagggtttagtggcatga

SEQ ID NO: 53456 - protein, 227 aa, Unknown
  Obtained from environmental sample
  misc_feature (1)..(227): Xaa is any amino acid
MTYFGKGIYTLTTAAKILKMNPQKMRRWIKGYTYHKNMECHSYKPLFKTEFDYDSNDVIISFLDLTELLFINSFIQYGISIQKIRKAAIIASDLLKTSHPFAIRKMFTDGKSIFAKIAEKENDTSLLDLLRNQYQFEKIIEPLLYECIDFGKHDYAEKWWPLGKKGNIVLDPSRNMGQPILNKYNVKTELIYELYKTDHSVNEISEWYELDEAAIETAISFEKGLVA

SEQ ID NO: 53457 - DNA, 546 bp, Unknown
  Obtained from environmental sample
  misc_feature (1)..(546): n is a, c, g, or t
atgggtaatcttccggtgatcgattatatttttattttcctgattatactaatgattgtacatggctatataaaaggatttattgaggagcttttttcctgggctgccctaatcctggcgatatgggctgcggtgcttcttaattcggcggctgcggcatttattcggcaaagggctatgcagaatgtgcgcgtagtgcctgagatccttggttttgccgctgtttttattttggtaatggttgtgattaagcttctggagaaaattttaagggatgtaatagagggggcaaatttgggagcagtcaacaggattctcggagcgcttttcggcctcatcgaaggctttgcttttgtgatactcatcatttttgttctttctgtccagcctctttttgacccttcaaaaattttttcaggcagtatttttgcccaaataatgctgccattaattagtattccaatgggtcgcgggcaggaagctatcgataccgtgtttatttttccgccggttttaatcgaacggataggtctgtactgtgtttga

SEQ ID NO: 53458 - protein, 181 aa, Unknown
  Obtained from environmental sample
  DOMAIN (6)...(160): Colicin V production protein
  misc_feature (1)..(181): Xaa is any amino acid
MGNLPVIDYIFIFLIILMIVHGYIKGFIEELFSWAALILAIWAAVLLNSAAAAFIRQRAMQNVRVVPEILGFAAVFILVMVVIKLLEKILRDVIEGANLGAVNRILGALFGLIEGFAFVILIIFVLSVQPLFDPSKIFSGSIFAQIMLPLISIPMGRGQEAIDTVFIFPPVLIERIGLYCV

SEQ ID NO: 53459 - DNA, 702 bp, Unknown
  Obtained from environmental sample
  misc_feature (1)..(702): n is a, c, g, or t
gtgggcggttacgatcccgccacagttgccgactttgaaatcccaaaaaaatacggactgcgccagaccataggcgacactctgggcataggcggcattatgcgcgccctgaggacaattcccgttatggaacagtttgcccgcgccatggaaaaggtttgtcccgacgtgtggtttctcaattacacaaatcccatgtccatgctgacagggtttatgctaaggtacacgggagttaaaaccgtcggcctttgccacagtgtgcagggttgttcgtattggcttttcaaaggattgggattggaagacaaattagaaggacggcgcgaacttattgcgggaataaaccacatgggctggcttttggatatacgcggcaaagacggcgttgatctgtacccggaaatacgcaagctggcgaaggctaaaaactccggcgaaaaacacaacgacatggtccgttatgattacatagacaaacttggtttttactgcactgaatccagcgaacacaacgccgaatacaatccgttttacatcaaatcaaaataccctcaatttattgaggaatttaatatccccttagacgaatacccgcgccgctgtatagcgcagatcgaaggctggaaatccgaatatgaaaacctttcaaaaatgacattatcgagcatgaaaggtcgcaggaatacgcctcttacataa

SEQ ID NO: 53460 - protein, 233 aa, Unknown
  Obtained from environmental sample
  DOMAIN (1)...(233): Family 4 glycosyl hydrolase
  misc_feature (1)..(233): Xaa is any amino acid
MGGYDPATVADFEIPKKYGLRQTIGDTLGIGGIMRALRTIPVMEQFARAMEKVCPDVWFLNYTNPMSMLTGFMLRYTGVKTVGLCHSVQGCSYWLFKGLGLEDKLEGRRELIAGINHMGWLLDIRGKDGVDLYPEIRKLAKAKNSGEKHNDMVRYDYIDKLGFYCTESSEHNAEYNPFYIKSKYPQFIEEFNIPLDEYPRRCIAQIEGWKSEYENLSKMTLSSMKGRRNTPLT

SEQ ID NO: 53461 - DNA, 315 bp, Unknown
  Obtained from environmental sample
  misc_feature (1)..(315): n is a, c, g, or t
gtgcttaacacaggcttaagcatagaaaacctgcccgccgaggcctgcgttgaggttccctgtctcgtagacggctcagggcttagggcgtgccatgtaggaaaacttcctgtccagcttgccgcgatgaacatgactcacattaacgtccacttaatcacgatagaagccgccgtaacaaaaaaacgcgaacacatctaccacgccgcaatgctcgagccccacaccgccgcggaactctctctcgatcacatacgcgcgatggtagacgaactgcttgaggctcacaaacaatggttacctgagtataaatag

SEQ ID NO: 53462 - protein, 104 aa, Unknown
  Obtained from environmental sample
  misc_feature (1)..(104): Xaa is any amino acid
MLNTGLSIENLPAEACVEVPCLVDGSGLRACHVGKLPVQLAAMNMTHINVHLITIEAAVTKKREHIYHAAMLEPHTAAELSLDHIRAMVDELLEAHKQWLPEYK

SEQ ID NO: 53463 - DNA, 414 bp, Unknown
  Obtained from environmental sample
  misc_feature (1)..(414): n is a, c, g, or t
atgatttttaagaaacggccgcgtatattagccgcgtttgcttttgttttacttttttccgcctgtaatactacaataaatatcagcgaggatctgtctccggcggagttgattcaacgcgcgcaggaggcgtcagataaaaaccgctacaatgccgccctccagtattatcaggctttaagcgaacgcaaccgaagcaatatcgatcttgttatcacatcagaatatgaaatcgcctttattcactacaaacaaaaaaaatatcagcaggcaaagaacgaattaacggaagtgcttgaatactacaacacccccgacgaagaactcctcccccagcactacaaaaaactctcaaaaatcgtcattgaccgcatagataacagagataaaaaacccgcatcttcggaaaaatag

SEQ ID NO: 53464 - protein, 137 aa, Unknown
  Obtained from environmental sample
  SIGNAL (1)...(21)
  misc_feature (1)..(137): Xaa is any amino acid
MIFKKRPRILAAFAFVLLFSACNTTINISEDLSPAELIQRAQEASDKNRYNAALQYYQALSERNRSNIDLVITSEYEIAFIHYKQKKYQQAKNELTEVLEYYNTPDEELLPQHYKKLSKIVIDRIDNRDKKPASSEK

SEQ ID NO: 53465 - DNA, 1494 bp, Unknown
  Obtained from environmental sample
  misc_feature (1)..(1494): n is a, c, g, or t
atggctaattacgatgacttaactaaagttttaaaagagcggattgaaaactggaagggacaagcctcgtcgggcagctgtggctttgtggttcaggtgggtgattccgtcgccacggtctacggccttaacgacgccgtttacggcgaattggttgaattcgcctcgggagcgcacgggatcgttttcaaccttgaggaagaaaacgccggctgcgttattttaacgggagaatcccttgttaaagacggcgaggaagtaaaaagaacaggcaaggtcgtgtccattccctcaggcaacggctttttcggcagggttgttaaccctcttggcgaagcccttgacggcaaggggcctgtaacagccgaagtctatatgcctatggaggcccccgccgcgcctgtaatagacagggggagcgtggacaccccgcttcaaacaggctgtctttccatagacgccatgatccccatagggcgaggccagcgcgagcttataataggcgaccgccagaccggaaaaacctcaatcgccattgacacgataatcaaccagaaagggaaaaacgtcatttgtatatactgcgccatagggcagaaggcgtccacaatagtggcgattgtcaacaaccttgaaaaacacggcgcgatggactacacatttgtggtgcttgcggcggcttccgattcggctgcccttcaatatatcgcgccttactctgccgtcgccatggcggaacattttttgcgtcagggaaaagacgtgcttgtggtttacgacgatctttccaagcacgcggtcgcttaccgcgcggtcagcctgcttctgcgcaggccgccgggccgcgaggcttttcccggcgatgtgttctaccttcattcgcggcttttggaacgcgccgtaaaactgtcgccttcgaaaggcggcggttcaattaccgccatgccgattgttgagacgcaggccggcgacatttcggcctacatccccacaaacgtaatctcaattacggacgggcagatattccttgattcagagttgtttaattcgggtttccgtccggccatagacgtagggctttccgtaagccgcgtcggcggttcggcgcagacaaaggctatgcggaaaatttcaggccgcatcaggctggacctcgcccagtaccgcgagatggcggctttcgcgcagttcggcagcgatttggacaaggccacacaggacaaactcgcgcagggcgcaaggctaatggaagtgctgaaacagcctcagctttcgccgtatccgcttgaggaacaaatcgcgattctttttctcgcggtggaaggctatcttcttgacgttaaaactgaaaatgtccgcgagtttgtgaaggatttcctgtcgcaccttanaaaccagaaacaggatctgatgaggggcatagctgaaaccggagtcgtttccaaagaacaggaagacgaattgcgcttaacggtaaaagcctttaaggaataa

SEQ ID NO: 53466 - protein, 497 aa, Unknown
  Obtained from environmental sample
  DOMAIN (23)...(91): ATP synthase alpha/beta family, beta-barrel domain
  misc_feature (1)..(497): Xaa is any amino acid
MANYDDLTKVLKERIENWKGQASSGSCGFVVQVGDSVATVYGLNDAVYGELVEFASGAHGIVFNLEEENAGCVILTGESLVKDGEEVKRTGKVVSIPSGNGFFGRVVNPLGEALDGKGPVTAEVYMPMEAPAAPVIDRGSVDTPLQTGCLSIDAMIPIGRGQRELIIGDRQTGKTSIAIDTIINQKGKNVICIYCAIGQKASTIVAIVNNLEKHGAMDYTFVVLAAASDSAALQYIAPYSAVAMAEHFLRQGKDVLVVYDDLSKHAVAYRAVSLLLRRPPGREAFPGDVFYLHSRLLERAVKLSPSKGGGSITAMPIVETQAGDISAYIPTNVISITDGQIFLDSELFNSGFRPAIDVGLSVSRVGGSAQTKAMRKISGRIRLDLAQYREMAAFAQFGSDLDKATQDKLAQGARLMEVLKQPQLSPYPLEEQIAILFLAVEGYLLDVKTENVREFVKDFLSHLXNQKQDLMRGIAETGVVSKEQEDELRLTVKAFKE

SEQ ID NO: 53467 - DNA, 354 bp, Unknown
  Obtained from environmental sample
  misc_feature (1)..(354): n is a, c, g, or t
atgaaggtagaacacatcgccgggaaaagcctcgcggcccggcggcctgcgcagaagcaggctgaccgcgcggtaagcgaccgcgtgcttggaaagatcgtcgtaaaccacaagcacgtcttttccctgacgcaaaaaatgttccgccatggcgacggcagagtaaggcgcgatatattgaagggcagccgaatcggaagccgccgcaagcaccacaaatgtgtagtccatcgcgccgtgtttttcaaggttgttgacaatcgccactattgtggacgccttctgccctatggcgcagtatatacaaatgacgtttttccctttctggttgattatcgtgtcaatggcgattga

SEQ ID NO: 53468 - protein, 117 aa, Unknown
  Obtained from environmental sample
  misc_feature (1)..(117): Xaa is any amino acid
MKVEHIAGKSLAARRPAQKQADRAVSDRVLGKIVVNHKHVFSLTQKMFRHGDGRVRRDILKGSRIGSRRKHHKCVVHRAVFFKVVDNRHYCGRLLPYGAVYTNDVFPFLVDYRVNGD

SEQ ID NO: 53469 - DNA, 897 bp, Unknown
  Obtained from environmental sample
  misc_feature (1)..(897): n is a, c, g, or t
atggcgagcctgaaggacgtccgcctgcggatgcgggccatcgaacagacattacaggtaaccaaggcgatgaactttatctctaccgcaaaactgcgcaagggacggaagatgctcgcggataccgtgccgtatttcagcaggattcaaaaagcaatgttcgatattctttccagcgagaaaaacattgacagcgtattttttaaaaaacgcgataaagagtcaaagccttcgcgtactgcggtaattgtcataaccagcgacaagggtcttgcgggcggctataacgcgaatatttaccgtcatgtagacgagctttgcaaaaagatgcaaaatcctatgctgatacttatcggcggcaatgtcggctatcgctattttggtcattctccgtatgtaattctggaaaatttttcttttcatccgcagatacccacagtggaacacgccggagaagtttccgagtatgtggtttctcagctcatttggggaatttttgattcggtacatattgtttataccaatatgttcagcatggtaaaacttctgccggtagatcatcagataattccgcctgtaaaagaaaaaatacaaaatggtattttggaaatcggcggagtaaagagggtggatttaaagtttgaatttctgccgaccacagaggcggtttttgatacgctggttcctcagtatataaaaggcgtaatttacggggcgatggtggaagcgtacgcaagcgaacagagcgcccgcatgaaggcaatggacgaggcttccaagagcgccgaagatatgcttgcctctctgcggataagttacaaccgcgcgcgtcaggcaggcattacgcaggaaatggcggaaataacaggcggttctacagcgctggctgataggtag

SEQ ID NO: 53470 - protein, 298 aa, Unknown
  Obtained from environmental sample
  DOMAIN (2)...(295): ATP synthase
  misc_feature (1)..(298): Xaa is any amino acid
MASLKDVRLRMRAIEQTLQVTKAMNFISTAKLRKGRKMLADTVPYFSRIQKAMFDILSSEKNIDSVFFKKRDKESKPSRTAVIVITSDKGLAGGYNANIYRHVDELCKKMQNPMLILIGGNVGYRYFGHSPYVILENFSFHPQIPTVEHAGEVSEYVVSQLIWGIFDSVHIVYTNMFSMVKLLPVDHQIIPPVKEKIQNGILEIGGVKRVDLKFEFLPTTEAVFDTLVPQYIKGVIYGAMVEAYASEQSARMKAMDEASKSAEDMLASLRISYNRARQAGITQEMAEITGGSTALADR

SEQ ID NO: 53471 - DNA, 1008 bp, Unknown
  Obtained from environmental sample
  misc_feature (1)..(1008): n is a, c, g, or t
atgatagttattattaaaaaggacgcaaacgaaaagagcgtagaaaatcttgtctcgtggctggaaaatcagggactgcacgttaatgtaaacaagggcgtgtatcaaactgtgcttggattaatcggcgatacgcacagctttaattcggaacttgtcagcggcatggacattgtagagcgcgttcagcggataagcgaaccgtacaagaaagccaaccgcaaatttcacatggacgatacagtcgttgacatgggcggatacaaactcggcggcggtaattttcaatttatcgccggtccctgctctgttgagtcaaaagaacaaatatgcggaattgcgaagtccgttaaaaaggcgggagcgaatcttctgcgaggcggagcgtttaaaccccgcacttcgccgtattcgtttcagggtctccgcgacgaaggcatcgaatatttactgcaagcgaaagaacaaaacggaatgcctattgtcagcgaaataatgaacgccaaccatttgtcaatgtttgaaaatattgatgtaattcaagtgggcgcgcgtaatatgcaaaactttgaattgctgaaagaattgggaacgattaacaaaccgattctgttaaagcgagggcttgccaatactcttgaagaacttttaatgagcgccgaatatatcatgtcgggcggaaacgagcaaattattttatgcgagcgcggtattcgcacatttgaaaccgccacacgcaacactctcgacatttccgcaataccgatgctaaaacggctgacccatctgcctgttatcattgacccaagccacgccgcaggagacgccgctcttgtatatccgctctctatggcttcagcggcggcaggcgcagacggattaatcatcgaggtacacaacgatcccgcccatgcgttatgcgacggacctcagtcgattacccccgacgcattcgctgatttggcgcatgacgttaaaaagattttgaaaataataaataagaaataa

SEQ ID NO: 53472 - protein, 335 aa, Unknown
  Obtained from environmental sample
  DOMAIN (80)...(334): DAHP synthetase I family
  misc_feature (1)..(335): Xaa is any amino acid
MIVIIKKDANEKSVENLVSWLENQGLHVNVNKGVYQTVLGLIGDTHSFNSELVSGMDIVERVQRISEPYKKANRKFHMDDTVVDMGGYKLGGGNFQFIAGPCSVESKEQICGIAKSVKKAGANLLRGGAFKPRTSPYSFQGLRDEGIEYLLQAKEQNGMPIVSEIMNANHLSMFENIDVIQVGARNMQNFELLKELGTINKPILLKRGLANTLEELLMSAEYIMSGGNEQIILCERGIRTFETATRNTLDISAIPMLKRLTHLPVIIDPSHAAGDAALVYPLSMASAAAGADGLIIEVHNDPAHALCDGPQSITPDAFADLAHDVKKILKIINKK

SEQ ID NO: 53473 - DNA, 360 bp, Unknown
  Obtained from environmental sample
  misc_feature (1)..(360): n is a, c, g, or t
ttgtgtacctcgatgattaatccgtctgcgcctgccgccgctgaagccatagagagcggatatacaagagcggcgtctcctgcggcgtggcttgggtcaatgataacaggcagatgggtcagccgttttagcatcggtattgcggaaatgtcgagagtgttgcgtgtggcggtttcaaatgtgcgaataccgcgctcgcataaaataatttgctcgtttccgcccgacatgatatattcggcgctcattaaaagttcttcaagagtattggcaagccctcgctttaacagaatcggtttgttaatcgttcccaattctttcagcaattcaaagttttgcatattacgcgcgcccacttga

SEQ ID NO: 53474 - protein, 119 aa, Unknown
  Obtained from environmental sample
  misc_feature (1)..(119): Xaa is any amino acid
MCTSMINPSAPAAAEAIESGYTRAASPAAWLGSMITGRWVSRFSIGIAEMSRVLRVAVSNVRIPRSHKIICSFPPDMIYSALIKSSSRVLASPRFNRIGLLIVPNSFSNSKFCILRAPT

SEQ ID NO: 53475 - DNA, 837 bp, Unknown
  Obtained from environmental sample
  misc_feature (1)..(837): n is a, c, g, or t
atgggtgaactctccgatgagttttccgcccagggtcgtaagaacatctggggaactatccccgatgttgtagaaatgcagtccgaagcgggcgcagcggcggcggtgcatggcgcactgaccaccggcgcgttgtccactacttttaccgcttcacaagggctgctgttaatgatccccaatatgtacaaaatcgccggggaactgacctcaacggtgtttcatattgccgcccgtgctttggcaacctcaagcctttcgatttttggcgatcatcaggacgtaatggcctgccgccagaccggttgggcaatgctggcttcaaacagcgttcaggaagtgatggatttggcggctatcgcccacgcaagcacattgcgcgcgcgtgttcccttcctccacttctttgacggattccgcaccagccatgaactgcaaaaagtagaagaagtctcctacgatgtactgcatcagatgattgatgacgatctggtcgccgcacaccgcaagcgggggcttactcccgagaagccatccattcgcggaacagcgcaaaaccccgacacctatttccagggtcgtgaaggggtaaacaagtattacaacgccgtgccaaaaattgtgcagacggaaatgaacaagtacgcgaaactcaccgggcgttcctaccatgtctttgactactacggcgcgaaagatgcgaagaaagtcattgtcattatgggttccggagctgataccgtcgaggaaaccattgattacctgaaatcaaaaggcgaaaaagtcggcatgattaaggtgcggctgttcggccttttgacgcgaaactctttgtaa

SEQ ID NO: 53476 - protein, 278 aa, Unknown
  Obtained from environmental sample
  DOMAIN (1)...(213): Pyruvate flavodoxin/ferredoxin oxidoreductase, thiamine diP-binding domain
  misc_feature (1)..(278): Xaa is any amino acid
MGELSDEFSAQGRKNIWGTIPDVVEMQSEAGAAAAVHGALTTGALSTTFTASQGLLLMIPNMYKIAGELTSTVFHIAARALATSSLSIFGDHQDVMACRQTGWAMLASNSVQEVMDLAAIAHASTLRARVPFLHFFDGFRTSHELQKVEEVSYDVLHQMIDDDLVAAHRKRGLTPEKPSIRGTAQNPDTYFQGREGVNKYYNAVPKIVQTEMNKYAKLTGRSYHVFDYYGAKDAKKVIVIMGSGADTVEETIDYLKSKGEKVGMIKVRLFGLLTRNSL

SEQ ID NO: 53477 - DNA, 666 bp, Unknown
  Obtained from environmental sample
  misc_feature (1)..(666): n is a, c, g, or t
gtgcttggcgggcgctacgggcttggttccaaagagttcacccccacaatggtcaaggcggtatttgataacttgtccggcaaaaaaatcgccaacttcatcgtcggcgttaatgacgacgtggggcacaagagcctggattacgatccaaattttgtactggaagaagagggcgtgaacgaagccctgttctacgggcttggagcggacggcacggtcggcgcgaacaagaactcaatcaagatcatcagcgaggcgaaacccgaactcaacgcccaggcgtacttctcctacgactcgaaaaagtcaaacggcttcaccgtttcgcacctccgcttcggcaagggccgtatcagaaggccctaccttatcaactccgcggacttcctcgcctgccacaaattttcctacatggaaatgtacgatatgctcaagagcgtcaaggcgggcggaaccttcctcctcaacagcccgttcaaggccgccgacgtatggaagaatatccccgtagaagcccagaagcagatcattgacaaaaagctgaagttctacgttatcaacgccgctgaattgcgcataacaccggcatgggcaaccggattaacacggttatgcaggccgcctatttcaaaatttccggcatattggccgaagccgacgcggtaa

SEQ ID NO: 53478 - protein, 221 aa, Unknown
  Obtained from environmental sample
  DOMAIN (68)...(218): Pyruvate ferredoxin/flavodoxin oxidoreductase
  misc_feature (1)..(221): Xaa is any amino acid
MLGGRYGLGSKEFTPTMVKAVFDNLSGKKIANFIVGVNDDVGHKSLDYDPNFVLEEEGVNEALFYGLGADGTVGANKNSIKIISEAKPELNAQAYFSYDSKKSNGFTVSHLRFGKGRIRRPYLINSADFLACHKFSYMEMYDMLKSVKAGGTFLLNSPFKAADVWKNIPVEAQKQIIDKKLKFYVINAAELRITPAWATGLTRLCRPPISKFPAYWPKPTR

SEQ ID NO: 53479 - DNA, 1629 bp, Unknown
  Obtained from environmental sample
  misc_feature (1)..(1629): n is a, c, g, or t
atgggcaaccggattaacacggttatgcaggccgcctatttcaaaatttccggcatattggccgaagccgacgcggtaaaacgcatgaaggagcatatcgagcactcctacggcaagaagggcaaagacgtagttgaaaaaaactataaaaccgttgacgcgtcattgaacgccgttgaagaggtaaagtacccctccaagaccgaaggggacatccacatgaagaagccctttgccaccgcgaaggattcatggatcagagatgttctcggaaccatgtcgatacaggaaggagactccctggctgtcagcaaaatccccgaagacggaaccttccccacggcgactacccaatacgagaaacgctcggtggcggaacaggttcccgtttggaatcccgaggtgtgtatacagtgcggcaactgtacggtcgtatgcccccatgcctgtatgcgctttaagaaccttaccgacgatcaggttgcgaaagcgcccaaaggctttaaaaccgcggcgataaaacccaagccggtggacggacagaaggcggcgctggttatagcctgcgaagactgctacagctgcggcgtctgcctcaatatatgccccatgtccaataaaggccaggagaagcccgcgctggcatggaaacattattccgatgatcacgaattccacgcggaacaggtcgcggtctgggactacttcctttcattgcccgaaacgcccgctggtgaactgaaaagcgcgaaggcgctggcctacaaacggcccctgtttgaattctccggggcttgcggcggctgcggcgagactccttacgttaaattgatgtctcagcttgtcggcgatcgcgcgctcatcggcaacgccaccggctgttcctcgatatacggcggaaacctccccaccaccccctacgcgcagagggcggacgggcgtgggccggtgtggtcaaacagcctctttgaagacgcggcggaattcgctatgggcttcaggcttaccagcgacaagctggctgtccacgcccgtgaaattgccgaaaaggcaaaaagcgaaggcattgcctcaggtgttatcgacaaaatactctccaatgatcaagccgacgaggcgaagatcgacgaaatgcggaaaagcatcgacgaactcaaggccgcgattaaaaacgactcaaagcccacggcaaaattgctctactctcttgccgatttctttgtaaaaagatcggtatggggcttcggcggcgacggatgggcttacgacatcggtttcggcggtcttgaccatgtactcgcctcgggcaaaaacattaaccttttatgtctggacaccgaagtttattccaataccggcggacagatgtcaaaggcgaccccggtaggcgctatcgccaagttcgccaacgcgggaaaagaaattaccaagaaagatttgggcgcgatagcgatgagctacggctatgtgtacgtcgccaaaatttcactgggcgcggacatgaaccagacgatcaaagccttccgcgaagccgaatcctacaatggcccctcgcttatcatcgcctactcgcattgtatcaaccacggcatcgacatgagcaagggactgagcacggcaaggcggtag

SEQ ID NO: 53480 - protein, 542 aa, Unknown
  Obtained from environmental sample
  DOMAIN (129)...(152): 4Fe-4S binding domain
  misc_feature (1)..(542): Xaa is any amino acid
MGNRINTVMQAAYFKISGILAEADAVKRMKEHIEHSYGKKGKDVVEKNYKTVDASLNAVEEVKYPSKTEGDIHMKKPFATAKDSWIRDVLGTMSIQEGDSLAVSKIPEDGTFPTATTQYEKRSVAEQVPVWNPEVCIQCGNCTVVCPHACMRFKNLTDDQVAKAPKGFKTAAIKPKPVDGQKAALVIACEDCYSCGVCLNICPMSNKGQEKPALAWKHYSDDHEFHAEQVAVWDYFLSLPETPAGELKSAKALAYKRPLFEFSGACGGCGETPYVKLMSQLVGDRALIGNATGCSSIYGGNLPTTPYAQRADGRGPVWSNSLFEDAAEFAMGFRLTSDKLAVHAREIAEKAKSEGIASGVIDKILSNDQADEAKIDEMRKSIDELKAAIKNDSKPTAKLLYSLADFFVKRSVWGFGGDGWAYDIGFGGLDHVLASGKNINLLCLDTEVYSNTGGQMSKATPVGAIAKFANAGKEITKKDLGAIAMSYGYVYVAKISLGADMNQTIKAFREAESYNGPSLIIAYSHCINHGIDMSKGLSTARR

SEQ ID NO: 53481 - DNA, 759 bp, Unknown
  Obtained from environmental sample
  misc_feature (1)..(759): n is a, c, g, or t
atgaacaacggaccgattctatccgacatccgcaaagccaaagcagagaaccgccgcgcccactgggtgctgctcgatcccgatgattttacgacggaagccgcctgcgatatagcgcgggcctcccaagagagcggcgtaagcgcgattctggtaggcggaagcttgttgcaaacaaaccggatcgacgcctttgtcaagtcattgcgtgaggccgtgtctattcctgtgatactcttccccggcgacgcgacccagctctccaaacacgccagcgccctgctgtatctgtcattaatatccggccgcaatccggtcaacctgataggggagcaggtaaaggcggcgcctatcatccgccaatacggattggagcctatatctaccggctacatgctcgtagaatccggcgctgtaacatcggtggagtttatgagcggcacccgcccgttgccccgctcaaagccgaatatcgccgccgcccacgcccttgccgcgcagtacttgggtatggacatgatatacctagaagccggaagcggcgcctcgttaaccgttccggcggagatgatagaagcggtgcgcgccggcgttgacatacccataatagtgggcggcggtatacgggacgaagaaacggcgctggaaaaattgcgcgccggagcggatattgtcgtcaccggaaatttgctgcaaaaagagaacgggttagagaggatgaggggtatcgcggggcgcgtgggagggtttcgcgcctga

SEQ ID NO: 53482 - protein, 252 aa, Unknown
  Obtained from environmental sample
  DOMAIN (12)...(248): PcrB family
  misc_feature (1)..(252): Xaa is any amino acid
MNNGPILSDIRKAKAENRRAHWVLLDPDDFTTEAACDIARASQESGVSAILVGGSLLQTNRIDAFVKSLREAVSIPVILFPGDATQLSKHASALLYLSLISGRNPVNLIGEQVKAAPIIRQYGLEPISTGYMLVESGAVTSVEFMSGTRPLPRSKPNIAAAHALAAQYLGMDMIYLEAGSGASLTVPAEMIEAVRAGVDIPIIVGGGIRDEETALEKLRAGADIVVTGNLLQKENGLERMRGIAGRVGGFRA

SEQ ID NO: 53483 - DNA, 1047 bp, Unknown
  Obtained from environmental sample
  misc_feature (1)..(1047): n is a, c, g, or t
gtgaccgacaaggatctgcgggcgccgatggccgcgacgatagacgcgaagctgcgcatgtcgacccgcaggaatcacacggcgacgcacctgctacaggccgctctgcgcaaacgctggggcgatcacgttcagcagtcgggttctcgcgttgatccgtcgggactgcgcttcgacttcacccacttcaaggggcttgacggtgatgaaatctcaaaggttgagacgattgtaaatcagtggataatggataactaccgcgtggagacggtcgtaaaagatacggctgcggccaaagcggagggcgcgaccgccctcttcggcgagaagtacggcgataaggtgagggtggtgggcatagcccccgtctcaaaggaactctgcggcggcacccacgtcgccgctacggggcagataggtctcttccacatagtgggggaggagagcgtctccgccggcgtccgccgcgtaaacgccgttacagggacggcggccgtgcaatatattattgatatggagaaaacatcgtccgcgctggcccgtatgttgaaagtcagtcacgataagttacaggaacgcgcgttggaattgattgataacgctaaggagcttgagaacaaagtgaaagccctgtcgtcggccaaagccgccgatacggtgggaaccgtttttgacgaagcggccgagtgcgcctcaggacttaagtttgccgttagtgatatgggcgaattggacaaggactctttcacccgcatagccgacgcgatctcagacagaatccgcgagcaggcattgtcaactacggtgatagcgataggcgcggtcgtggatggcaaggcgatgtttgccgccggagcgggccccgaggccgtgtctaagcacggcatccgctgcggcgatctggtgaaagcggcggccaaatgcgccggcggcggcggcggcggttcgcctacacgcgcccaggccggcggcaaggataccggcaaacttggcgaggcgttgtcggaacttaacaaactcataacggcgaaggccggcgggaagtag

SEQ ID NO: 53484 - protein, 348 aa, Unknown
  Obtained from environmental sample
  DOMAIN (266)...(339): DHHA1 domain
  misc_feature (1)..(348): Xaa is any amino acid
MTDKDLRAPMAATIDAKLRMSTRRNHTATHLLQAALRKRWGDHVQQSGSRVDPSGLRFDFTHFKGLDGDEISKVETIVNQWIMDNYRVETVVKDTAAAKAEGATALFGEKYGDKVRVVGIAPVSKELCGGTHVAATGQIGLFHIVGEESVSAGVRRVNAVTGTAAVQYIIDMEKTSSALARMLKVSHDKLQERALELIDNAKELENKVKALSSAKAADTVGTVFDEAAECASGLKFAVSDMGELDKDSFTRIADAISDRIREQALSTTVIAIGAVVDGKAMFAAGAGPEAVSKHGIRCGDLVKAAAKCAGGGGGGSPTRAQAGGKDTGKLGEALSELNKLITAKAGGK

SEQ ID NO: 53485 - DNA, 1251 bp, Unknown
  Obtained from environmental sample
  misc_feature (1)..(1251): n is a, c, g, or t
atggtcatggcacgaaagaaggaaaagaaagagaaggatattatcgaccaactgcttgataatatcgacttccgagggttaacccaggacgaagttgtagggcaagacggcttaataaaacaattaacaggaagaatactccagagagcccttgaagcggaaatgacggagcatcttgggtatgaaaagaattccaatgatggggacaacagcgggaacaacaggaacgggcatacagaaaagacagtactgcttgagaatcaaagtacgacaatagacattccccgtgaccggaacggaacatttgaacctgtaataattccaaagcatgaaaagcgtgtcccgctgttcaacgatcaaattatttcaatgtattcatttggaatgactgatcgggacattaaggcgcatttggaaaagatatacaacgtagaggtatcgccggatctgataagccgcgtaacaaacgctgtgctggaagaagtaagggaatggcagaatcgcccattagaaaaatcatatgcgattgtttatttagacgcgctgagggttaaaggcaaggaggacggaaaaagctgcttaaagagcgtttataccgcccttgcggtcaattttgaagggaaaaaggaagtattagggctatggatagcggaaaacgagggcgcgaagttttggatgggcgtattaaccgaactgaaaaaccgcggcgttcaagacattctcatcgcctgtatggacgggctttcgggtttccccgaagccgtacggtcaatatatccgaacacccgcgtccaactgtgcattgtccacatggtgcgcaattcgacaaagtttgtttcttacaaagacttgaaaaaagtatgcgccgacttaaagacgatatattcagctaacactgaagaagccggacatgaggcgttggaagatttcggaaagaaatggaatgataaatatccgatgatatataaatcatgggaacggcactggggagacttaagcgaattttttaagtacccgcctgaaatccgccgggctatttatacgactaacgctattgagtctttgaattaccagcttcgaaaagttaccaaaaacagatcgacattttcaaccgatgacgctataattaagttactgtatttggcgattaggaacgcgtcggaaaagtggactatgccgataagggaatgggggcaggctctaaaccagtttgccattgagtttggaaaagaacgggttccgttcttatga

SEQ ID NO: 53486 - protein, 416 aa, Unknown
  Obtained from environmental sample
  DOMAIN (3)...(393): Transposase, Mutator family
  misc_feature (1)..(416): Xaa is any amino acid
MVMARKKEKKEKDIIDQLLDNIDFRGLTQDEVVGQDGLIKQLTGRILQRALEAEMTEHLGYEKNSNDGDNSGNNRNGHTEKTVLLENQSTTIDIPRDRNGTFEPVIIPKHEKRVPLFNDQIISMYSFGMTDRDIKAHLEKIYNVEVSPDLISRVTNAVLEEVREWQNRPLEKSYAIVYLDALRVKGKEDGKSCLKSVYTALAVNFEGKKEVLGLWIAENEGAKFWMGVLTELKNRGVQDILIACMDGLSGFPEAVRSIYPNTRVQLCIVHMVRNSTKFVSYKDLKKVCADLKTIYSANTEEAGHEALEDFGKKWNDKYPMIYKSWERHWGDLSEFFKYPPEIRRAIYTTNAIESLNYQLRKVTKNRSTFSTDDAIIKLLYLAIRNASEKWTMPIREWGQALNQFAIEFGKERVPFL

SEQ ID NO: 53487 - DNA, 1275 bp, Unknown
  Obtained from environmental sample
  misc_feature (1)..(1275): n is a, c, g, or t
gtggttgacaggatctttgtcggcaggggcgtcaacgaaatagccctgggcggcctttcgctggttgcaccgcttatgtcccttgcaatggcctttgccatgctctttgggattggatcggcaaatatgatctctatgcgcctgggtcagggccgcaaagaagaagcggaaaataccctgaaccattgcgtccttcttcttgtagggtctggaattctgctaacctttgtagggcttttctttatggacgaaatcctctcagttatgggcgcgcaggaaggcagccttgccctggattacagccgccggtattttaagataatcctttatggctctatacccatgcaggttggttttggcctatcccattgtaccagggcgcaaggcttcccaaccattactatgattgccatgtttttgggcgccgggctgaacaccatccttgacccgctttttatttttgttttccactggggcgttgaaggggccgcctgggcaaccattatttcgcaggctgtttcctgtatctggatacttactttttctttcagcaaaaaagcggtgattcatcttaaacctgcggcatttaaaggttcgttaaaaacaatcgtagaaataatggggtttggctctccccagtttatcatgcacattgttatgtcggcagtgcaggttatcatcaataccagtctcggctggtacggctcggaagcgctgggggtcagcaatggcggggacatcgctctttcggggatgaatataatcggctcaatctcaatgctgatcctcatgcccgtgtttggcataaaccagggcgctcagccaatactgggctacaattacggggcgaagaaatttaaccgggtgctcagggcttatcttctcgcaatatccgctgctacatttgtttgccttattggttttatagtcgcccagtgtttcccactggctataatccgcatctttgttccggacggaagcgccgcgctttactctttcgcgccctgggctatgagggtagccctgttaatgctgccggtaaacggttttcaaattgtctcggccaatatgttcacagtaacaggccgcccgaaaatttccatcgttctgaatatgctaaggcaatgcattatttttattccctgccttatcctgtttggaaaaatctgggggctctggggcgtcgcggcggcagctcctgtggccgacggcttttcttttatctttaccgggactatgatcttctttgaattaagaaaacttagaaagcaatga

SEQ ID NO: 53488 - protein, 424 aa, Unknown
  Obtained from environmental sample
  DOMAIN (1)...(151): MatE
  misc_feature (1)..(424): Xaa is any amino acid
MVDRIFVGRGVNEIALGGLSLVAPLMSLAMAFAMLFGIGSANMISMRLGQGRKEEAENTLNHCVLLLVGSGILLTFVGLFFMDEILSVMGAQEGSLALDYSRRYFKIILYGSIPMQVGFGLSHCTRAQGFPTITMIAMFLGAGLNTILDPLFIFVFHWGVEGAAWATIISQAVSCIWILTFSFSKKAVIHLKPAAFKGSLKTIVEIMGFGSPQFIMHIVMSAVQVIINTSLGWYGSEALGVSNGGDIALSGMNIIGSISMLILMPVFGINQGAQPILGYNYGAKKFNRVLRAYLLAISAATFVCLIGFIVAQCFPLAIIRIFVPDGSAALYSFAPWAMRVALLMLPVNGFQIVSANMFTVTGRPKISIVLNMLRQCIIFIPCLILFGKIWGLWGVAAAAPVADGFSFIFTGTMIFFELRKLRKQ

SEQ ID NO: 53489 - DNA, 1008 bp, Unknown
  Obtained from environmental sample
  misc_feature (1)..(1008): n is a, c, g, or t
atgaatgttttaataataggcggcgcagggtatatcggcagccacgttgcacaggaatttcttgacaggggacacaatgtaacggtttatgacgatctttccagcgggttaaaggaaaatctttttcccgatgctgcctttgtttacggtacaatccttgattacccggcgctgctggcggcttgccgggggcaccagtcagccgcgtccggcgacgagccttttgatgccgttgttcaccttgcggcgtttaaggccgtgggcgaatcaatggtaaatccagaaaaatattcccttaacaatattggcggaacgataaacattctcaacgcaatgtccgaggctggaataaagcacatcattttttcttccagcgcggctatctttgggcagccccagtacctgcctgtcgatgaaaaacacccggtaaatcccgagagctactacggctttaccaagcttgaaatcgagcgctttatggaatggtacgacaggctaaagggcatacgctttgccagcctccgctactttaatgcggctggctacgatgtaaagggaagaatcgcagggctggaacagaacccgacaaatctgattccggtgatcatggaagttgccgtgggaatgcggaaagagctttcgatcttcgggaacgattacgatacgagggacggcacctgcatcagggactacatccatgtaagtgatcttgcagcggcgcacgcttcggctctggattacataatcaaaaacgacaggagcctgacagtcaaccttgggagcgaaaccggcaccactgtgctggaaattcttgaagccgcccggcgcattaccggcaggcacataccttcgcacattgccgcccgccgcagcggggatccggcttttcttacggcttcatcgaaacttgccagggagcttttaggctggaaggcggatcattccaacattgacactattatccaaagtacctgggaaatgtataaaataaccggcataagggcataa

SEQ ID NO: 53490 - protein, 335 aa, Unknown
  Obtained from environmental sample
  DOMAIN (3)...(236): Polysaccharide biosynthesis protein
  misc_feature (1)..(335): Xaa is any amino acid
MNVLIIGGAGYIGSHVAQEFLDRGHNVTVYDDLSSGLKENLFPDAAFVYGTILDYPALLAACRGHQSAASGDEPFDAVVHLAAFKAVGESMVNPEKYSLNNIGGTINILNAMSEAGIKHIIFSSSAAIFGQPQYLPVDEKHPVNPESYYGFTKLEIERFMEWYDRLKGIRFASLRYFNAAGYDVKGRIAGLEQNPTNLIPVIMEVAVGMRKELSIFGNDYDTRDGTCIRDYIHVSDLAAAHASALDYIIKNDRSLTVNLGSETGTTVLEILEAARRITGRHIPSHIAARRSGDPAFLTASSKLARELLGWKADHSNIDTIIQSTWEMYKITGIRA

SEQ ID NO: 53491 - DNA, 504 bp, Unknown
  Obtained from environmental sample
  misc_feature (1)..(504): n is a, c, g, or t
atgaaagaaagcttgaattttaaaaaaatgctgcaaatagcggcagcctccgatttgcctgttttgctaacgggtgagtctggcacgggcaaggagcttgcggctagggaattgcacgctcttggcaaaagaaataacagggcttttgttgcggtcaattgtggagccatttctgcgggcattgccgagtctcttttttgcgggcacgttaaaggtgcttttaccggagcaagcagcgatagggtgggttttgttagagcggccagcggcggcactctttttttagacgaggtggcggaactctccccagacattcaaaaaactcttttgcgaacattgcaagaaaagattgttatgcctgttggcagtcaaaaagagataatggtggattttaggcttatttgcgcaactcacagaaatttgccctctcttttgaaaaagggctttttaggcaggatttatattttaggcttgccgctttgcccgttaaaattccgcctttga

SEQ ID NO: 53492 - protein, 167 aa, Unknown
  Obtained from environmental sample
  DOMAIN (19)...(156): ATPase family associated with various cellular activities (AAA)
  misc_feature (1)..(167): Xaa is any amino acid
MKESLNFKKMLQIAAASDLPVLLTGESGTGKELAARELHALGKRNNRAFVAVNCGAISAGIAESLFCGHVKGAFTGASSDRVGFVRAASGGTLFLDEVAELSPDIQKTLLRTLQEKIVMPVGSQKEIMVDFRLICATHRNLPSLLKKGFLGRIYILGLPLCPLKFRL

SEQ ID NO: 53493 - DNA, 498 bp, Unknown
  Obtained from environmental sample
  misc_feature (1)..(498): n is a, c, g, or t
ttgcgcaactcacagaaatttgccctctcttttgaaaaagggctttttaggcaggatttatattttaggcttgccgctttgcccgttaaaattccgcctttgagggagcgaaacgacttgaggagcatagcacagtccctttggcgagggcaagaacctttggacgagcaccattttaagactttgcagagctatttatggcccgggaacataaggcagcttaaaaatgttttggagcgttacgcccttttaaaaaaacacggctataaactggaatccattataaaaacggagtttgagcaatgcaaattcagcttgcacgaaccgcctcctccaaaatacaaaccaaacatctgcgaaatcagcgaggaaatacggaattgcagcgggaacaagagccgcgccgcaaagaagctaggtatcagcagggggagtttgtattataggatgcgtccggggagtgaaacttcctccccaaaaacttngcgccttttataa

SEQ ID NO: 53494 - protein, 165 aa, Unknown
  Obtained from environmental sample
  DOMAIN (122)...(153): Bacterial regulatory protein, Fis family
  misc_feature (1)..(165): Xaa is any amino acid
MRNSQKFALSFEKGLFRQDLYFRLAALPVKIPPLRERNDLRSIAQSLWRGQEPLDEHHFKTLQSYLWPGNIRQLKNVLERYALLKKHGYKLESIIKTEFEQCKFSLHEPPPPKYKPNICEISEEIRNCSGNKSRAAKKLGISRGSLYYRMRPGSETSSPKTXRLL

SEQ ID NO: 53495 - DNA, 780 bp, Unknown
  Obtained from environmental sample
  misc_feature (1)..(780): n is a, c, g, or t
atgaaaatcaaagttatagttgccacccataaaccctaccaaatgccaaaagactccgtgtacttgcctttgcatgttggcaaggaagggaaaaaaagcatagattttgaaggagatgatacgggtgaaaatatatctgcgaaaaattgcaattattgcgagctaaccgggctttactgggcttggaaaaatttggcggatgcagacgcgataggtttagtgcattataggaggcattttgcaagccaagaaaacaggcgtggcaaaaaatgggatagaattttaactggcaaagagatagaaaaattgatgagtgaatacgatataattgtcccttgcaaaagaaattatttcatagagacaaatgaaagccaatatatccacgcacatccaaaagaggactgggagaatatgttatcccttgttaaagaacaatatccagaatattccacaagcctagacatgatgcgtaaaagcaccagtgggcataaattcaatatgcatataatgaagcaaaaagttatggacagttattgctcttggctttttcctcttttggaaaaaatagaggaaaaacaaattgaaaaatcccgtattttagggcatataagtgaacggatgttcgatgtttggctttacgcanacganaagaaatacaagtttaaagaaattccgattatgtttatggaaaagcagaattggcttataaaaggcgcnaagtttttggggaggaagtttcactccccggacgcatcctataatacaaactccccctgctga

SEQ ID NO: 53496 - protein, 259 aa, Unknown
  Obtained from environmental sample
  misc_feature (1)..(259): Xaa is any amino acid
MKIKVIVATHKPYQMPKDSVYLPLHVGKEGKKSIDFEGDDTGENISAKNCNYCELTGLYWAWKNLADADAIGLVHYRRHFASQENRRGKKWDRILTGKEIEKLMSEYDIIVPCKRNYFIETNESQYIHAHPKEDWENMLSLVKEQYPEYSTSLDMMRKSTSGHKFNMHIMKQKVMDSYCSWLFPLLEKIEEKQIEKSRILGHISERMFDVWLYAXXKKYKFKEIPIMFMEKQNWLIKGAKFLGRKFHSPDASYNTNSPC

SEQ ID NO: 53497 - DNA, 399 bp, Unknown
  Obtained from environmental sample
  misc_feature (1)..(399): n is a, c, g, or t
gtgagatgttgggttaagtcccgcaacgagcgcaacccgtgcccttggttgccaatatggctctccagggggactgccggggacaacccggaggaaggtgcggacgacgtcaagtcctcatggcccttacatcctgggctacacacgtgctacaatggggggcacagagggaagccaggccgcgaggccgagcggatcccgaaagcctcccccagttcggataggagtctgcaacccgactccttgaagccggaatcgctagtaatcgcggatcagcatgccgcggtgaatacgttcccgggccttgtacacaccgcccgtcaagccatgggaggggagagcgctccaagacgcgcagccaacccgcaagggagcgggcgtccaaagcgagatccctga

SEQ ID NO: 53498 - protein, 132 aa, Unknown
  Obtained from environmental sample
  misc_feature (1)..(132): Xaa is any amino acid
MRCWVKSRNERNPCPWLPIWLSRGTAGDNPEEGADDVKSSWPLHPGLHTCYNGGHRGKPGREAERIPKASPSSDRSLQPDSLKPESLVIADQHAAVNTFPGLVHTARQAMGGESAPRRAANPQGSGRPKRDP

SEQ ID NO: 53499 - DNA, 438 bp, Unknown
  Obtained from environmental sample
  misc_feature (1)..(438): n is a, c, g, or t
gtgtgtagcccaggatgtaagggccatgaggacttgacgtcgtccgcaccttcctccgggttgtccccggcagtccccctggagagccatattggcaaccaagggcacgggttgcgctcgttgcgggacttaacccaacatctcacgacacgagctgacgacagccatgcagcacctgtgcgggaagcccattgctgggcgcagccgtctccggctgcttcttccccatgtcaaaccctggtaaggttctgcgcgttgcgtcgaattaaaccacatgctccaccgcttgtgcgggcccccgtcaattcctttgagtttcacccttgcgggcgtactccccaggcggcgcgcttatcgcgttggctacggcacccaggggtaaaagcccccgagcgccaagcgcgcatcgtttacggcgcggactaccagggtatctaa

SEQ ID NO: 53500 - protein, 145 aa, Unknown
  Obtained from environmental sample
  misc_feature (1)..(145): Xaa is any amino acid
MCSPGCKGHEDLTSSAPSSGLSPAVPLESHIGNQGHGLRSLRDLTQHLTTRADDSHAAPVREAHCWAQPSPAASSPCQTLVRFCALRRIKPHAPPLVRAPVNSFEFHPCGRTPQAARLSRWLRHPGVKAPERQARIVYGADYQGI

SEQ ID NO: 53501 - DNA, 354 bp, Unknown
  Obtained from environmental sample
  misc_feature (1)..(354): n is a, c, g, or t
ttgctacccgcgctttcgagccgcagcgtcgatgattccccagctggccgccttcgcctccggtgttcttcccgatatctacgcattccaccgctccaccgggaattccgccagcctctggaacatccaagccccgcagtcccgagcgcaaggctggggttgggccccagcattgcacgcccggcttgcagggcagcctacgctccctttacgcccagtgattccgaacaacgctcgcacccctcgtattaccgcggctgctggcacgaagtttgccggtgcttcctctcagggtacgctcagcgcgaccgaaatcgcgctctgttcccccacgacagtggtttacacgcctag

SEQ ID NO: 53502 - protein, 117 aa, Unknown
  Obtained from environmental sample
  misc_feature (1)..(117): Xaa is any amino acid
MLPALSSRSVDDSPAGRLRLRCSSRYLRIPPLHREFRQPLEHPSPAVPSARLGLGPSIARPACRAAYAPFTPSDSEQRSHPSYYRGCWHEVCRCFLSGYAQRDRNRALFPHDSGLHA

SEQ ID NO: 53503 - DNA, 528 bp, Unknown
  Obtained from environmental sample
  misc_feature (1)..(528): n is a, c, g, or t
atgattccccagctggccgccttcgcctccggtgttcttcccgatatctacgcattccaccgctccaccgggaattccgccagcctctggaacatccaagccccgcagtcccgagcgcaaggctggggttgggccccagcattgcacgcccggcttgcagggcagcctacgctccctttacgcccagtgattccgaacaacgctcgcacccctcgtattaccgcggctgctggcacgaagtttgccggtgcttcctctcagggtacgctcagcgcgaccgaaatcgcgctctgttcccccacgacagtggtttacacgcctaggcgctccttcccacacgtggcgtcgctgcgtcaggcttccgcccattgcgcaatattccctgctgctgcctcccgtaggagtctgggccgtatctcagtcccaatgtggccgttcgccctctcaggccggctaccgatcgttggtttggtgggccgctaccccgccaactgcctaatcggacgcgaactcatcccccggcgataa

SEQ ID NO: 53504 - protein, 175 aa, Unknown
  Obtained from environmental sample
  misc_feature (1)..(175): Xaa is any amino acid
MIPQLAAFASGVLPDIYAFHRSTGNSASLWNIQAPQSRAQGWGWAPALHARLAGQPTLPLRPVIPNNARTPRITAAAGTKFAGASSQGTLSATEIALCSPTTVVYTPRRSFPHVASLRQASAHCAIFPAAASRRSLGRISVPMWPFALSGRLPIVGLVGRYPANCLIGRELIPRR

SEQ ID NO: 53505 - DNA, 774 bp, Unknown
  Obtained from environmental sample
  misc_feature (1)..(774): n is a, c, g, or t
ttgcaaaaaacaattcaggctatcaaggacgcgtacgaagccgtgcgcaaaaccgtggcggcgggaaaaacggtgctttttgtaggtacaaaaaaacaggcgcagcaggccgttcaaaaagaagccgaacgctgcggtatgttctatataaacagccgctggcttggcggtatgcttaccaattttgttacaattaaaaagtcgcttcttcgccttaaaaagctggaaaaaatggaagtggacggaactttcgaaaaccttaccaaaaaggaaatcgcgtcactcggcaaggaacggctcaaattacaaaaaaacctcggcggcataaaagaattaaaagaactgccgggaattcttttcattatcgacacgcgcaaggaagcaatcgcggtcgcagaagcgcagaggcagggaatcccaattgtcgcggttgtagacaccaactgtaacccggacggcattgactatccgatcccgggcaacgacgacgcaatcagggcgattaccctctttactcaaatcatcgcaaacgcggttgtagaagcggataacgaagtcggacttaaaataatcgaaacccttggcgacgaagacgaagatatggaaggcctgttaaacgacgcttccataaaagaagaagacaaggaaatcgatatcgaaaaatacacaacagaagaggcataccttgcggcaaaagccgacgaacaagtccctgaagatgacgacgacagtcatattcatgtagacgttgataaagtttataaggacgaataa

SEQ ID NO: 53506 - protein, 257 aa, Unknown
  Obtained from environmental sample
  DOMAIN (1)...(183): Ribosomal protein S2
  misc_feature (1)..(257): Xaa is any amino acid
MQKTIQAIKDAYEAVRKTVAAGKTVLFVGTKKQAQQAVQKEAERCGMFYINSRWLGGMLTNFVTIKKSLLRLKKLEKMEVDGTFENLTKKEIASLGKERLKLQKNLGGIKELKELPGILFIIDTRKEAIAVAEAQRQGIPIVAVVDTNCNPDGIDYPIPGNDDAIRAITLFTQIIANAVVEADNEVGLKIIETLGDEDEDMEGLLNDASIKEEDKEIDIEKYTTEEAYLAAKADEQVPEDDDDSHIHVDVDKVYKDE

SEQ ID NO: 53507 - DNA, 864 bp, Unknown
  Obtained from environmental sample
  misc_feature (1)..(864): n is a, c, g, or t
atggcggaaattagcgcagcggatgtaaaaaggcttcgggaaaaaaccggcgccggaatgatggaatgtaaaaacgcccttgttgacaacggcggcgattttgacaaagctgaaaaatcacttaaagaaaagggactggcggctcttgaaaaacgcgcgggacgggcaaccaacgaaggcaagatttttataaagataaaagacgacggttccgccgctgtaatggcggaactttcttccgaaacggattttgtcgcaagaaacccggacttcattaaattaggcggtgaaattacagccaaggcgctggaaaaaggaatcgggagtcccaacgacgagttaaacggcatggtaacggatcttgcgacaaaaatccgcgaaaacatgggccttaaacggctttgccttgtaaaagcgtcctccaatgaataccttacccagtacattcacggggacggcaatataggcattatcgtaaaatgcgaatccgacaagcctgaaattttcaaaaccgaagacgtaaaatcttttgtcttctctctcgccctgcacatagcggcgtttaacccgctcgcccttgacagaagtaaagttgatcagggcttcctcaaggaacaggaaggcattttcagcaaacagatggaacaggacgaaaaacttaagggcaaacccgaaaacgtgttaaaaggaattctgcagggcaaggtaaacaaatacctttcggagatttgccttcttgagcagggttatgtgaaagacgaaaaacttacggtagccaaagctatcgaagaatgcgccaaaaagatgagcgcgaaacttgcgataaacgattttgtttattacaaagtcggtacggcggagtaa

SEQ ID NO: 53508 - protein, 287 aa, Unknown
  Obtained from environmental sample
  DOMAIN (4)...(44): UBA/TS-N domain
  misc_feature (1)..(287): Xaa is any amino acid
MAEISAADVKRLREKTGAGMMECKNALVDNGGDFDKAEKSLKEKGLAALEKRAGRATNEGKIFIKIKDDGSAAVMAELSSETDFVARNPDFIKLGGEITAKALEKGIGSPNDELNGMVTDLATKIRENMGLKRLCLVKASSNEYLTQYIHGDGNIGIIVKCESDKPEIFKTEDVKSFVFSLALHIAAFNPLALDRSKVDQGFLKEQEGIFSKQMEQDEKLKGKPENVLKGILQGKVNKYLSEICLLEQGYVKDEKLTVAKAIEECAKKMSAKLAINDFVYYKVGTAE

SEQ ID NO: 53509 - DNA, 501 bp, Unknown
  Obtained from environmental sample
  misc_feature (1)..(501): n is a, c, g, or t
atgcttttgcgcttcaggggacagggaggggcttccgccgccctgtttgacaggattagagttgacgcttacggggaaaaatcaccccttaatcaggttgcgaatatatcaattcccgaagcgcgccttgtcgttattcaaccctgggataaaaatcttataacagagattgaaaaagcgattcgttcttcggaactgtcgttaaatccttcaaatgacggcaaggtaatccgcgtatcaattcctccgctgacggaagaaaggcgcaaagagcttgtcaagcttgcaaaaaatcaggcggaacagtcaagggtcgcaatccgcaacatccgcagggacggcaacgaagagttaaagaggcttttaaaggataaaaaggcaaaaattacggaagacgacgagagcaagggagaggaagaactgcaaaaacttacagataactacgtagggcaggtaaataaaatccttgaagagaaagaaaaagagataatggatgtataa

SEQ ID NO: 53510 - protein, 166 aa, Unknown
  Obtained from environmental sample
  DOMAIN (2)...(164): Ribosome recycling factor
  misc_feature (1)..(166): Xaa is any amino acid
MLLRFRGQGGASAALFDRIRVDAYGEKSPLNQVANISIPEARLVVIQPWDKNLITEIEKAIRSSELSLNPSNDGKVIRVSIPPLTEERRKELVKLAKNQAEQSRVAIRNIRRDGNEELKRLLKDKKAKITEDDESKGEEELQKLTDNYVGQVNKILEEKEKEIMDV

SEQ ID NO: 53511 - DNA, 336 bp, Unknown
  Obtained from environmental sample
  misc_feature (1)..(336): n is a, c, g, or t
atggaaatgacaaacgaaaagaaggtgatactaatagcctccgtttttttattaataatggttattattaccttttcttgtgcgaaagaaaaagacataataaactacgatttcaatacaaaaacagggatgctgccggtgtaccctgacgcttatttttccgtcataagcgacacgcatatttacgacgcctctcttggttcaagcggagcggcttttgaaagagcgatgaattccgaccgtaatttattactggacagtcaggctttacttgattacgcaattaatgaaattatcgcgtcagaagttaattttgttttaatttgcggagattaa

SEQ ID NO: 53512 - protein, 111 aa, Unknown
  Obtained from environmental sample
  SIGNAL (1)...(28)
  misc_feature (1)..(111): Xaa is any amino acid
MEMTNEKKVILIASVFLLIMVIITFSCAKEKDIINYDFNTKTGMLPVYPDAYFSVISDTHIYDASLGSSGAAFERAMNSDRNLLLDSQALLDYAINEIIASEVNFVLICGD

SEQ ID NO: 53513 - DNA, 321 bp, Unknown
  Obtained from environmental sample
  misc_feature (1)..(321): n is a, c, g, or t
atgatagggagagggaaacagaacactgaaataattatagaacgactcaaattaatgggggatttgggaaaagcagcacagctatgtgcaagcttaaaattcgaaggattttctgattggtttttaccaagcaaagaagagttagcgttaatgtataaaattttaaaacgaaataacttaggtaatttttctagtgacaggtattggtcatcaacgcaattcagtaaagatcaagcgtattatatagattttagaaacggcaaagataatatgagtcataaggaacaagttcgtaacattcgcgctatacgtgctttttag

SEQ ID NO: 53514 - protein, 106 aa, Unknown
  Obtained from environmental sample
  misc_feature (1)..(106): Xaa is any amino acid
MIGRGKQNTEIIIERLKLMGDLGKAAQLCASLKFEGFSDWFLPSKEELALMYKILKRNNLGNFSSDRYWSSTQFSKDQAYYIDFRNGKDNMSHKEQVRNIRAIRAF

SEQ ID NO: 53515 - DNA, 417 bp, Unknown
  Obtained from environmental sample
  misc_feature (1)..(417): n is a, c, g, or t
atggtcgatttatttaattttgaggttcattctctcagacggcttttttcttcagagaaagtacaggcggttaccgttagtcttgaagacggtgaaatcggcatattggcgcaccattcccctttatctgcgcacactgttacaggttctctgcgcattaaagacgagaaaggcaactggcgtgtcgcatttgtttgcggcggcattttggaagtaaaagaacataaaaccgtactgatggttgaaaccgccgaatggcccgaagaaataaatgttgaacaagttcttgaaattaaaaggcaagctgaagaaatattagaagatacacgtttaaggtttgagactgaaagagcaaaaaaaagattacatcatgttgaatgcaaacttaaagttttagagacgatgaaaaagggatag

SEQ ID NO: 53516 - protein, 138 aa, Unknown
  Obtained from environmental sample
  DOMAIN (4)...(86): ATP synthase, Delta/Epsilon chain, beta-sandwich domain
  misc_feature (1)..(138): Xaa is any amino acid
MVDLFNFEVHSLRRLFSSEKVQAVTVSLEDGEIGILAHHSPLSAHTVTGSLRIKDEKGNWRVAFVCGGILEVKEHKTVLMVETAEWPEEINVEQVLEIKRQAEEILEDTRLRFETERAKKRLHHVECKLKVLETMKKG

SEQ ID NO: 53517 - DNA, 1134 bp, Unknown
  Obtained from environmental sample
  misc_feature (1)..(1134): n is a, c, g, or t
ttggccgagaatacgggcccgggagatttcgtttccggacacttccacagggaaggcaaagttaccgtgatggtgcaaattcccaatgaaaataccaccttcaacgaactgagaaatgaaatagggcttatggcgaatatacaagatgttttgtttgccatacaaaccaataataaaagcgtaggaacaacctatgtcggcactgaatacggcgttacagtttgcgccgatcctgattcggcgcggaaaactccttattttgatccgagaacgcgcgtgtggtatcaacgtgcaaagcaggccggcggccttatatggacagatgtgttcgaggactatctcggcagagggctggctataacctgcgcgaagcctttttatgacgccggcgggaaaatagccggcgtcgccggtatgggtatgtttctggttgttcttaaagaagaggtggttggaacaaaaatcggcgaaaccggttatgcctttattattaatgagaaaggggagatgattatctccgacagcataaaaaaagacgagaacggaaaaataatacgggagaatatccttgacagccataccttcccgcaggaaacggcgcataagatgataaacggagaaaacggtattgcgcatgttttcatggacggaaaagaaaaactcatcgcttatcacggattaactaccgtaccctggagccttgccgtcgtcattgattcggaagaagttatctcgcccgcgcttacgctggagaataatattattaatttaaaaaaatcagcgctcgcgaccgttaaccgcgatattattttgattgccgcgcttgtgggaataataattattttcattcttgccggagtcatgctttttacggggcggcttgcaaaggacattaccgggccaatccaaaaattatcttcggacgcggcgcagataggcgccggggatttagagcatgttttagatattaatacaggcgacgagttggagttattggcaaattcttttaattcgatgattgccggcatanaatcaattaccgccgaaaaagaacgcgttgaaatcgcgaatctggaaaaaacgcgcgaagcggaaatattcaggaagcgaatcagcttaaaagccgttttttag

SEQ ID NO: 53518 - protein, 377 aa, Unknown
  Obtained from environmental sample
  DOMAIN (106)...(186): Cache domain
  misc_feature (1)..(377): Xaa is any amino acid
MAENTGPGDFVSGHFHREGKVTVMVQIPNENTTFNELRNEIGLMANIQDVLFAIQTNNKSVGTTYVGTEYGVTVCADPDSARKTPYFDPRTRVWYQRAKQAGGLIWTDVFEDYLGRGLAITCAKPFYDAGGKIAGVAGMGMFLVVLKEEVVGTKIGETGYAFIINEKGEMIISDSIKKDENGKIIRENILDSHTFPQETAHKMINGENGIAHVFMDGKEKLIAYHGLTTVPWSLAVVIDSEEVISPALTLENNIINLKKSALATVNRDIILIAALVGIIIIFILAGVMLFTGRLAKDITGPIQKLSSDAAQIGAGDLEHVLDINTGDELELLANSFNSMIAGIXSITAEKERVEIANLEKTREAEIFRKRISLKAVF

SEQ ID NO: 53519 - DNA, 531 bp, Unknown
  Obtained from environmental sample
  misc_feature (1)..(531): n is a, c, g, or t
ttggcaaaataccgaccgttctttaaaggaaagcgcgttgtcataagcgcgggagagttcagagcgttggcgacttccaatctgctgtacgacttgggttttgatatagttggaatacgttccttccaccatgacgaattcgcaaatgtggaatacgaaaaattaataaaaaacataggcggcggcgttgcgattaatatcgctaacgtacagcaatttgaagaagcgaatcttttgaacacgataaagcccgatcttttcctgggacactggaacggcaactctaccgcgtcaaagatgggcataccctctcatgtaatttacaacacagggcttgcatacatcgggtatcgcggcgtgtttgaactggcgcggcggctgtatcgtcaaatgtcaaatcccgcctttaacaaagctttaagtaagtataccaagctgccctacaagaaagattggtacggcaagaatccgtacagctacattaaatcgaatcttgatattcccgcggattacaaggagggaaaaaaatga

SEQ ID NO: 53520 - protein, 176 aa, Unknown
  Obtained from environmental sample
  misc_feature (1)..(176): Xaa is any amino acid
MAKYRPFFKGKRVVISAGEFRALATSNLLYDLGFDIVGIRSFHHDEFANVEYEKLIKNIGGGVAINIANVQQFEEANLLNTIKPDLFLGHWNGNSTASKMGIPSHVIYNTGLAYIGYRGVFELARRLYRQMSNPAFNKALSKYTKLPYKKDWYGKNPYSYIKSNLDIPADYKEGKK

SEQ ID NO: 53521 - DNA, 1347 bp, Unknown
  Obtained from environmental sample
  misc_feature (1)..(1347): n is a, c, g, or t
ttgacccggggcagtaagggacagaatacctactatctttcccaaaacaaggacatgacccgccagtttatcgcggactgtaaattctgggcggggattgtcaacatagccgccggcgaattaaaagaagaaattgtcaaagaaaacggcaaggaattcacggtttaccggataacgtttttaaacggcaaagaaattgtcggactgcccagcgtgccgtacgcgatacggagcaagcaggggcgcgtcattctggatgaggcggcgtttaccgatgactttgaagaaatcaaaaaggcggccctggccctgttaatttggggcggttcgttctcaataatatcgacgcataacggcgatgacagcgcgttttacttttttctgaaagaaatccgcgacggcaaagagacaaagtggagcgtccaccggactacttttaacgaagcgatacggcagggcttgtataaacaaatttgtcttgttaaaggaattaaatggtctaaaaagggcgaggcggaatttgtcaaggaaatacgcaacatttacaagtcaaaggccgaagaggaacttgacgttattccatcccgctccggttcaaaatatttcccctacgggatgctcgccgcctgcgcggtcaacgccgtaaaactgccgattatccggctcgattgtgaagacggcttcatgtgggaagccccggaaaaacggcagaagatggttcacgaatggtttggaattgaggttgcgccgctattgcaaaaaataagcaatccctgttatctcggccaggacttcgcgcgcagcgggaacctgtcggtgctgtggatcggcgaggagcggaccaagcaaaacctggacagccggctcattatcgaactcaacaacgtaccctatgaccagcaatggcagatcctctggctgataagtaaaaactgcaacctgggatacgcggcgatagacagccgtggcaacggccaggcgctggcggaagcggcggcgcagcggctgccctgcggcgctgaaatggtgatgattacccgcgcatggtacgcggggattttccagcggcttaaaagttgtttcgagagccgggagtttatcgttcccgatgactcgtttatactttccgacttcgggattatcacgctgaaaaacggccagccggtcgtgccgaatgaagagagtaccgaccgggcgggcgcggcaaatagccgtgcaaagcgccacggtgacggcgcggtcgccgcggcaatgtgtttgtacgcatgggaagagggtagcgcgtcggccccgcctgtagccgccttcaccggttcgcgcggtgatagtatattccacgggtactga

SEQ ID NO: 53522 - protein, 448 aa, Unknown
  Obtained from environmental sample
  misc_feature (1)..(448): Xaa is any amino acid
MTRGSKGQNTYYLSQNKDMTRQFIADCKFWAGIVNIAAGELKEEIVKENGKEFTVYRITFLNGKEIVGLPSVPYAIRSKQGRVILDEAAFTDDFEEIKKAALALLIWGGSFSIISTHNGDDSAFYFFLKEIRDGKETKWSVHRTTFNEAIRQGLYKQICLVKGIKWSKKGEAEFVKEIRNIYKSKAEEELDVIPSRSGSKYFPYGMLAACAVNAVKLPIIRLDCEDGFMWEAPEKRQKMVHEWFGIEVAPLLQKISNPCYLGQDFARSGNLSVLWIGEERTKQNLDSRLIIELNNVPYDQQWQILWLISKNCNLGYAAIDSRGNGQALAEAAAQRLPCGAEMVMITRAWYAGIFQRLKSCFESREFIVPDDSFILSDFGIITLKNGQPVVPNEESTDRAGAANSRAKRHGDGAVAAAMCLYAWEEGSASAPPVAAFTGSRGDSIFHGY

SEQ ID NO: 53523 - DNA, 933 bp, Unknown
  Obtained from environmental sample
  misc_feature (1)..(933): n is a, c, g, or t
atgaaaaagaaaatattaatacttattgacctattcttcttaacccgtccggtagtcgtcgtaccggtatggggcttctgcgctttcggcgtctacgccgggtcaggcggcaggatccttacgcgtctcgaaccgtcacaatatttactgatacttctatactcgctctctcccgcctgcgtctacgttttgaaccagatcgccgattacgaggtagacgcccgcaacggcgggtttccgctactggtgcggggcggcatcccgacggcggcggcgtgggtttgcgcggcggtatgcggatcggcgtcggtcgtcgggccgttgctcatgggccgcgcttcggtatccgtactctcgttgatagctatagtcttaggatacgtctacagtttcaagcctttctccctctccggccggccgttctgcgatttcctgacgaacgcgattgaggcctctttggcgtttttcgcgggttgggcggcggtaggcggagagatttcgccaagccgcctttgcgccgccgccctgccctactttctgctgatgtgcgccggctcgataagttcgacgctgccggacatagccggcgacaaggagtgcgggaaaatcacaacggccgtgcgtttcggcccgatagcggcgcaccgcatagcgctagccatactcgccgcaacagtactcacatctatatttccatacgtagacctgttagccctagcctgcgccgccgccgccataccaacgtatgttccatatatagtcaagcccaaaaaagaatatatggagctaacctataaagtaggcggagcggcgacaatgatagcggcgtcgttagccttacctatgttattgccggcgggaatactgatattcgcggcgacgaagatatactttagggttaggcacggggtgtcttatccgtcattaaattaa

SEQ ID NO: 53524 - protein, 310 aa, Unknown
  Obtained from environmental sample
  SIGNAL (1)...(20)
  DOMAIN (20)...(284): UbiA prenyltransferase family
  misc_feature (1)..(310): Xaa is any amino acid
MKKKILILIDLFFLTRPVVVVPVWGFCAFGVYAGSGGRILTRLEPSQYLLILLYSLSPACVYVLNQIADYEVDARNGGFPLLVRGGIPTAAAWVCAAVCGSASVVGPLLMGRASVSVLSLIAIVLGYVYSFKPFSLSGRPFCDFLTNAIEASLAFFAGWAAVGGEISPSRLCAAALPYFLLMCAGSISSTLPDIAGDKECGKITTAVRFGPIAAHRIALAILAATVLTSIFPYVDLLALACAAAAIPTYVPYIVKPKKEYMELTYKVGGAATMIAASLALPMLLPAGILIFAATKIYFRVRHGVSYPSLN

SEQ ID NO: 53525 - DNA, 816 bp, Unknown
  Obtained from environmental sample
  misc_feature (1)..(816): n is a, c, g, or t
atggacgaaatagcntacggtctgaccgaccntaaggcgtacgttgaagcgatcaaaagcatgggcgggataggctttctggcgcaccccgccgagaagcgcaatcacataaagagcctgcccccgtatccctggacgcggtgggatgtcgagggttttgacggcatagagttgtggaaccagatatcggattggatggaacggttgcgcggctggcacagcctgacgcggctcttctctccgaacaaaaaaatcggcaacgccccgccggaactcatggagcggtgggacgccctgaaccggcaaagattcgtaagcgccataggcggcgtggacgcgcacagccgcaagttcaaacgcggccccttctcctgcgtggtgttccccatagaggtggaactgcgcggcatacggatgcacctattcgtcgacgagatggattggtacaacgcgtcaaaggcgggcggcacgcttatatccgccctgcgcgacggacggggcttcatgagcaacttcagcagaggggacgcgcgcgggagtcaaatactgctgacggacaaaaccggcgcggcacgttacccgggacgcgttgaaccgatcggctcacccccgtctttccccatgaaaataagggtcgggctaccccgcaaggcgaagatagtattgatacgcaacgggcaaccgatacaatcaacaaccgcaaagaacgccgaatgggagatctctgacaccggtgtctaccgtgtagaggcatacagaggttccagcccgtggatatactcaaatccgtttcctgtgggcgagtatccgttctga

SEQ ID NO: 53526 - protein, 271 aa, Unknown
  Obtained from environmental sample
  misc_feature (1)..(271): Xaa is any amino acid
MDEIAYGLTDXKAYVEAIKSMGGIGFLAHPAEKRNHIKSLPPYPWTRWDVEGFDGIELWNQISDWMERLRGWHSLTRLFSPNKKIGNAPPELMERWDALNRQRFVSAIGGVDAHSRKFKRGPFSCVVFPIEVELRGIRMHLFVDEMDWYNASKAGGTLISALRDGRGFMSNFSRGDARGSQILLTDKTGAARYPGRVEPIGSPPSFPMKIRVGLPRKAKIVLIRNGQPIQSTTAKNAEWEISDTGVYRVEAYRGSSPWIYSNPFPVGEYPF

SEQ ID NO: 53527 - DNA, 417 bp, Unknown
  Obtained from environmental sample
  misc_feature (1)..(417): n is a, c, g, or t
ttgccagaatattctagcttatccctaaataataatttatcaaaactacggaggacaaaaatggcgactatgaaagcgtcaggggcaattatcaggatccttgagatagaaggtatcacggcggcctttggtatccctggggccggtattaacggcctgtataaattcctggggcaaagcaaggttattaagcatttctgccaccgtcacgaagaagcagcggttcacgccgcaggcggttacttccgggccagcggaaaaatcgcagcggcgatttgcacatcagggccgggcgctaccaattttgttaccggcgttttatcctgcaacatagacagtattcctgtaattgccattacgggacaggccgtatgcgcccagttgggcaaggatgcttttcatgcgtggacatcgtga

SEQ ID NO: 53528 - protein, 138 aa, Unknown
  Obtained from environmental sample
  DOMAIN (24)...(136): Thiamine pyrophosphate enzyme, N-terminal TPP binding domain
  misc_feature (1)..(138): Xaa is any amino acid
MPEYSSLSLNNNLSKLRRTKMATMKASGAIIRILEIEGITAAFGIPGAGINGLYKFLGQSKVIKHFCHRHEEAAVHAAGGYFRASGKIAAAICTSGPGATNFVTGVLSCNIDSIPVIAITGQAVCAQLGKDAFHAWTS

SEQ ID NO: 53529 - DNA, 879 bp, Unknown
  Obtained from environmental sample
  misc_feature (1)..(879): n is a, c, g, or t
atgatatggctcatcggcaacaagggtatgctgggaacagaactctcccttcttctggaaaaatccggctattcattcattggaactgattgtgaaattgacattactaatcctaccgctcttgaggattttatccgaactcagcaaaataaaaagcagcctattaactggataataaactgcgccgcctatacggctgtagacaaagccgaagacgagattgaaaaatgcggaaaactaaacacaacgggcgcaggtaacattgcttcttgcgcaaaaagcattgatgcaaaattgatacatatttctacggattatgtttttaacgggcaaggaaacaggccatacacagaagaagacgctaccgatcctataggcgtttatggactgacaaaaagggacggagaagataaagtcttagaagaaaataaaaatacntacataattcgtaccgcatggctttacggcaagcatggcaataattttgtgcataccatgctccggctgatgaatgagcgggacgaaattaaggtagtgaatgaccagcggggcagccccacctggacttttgatctggcttctacggtagtggcttttatcaagtttgttgattcaggtaaaaatattccttttggtatatatcattataccaatgagggaaacattacatggtttgattttgccaaagaaattttcagacagggaaaagagcagggcagaataacaaaagactgcgccgttaacccctgtaccagcgccgaatatccggcaaaagttaaacgccctgcctattcagttctggacaaaagtaaaataaaaaccgcgcttggaattaaaattcctgcgtgggatgaaagtttaagagagtttttaaagtag

SEQ ID NO: 53530 - protein, 292 aa, Unknown
  Obtained from environmental sample
  DOMAIN (2)...(212): NAD dependent epimerase/dehydratase family
  misc_feature (1)..(292): Xaa is any amino acid
MIWLIGNKGMLGTELSLLLEKSGYSFIGTDCEIDITNPTALEDFIRTQQNKKQPINWIINCAAYTAVDKAEDEIEKCGKLNTTGAGNIASCAKSIDAKLIHISTDYVFNGQGNRPYTEEDATDPIGVYGLTKRDGEDKVLEENKNTYIIRTAWLYGKHGNNFVHTMLRLMNERDEIKVVNDQRGSPTWTFDLASTVVAFIKFVDSGKNIPFGIYHYTNEGNITWFDFAKEIFRQGKEQGRITKDCAVNPCTSAEYPAKVKRPAYSVLDKSKIKTALGIKIPAWDESLREFLK

SEQ ID NO: 53531 - DNA, 525 bp, Unknown
  Obtained from environmental sample
  misc_feature (1)..(525): n is a, c, g, or t
atgtcagattcggagagcgaagtttttggagatacgcgaggttatttttttgagtgttattccgagcgtgattttcacgctaaaggaatttcgcttccttttgtacaggataaccaatcaaagtcaggcaaaggtacgctccgtggtttgcattttcagaaaacccaccctcagggaaaattggtcagagccatacaaggtgaagtatttgatgttgctgtagatatacgtcccgactcaccaactagaggtaaatggcacggggttattttaaatagtgaaaaacaaaaccaattttatatttcgccgggatttgcccatggttttttagcgttatcagaacaagttatctttgcctacaaatgcaccgatttttattatcccgaagatgaaggcggcattatttggaatgatcccgatatcggtattaaatggccggacttaagtgtagaatatatattatctgataaagataaaaaacaaccatttttttcatcactattaactgacggtaaaaaacaatga

SEQ ID NO: 53532 - protein, 174 aa, Unknown
  Obtained from environmental sample
  DOMAIN (4)...(167): dTDP-4-dehydrorhamnose 3,5-epimerase
  misc_feature (1)..(174): Xaa is any amino acid
MSDSESEVFGDTRGYFFECYSERDFHAKGISLPFVQDNQSKSGKGTLRGLHFQKTHPQGKLVRAIQGEVFDVAVDIRPDSPTRGKWHGVILNSEKQNQFYISPGFAHGFLALSEQVIFAYKCTDFYYPEDEGGIIWNDPDIGIKWPDLSVEYILSDKDKKQPFFSSLLTDGKKQ

SEQ ID NO: 53533 - DNA, 933 bp, Unknown
  Obtained from environmental sample
  misc_feature (1)..(933): n is a, c, g, or t
atggattacgatacgattgtcatcggcggcggacacgcgggaatagaagcgtccctcgctgtcagccgcctcggtttttcgaccctcctcatcacgcaaaacccggacaggatagggacgctctcctgcaaccccgcgattggcggcctttcaaaaggcaaccttgtaagggaagtggacgctctcggcggagagatgggaaagctgacggactcgacaatgatccagtaccgcgtgcttaaccgttcgcgggggcccgcggtacaagctccgagagcgcaggcggacaaacacgcttatcccgcggcggcgcggtcaattcttgagaagcagaaaaatctgacgattttcatggacacagttacggatttaattattgatgtaagagacgcttccatttcgaaaatcgcgggagtaattacaaagcgcggtcatcgtatatcggcgcgtaccgtgattcttgccgcgggaacttttatggaagggaaaatatttatcggggagtatgacgcgcctaacggacggcttggtgaagaagcggcgttaggtcttggcgcgtctttgcgccgcttagggttcccgactggaaggcttaaaaccggcactccggcgcggttggcgggaaacacgattgattattccgctatggaaaaacaggacagcgaggaaatgcgcccgttctctttttttgccaacgacaacattgtcgccaacagaccggccatgccttgctgggtcacatacacaaacacaaagacgcatganatcatcagggcaaatatcagccgctctccgttgtacggcggaaaaataacagggacgggggcgcgttactgtccctcaatcgaagacaaggtcatgcgcttttcgcacagggagcgtcatcatgtttttattgagccggaagggcttgcacccacgagatgtacatga

SEQ ID NO: 53534 - protein, 310 aa, Unknown
  Obtained from environmental sample
  DOMAIN (4)...(309): Glucose inhibited division protein A
  misc_feature (1)..(310): Xaa is any amino acid
MDYDTIVIGGGHAGIEASLAVSRLGFSTLLITQNPDRIGTLSCNPAIGGLSKGNLVREVDALGGEMGKLTDSTMIQYRVLNRSRGPAVQAPRAQADKHAYPAAARSILEKQKNLTIFMDTVTDLIIDVRDASISKIAGVITKRGHRISARTVILAAGTFMEGKIFIGEYDAPNGRLGEEAALGLGASLRRLGFPTGRLKTGTPARLAGNTIDYSAMEKQDSEEMRPFSFFANDNIVANRPAMPCWVTYTNTKTHXIIRANISRSPLYGGKITGTGARYCPSIEDKVMRFSHRERHHVFIEPEGLAPTRCT

SEQ ID NO: 53535 - DNA, 819 bp, Unknown
  Obtained from environmental sample
  misc_feature (1)..(819): n is a, c, g, or t
atgtacatgacgggcgcgtcaagttccctgcccgaagacgtgcagagcgattttattcacagcatcaaaggcttagagaaggcgcacatagtccgccccggctacgcggtggagtacgattacattgacccactcgatctttttccatcactggagtcaaagcgcctgtccggttttttcaccgcgggtcagaccaacggatcttccggttacgaagaagccgccgcccagggaataatcgcgggaatcaacgcggcgatgaaaatgcagggaaagcagtcctttatcctcggcagagccgaagcctacatcggcgttctggtagacgatcttaccactcttggaacaaaggaaccgtaccgtatgttcaccagccgagccgaacaccgtttaatgctgcgccacgacacagccgacacaaggcttactcccaaagggcgcgaagccggccttgtagacgacgcccgctgggaacgctttttggaaaagacaagaaagctggacgaaatcaaagaacttctcgcccggcgaaaagcggacgaagtttcagctaacgcgcttacgggcaaggagtttgcaagcaaaacgcttgccgactatcccgcggaactggtggaacgcaccctcctggacaaaaagtacgcgggctacattgagaaggaaatccgttttgcagagaaagcagccaaaatggacgctatcaaacttaatcccaatacggactactccgccatcagcggcctgtcctccgaggcaaaagagaaactccaatccgtgaaacccctcaatgtgggacaagcggcgcgaatccccggctaa

SEQ ID NO: 53536 - protein, 272 aa, Unknown
  Obtained from environmental sample
  DOMAIN (1)...(93): Glucose inhibited division protein A
  misc_feature (1)..(272): Xaa is any amino acid
MYMTGASSSLPEDVQSDFIHSIKGLEKAHIVRPGYAVEYDYIDPLDLFPSLESKRLSGFFTAGQTNGSSGYEEAAAQGIIAGINAAMKMQGKQSFILGRAEAYIGVLVDDLTTLGTKEPYRMFTSRAEHRLMLRHDTADTRLTPKGREAGLVDDARWERFLEKTRKLDEIKELLARRKADEVSANALTGKEFASKTLADYPAELVERTLLDKKYAGYIEKEIRFAEKAAKMDAIKLNPNTDYSAISGLSSEAKEKLQSVKPLNVGQAARIPG

SEQ ID NO: 53537 - DNA, 561 bp, Unknown
  Obtained from environmental sample
  misc_feature (1)..(561): n is a, c, g, or t
atgcaaagcgtcatttccgcccacgaagaaaagatgaaaaaatcggtggcaagtcttaaagaaggatttgcctctttaagaacagggcgggcttccgccgcgctgtttgacaggctgcgggtagactgttacggcgaaaaatcacccttgaatcaggtggcgaatatttccgtgcccgaagcccgcctaatcgtcattcaaccgtgggataaaagccttataggggaaattgaaaaggcaatacgctcttccgaactttcccttaacccgtcaaacgacggcaaagtaatacgcatctccatccctccccttacggaggagcgcagaanagaacttgtcaaactcgcgaaaaatcaagcggaacaatcaagggtctccatacgcaacatacgcagggacggtaacgaagagttaaagaggcttttaaaggataaaaaggcaaagattacggaagacgacgaaagcaagggagtggaagaactgcaaaagcttaccgacaactatgttgggcaggtaaataaaatccttgaagaaaaagaaaaagagattatggacgtataa

SEQ ID NO: 53538 - protein, 186 aa, Unknown
  Obtained from environmental sample
  DOMAIN (18)...(184): Ribosome recycling factor
  misc_feature (1)..(186): Xaa is any amino acid
MQSVISAHEEKMKKSVASLKEGFASLRTGRASAALFDRLRVDCYGEKSPLNQVANISVPEARLIVIQPWDKSLIGEIEKAIRSSELSLNPSNDGKVIRISIPPLTEERRXELVKLAKNQAEQSRVSIRNIRRDGNEELKRLLKDKKAKITEDDESKGVEELQKLTDNYVGQVNKILEEKEKEIMDV

SEQ ID NO: 53539 - DNA, 726 bp, Unknown
  Obtained from environmental sample
  misc_feature (1)..(726): n is a, c, g, or t
atggataaaagtatccctgctcatgtgggcattatcatggatggaaacggccgttgggcgaaaagccgtggtcttgtccgcacgcagggacaccttgaagggttaaaaacggcaaaacgtattgtaaaagccgcaagcgatttaggcataaaatatttaactctttacgcgttttcgactgaaaactggaaacgcacgtccgaagaagtcggttttataatgggattaataaaacagtatttgcgggtggagtttgatttcagcaaacagaacaaaatccgcgtccgtcacgccggggatttcgctggattgccaccggatattcaaaaagaactgtccgattctatggcggacaccgcgagttttgaaggaatgcaggttattcttgcgattaattacggcggcagggacgagattgtaagggcgttacgcaaacttgccaaagaacggttttccggcaaatcagacgcggacagtgataacgcggcaaacataagcgaagacgatattcgcggctttcttgacaacccagatgtgcctgatccagatttaataatccgaagcgcgggtgaatataggacaagtaattttttattgtgggaaggggcatattcggaattgtacatatcgcaaaaactttggcctgattgggacaaagaggatttggaagaagcaatttcggattatcaaaacagggacaggcgttttggcggggtaaaaacatga

SEQ ID NO: 53540 - protein, 241 aa, Unknown
  Obtained from environmental sample
  DOMAIN (12)...(238): Putative undecaprenyl diphosphate synthase
  misc_feature (1)..(241): Xaa is any amino acid
MDKSIPAHVGIIMDGNGRWAKSRGLVRTQGHLEGLKTAKRIVKAASDLGIKYLTLYAFSTENWKRTSEEVGFIMGLIKQYLRVEFDFSKQNKIRVRHAGDFAGLPPDIQKELSDSMADTASFEGMQVILAINYGGRDEIVRALRKLAKERFSGKSDADSDNAANISEDDIRGFLDNPDVPDPDLIIRSAGEYRTSNFLLWEGAYSELYISQKLWPDWDKEDLEEAISDYQNRDRRFGGVKT

SEQ ID NO: 53541 - DNA, 447 bp, Unknown
  Obtained from environmental sample
  misc_feature (1)..(447): n is a, c, g, or t
gtggggcgtatggacatggtggaaaaccgtttcgtgggcatgaattcccacggcgtgtatgaaacgccgggtggaaccatcattcgcgcggcgcatcgcgatctggaaggcatctgcatggatcgtgaggtcatgcgcatccgcgacaccctcgcccccagctatgccgccgccgtgtacaacggctactggttcgctccggagcgctacgccatgcaagcctttatggacgaggcccagaagtggatcagcggcacagtgcgcgtcaaggtcttcaagggcggcgtgtggcctgtcgggcgcagttcccccaataccttgtatcaccatgatctggcgacctttgaagaagccgcctttgatcagaaagacgcgaaggggttcatccagcttaattctttgcggctcaaggtcttcggggcgatgcggcgtcgcgcgggttcctga

SEQ ID NO: 53542 - protein, 148 aa, Unknown
  Obtained from environmental sample
  DOMAIN (1)...(142): Arginosuccinate synthase
  misc_feature (1)..(148): Xaa is any amino acid
MGRMDMVENRFVGMNSHGVYETPGGTIIRAAHRDLEGICMDREVMRIRDTLAPSYAAAVYNGYWFAPERYAMQAFMDEAQKWISGTVRVKVFKGGVWPVGRSSPNTLYHHDLATFEEAAFDQKDAKGFIQLNSLRLKVFGAMRRRAGS

SEQ ID NO: 53543 - DNA, 1518 bp, Unknown
  Obtained from environmental sample
  misc_feature (1)..(1518): n is a, c, g, or t
atggattatctgattgagttatgcggtattaccaaagagtttcccggcataatagccaatgatgatattaccctccagctcaaaaagggggagattcacgccctgttaggagaaaacggggcgggaaaatctacccttatgagcatccttttcgggctgtaccaggcagaaaagggagtaataaagaagaacggcgagacagtccgcatccacgggccgaatgacgcgacacgactcggcatcggcatggttcaccagcatttcaagctggtgcacaattttaccgttctggaaaacatcatcctgggggtggagacgaccaaaaacggccttttgaagctggacaatgcccgcaggcaggtcattgatttatccaaacgctacaagctggagatcaatcccgacgcgttcatctctgacattaccgtagggatgcagcaacgggttgagatcctcaagatgctgtaccgggaaaatgaaatcctaattttcgacgagccgacggcggtactaaccccccaggaaattgacgaactgatgcatatcatgaaaaacctggtggcggaaggcaagtctatcctgtttattacccacaagctgaacgaaataaaggccgtcgccgaccgctgtacggttctgcgaaagggcaggtgcatcgggactgtcgatgtggcttccgccacaaaagaaaccctgtctgaaatgatggtgggaaggaaagtaaacctgtccgtggacaaagcggatcaggagccgggagatactatcctccgggtggaaaaccttaccgtaaacaggaagaaccatggcaagcctctggtgaacaacgtgaattttgaagtccgcgccggggagattgtctgcattgccggcattgacgggaacggccagcaggaactggtctatgccctgaccgggatgattccccatgacggaggacgcatttaccttggagggaaagaaataacccatgacaatatcaggcacaggggaatgtcccatatacccgaagaccggcaccggcacggcctggtgctggactataaccttgcctataacatggttttacagagttatttcttcccccgtttccagaacaggggcttcttaaaattcttcgagatttataattacgcggattcgctcattgaacgttttgacatacgcgccggacagggcccgcagaccatagcgcggagtatgtcggggggcaaccagcaaaaggcaatcgtcgcaagggaaatcgaccggagtttcccgctgcttatcgcggtacagccgacgcgggggcttgatgtgggagccattgaatacattcaccaacagcttgtcgcggagcgcaccaacgggagaggggtgctgttgatctctctggagcttgacgaggttatggacgtgagcgaccgaatcctcgtcatgtacgaggggggcatagtcgccaatgtcaagccgaaagaggtaagctttcaggaactggggctctatatgtcaggttcaaaaaaacgagaggttgcatga

SEQ ID NO: 53544 - protein, 505 aa, Unknown
  Obtained from environmental sample
  DOMAIN (284)...(476): ABC transporter
  misc_feature (1)..(505): Xaa is any amino acid
MDYLIELCGITKEFPGIIANDDITLQLKKGEIHALLGENGAGKSTLMSILFGLYQAEKGVIKKNGETVRIHGPNDATRLGIGMVHQHFKLVHNFTVLENIILGVETTKNGLLKLDNARRQVIDLSKRYKLEINPDAFISDITVGMQQRVEILKMLYRENEILIFDEPTAVLTPQEIDELMHIMKNLVAEGKSILFITHKLNEIKAVADRCTVLRKGRCIGTVDVASATKETLSEMMVGRKVNLSVDKADQEPGDTILRVENLTVNRKNHGKPLVNNVNFEVRAGEIVCIAGIDGNGQQELVYALTGMIPHDGGRIYLGGKEITHDNIRHRGMSHIPEDRHRHGLVLDYNLAYNMVLQSYFFPRFQNRGFLKFFEIYNYADSLIERFDIRAGQGPQTIARSMSGGNQQKAIVAREIDRSFPLLIAVQPTRGLDVGAIEYIHQQLVAERTNGRGVLLISLELDEVMDVSDRILVMYEGGIVANVKPKEVSFQELGLYMSGSKKREVA

SEQ ID NO: 53545 - DNA, 345 bp, Unknown
  Obtained from environmental sample
  misc_feature (1)..(345): n is a, c, g, or t
atgaaaaaagaaattctgacagcttccctggtcgatgtgctttcatcggtcgcggcaatcctggtggggcttctggtcgggtttataatcctcctgataagcaacgcgtcccaggccctgggaggtttttggctgatcctctccagcggtttttcttccatgaagtatctgggagatgttttttactttgcaaccccgatcatcatgacaggcctttcggtggggttctccgccaagacagggctgtttaacatcggcgcctccggccagtttattgtaggggcttttatcgcggttttgatcggcgtaaaatgcacttccttcccgggcatctccactggataa

SEQ ID NO: 53546 - protein, 114 aa, Unknown
  Obtained from environmental sample
  SIGNAL (1)...(18)
  DOMAIN (1)...(38): PetM family of cytochrome b6f complex subunit 7
  misc_feature (1)..(114): Xaa is any amino acid
MKKEILTASLVDVLSSVAAILVGLLVGFIILLISNASQALGGFWLILSSGFSSMKYLGDVFYFATPIIMTGLSVGFSAKTGLFNIGASGQFIVGAFIAVLIGVKCTSFPGISTG

SEQ ID NO: 53547 - DNA, 501 bp, Unknown
  Obtained from environmental sample
  misc_feature (1)..(501): n is a, c, g, or t
gtgcataaaaaaagtgtttacatagaaaccacaataccaagccttatcactgcaagattaagtggggagattggtgttttgttccgtcaacaaaaagcgatggagttttgggaaaatgagagacataaatacgatttatatgtaagcctatacgttatagaagaatgtgcgaaaggtgatgaaaaagccgctaaacgaagattggagttaattaaagacatcccgcaaattccaaagtcaaaagaaacggatgaactggcagaagaatattttgcgtttctgcaaattccgccaaaagcaaaaactgactgctcacatttggcaatatgcgtaattaataaaatggattttcttttaagttggaatcttactcatttaggagatagtgcttatcaaaaaacgcatgaatataatataaggcataatttatggactccgggtttgttggatcctgatacgtttatgagaaaaatgaaattggaggaggcagaaaatggataa

SEQ ID NO: 53548 - protein, 166 aa, Unknown
  Obtained from environmental sample
  misc_feature (1)..(166): Xaa is any amino acid
MHKKSVYIETTIPSLITARLSGEIGVLFRQQKAMEFWENERHKYDLYVSLYVIEECAKGDEKAAKRRLELIKDIPQIPKSKETDELAEEYFAFLQIPPKAKTDCSHLAICVINKMDFLLSWNLTHLGDSAYQKTHEYNIRHNLWTPGLLDPDTFMRKMKLEEAENG

SEQ ID NO: 53549 - DNA, 741 bp, Unknown
  Obtained from environmental sample
  misc_feature (1)..(741): n is a, c, g, or t
atggagtgcatattttcagaggcagaaaaaaagaaaaagcccgtttgctttatagaccaaacaccgataaactcaagcccacgctccacgccggttagctatatgagcattttagacaaactgcgagaccttttcgcaaaattgccggagagcaaaattcgcggctacgatgttgggcggtttgcatataacaaggagggcgggcgttgcgaggtgtgcgagggcaggggttatcagttgatagagatgcactttttatccgatgtttgggaactttgcgaggcttgcaaaggtaaaaggtacaataacgaaactttgaaagttttgtggaacggaaaaagcatagcggatgttttggctttgcgaatagaaaccgcttgcgaatttttcaaaaatatgaaaagaatagaaaagcccctgcaaattctaaacagcattgggcttggatatttgcggcttgggcaagccaccaccacaatgagcggcggcgaaattcagcgtttaaaactagccgccgagctttgcaaatcaaattccgaaagtacaattttccttttagacgaacccaccactggcttgcatttgcaagatattcaacctctatggaaccatttgcgcaaactttcaagcgcagggcacgcagttgtttttgtggagcatcatcccgatatgattaagctggcggattatgagattgaacttggaccggaggggggtgctaggggggggtatttggtgtaa

SEQ ID NO: 53550 - protein, 246 aa, Unknown
  Obtained from environmental sample
  DOMAIN (98)...(238): ABC transporter
  misc_feature (1)..(246): Xaa is any amino acid
MECIFSEAEKKKKPVCFIDQTPINSSPRSTPVSYMSILDKLRDLFAKLPESKIRGYDVGRFAYNKEGGRCEVCEGRGYQLIEMHFLSDVWELCEACKGKRYNNETLKVLWNGKSIADVLALRIETACEFFKNMKRIEKPLQILNSIGLGYLRLGQATTTMSGGEIQRLKLAAELCKSNSESTIFLLDEPTTGLHLQDIQPLWNHLRKLSSAGHAVVFVEHHPDMIKLADYEIELGPEGGARGGYLV

SEQ ID NO: 53551 - DNA, 867 bp, Unknown
  Obtained from environmental sample
  misc_feature (1)..(867): n is a, c, g, or t
atgaaggcatatcttgatattgttcaaaaaatccttgaatgtgggtttcgtaagacaaatcgcacaggtattgacgcattaaccatagccggagccatgtttgagcatgatatggcggaaggttttccgcttttaactaccaaaaaggttccttttcgccttgtcgcttcggaattggagttttttattcgcggattaaccgataaagaatggcttaaggaacagaataaccatatatgggatgaatggtgcagtccggatgcagttccttacgccaccgatgatcaaaccaaagcgaaaatgatggccgagcgtgaattgggtcccatttacggctggcagtggcgcaatttcggcgcaaagtacaagacttttaataaccctcccgagggacagagcattgatcaatttaagcagatgattcaaaccttaaaaaccgatcccgataacagacgcatgattgtaagcgcgtggaatcccctcgatcttcctcgcatggcgcttcctccctgtcattacgcttttcaagttacggtaataaacggcaaattgaacttgctttggaaccagcgttctgtggatgttgccttgggactgccgtttaatatcgcaagttacggtctgcttctgcacttgctggcaaaagaggccggtcttggcgagggcagacttatcggttttttaggcgatgttcatatttatgtgaaccatgttgaggctatccgaggacaatgcggacgttctccaaaaactctgccgcaggttaaaacggcgaactttacttctgtttttgactggcattacggcgatacggttgttgaaggctatgatcctcattctgcgattaaatttgatatagcggtgtaa

SEQ ID NO: 53552 - protein, 288 aa, Unknown
  Obtained from environmental sample
  DOMAIN (2)...(288): Thymidylate synthase
  misc_feature (1)..(288): Xaa is any amino acid
MKAYLDIVQKILECGFRKTNRTGIDALTIAGAMFEHDMAEGFPLLTTKKVPFRLVASELEFFIRGLTDKEWLKEQNNHIWDEWCSPDAVPYATDDQTKAKMMAERELGPIYGWQWRNFGAKYKTFNNPPEGQSIDQFKQMIQTLKTDPDNRRMIVSAWNPLDLPRMALPPCHYAFQVTVINGKLNLLWNQRSVDVALGLPFNIASYGLLLHLLAKEAGLGEGRLIGFLGDVHIYVNHVEAIRGQCGRSPKTLPQVKTANFTSVFDWHYGDTVVEGYDPHSAIKFDIAV

SEQ ID NO: 53553 - DNA, 540 bp, Unknown
  Obtained from environmental sample
  misc_feature (1)..(540): n is a, c, g, or t
gtgactataccgggtagtgttacaaaaattgagatgaactctttttctaactgcaagaaccttaccgcaataaattttgatgctgataattccgcatatagttcagaaaatggcgtttggttcaacaaaaataaaactgttttattaagatatcccgaaggaaaaaccggcgcatataccatacccaatggcgttaccagtattggggattgggcttttagcggttgtaaaggccttaccgaggtaagcatacccaacaccgttactaatattggctcgtatgcttttcaatattgcagtagccttaacagtataaccatacccaacagcgttaacagctttgggcaacatgcttttttctccccgttaaaccaaactctaaccagcgtaacgtttcaaggaccgattattaatgaaagatacaaattgggtgattatggttttagtccattctatggggacttacgtgaaaagttccttgcatggggaccgggaacgtataccagaccaagcaacagtgatgtatggactagaaggtaa

SEQ ID NO: 53554 - protein, 179 aa, Unknown
  Obtained from environmental sample
  misc_feature (1)..(179): Xaa is any amino acid
MTIPGSVTKIEMNSFSNCKNLTAINFDADNSAYSSENGVWFNKNKTVLLRYPEGKTGAYTIPNGVTSIGDWAFSGCKGLTEVSIPNTVTNIGSYAFQYCSSLNSITIPNSVNSFGQHAFFSPLNQTLTSVTFQGPIINERYKLGDYGFSPFYGDLREKFLAWGPGTYTRPSNSDVWTRR

SEQ ID NO: 53555 - DNA, 546 bp, Unknown
  Obtained from environmental sample
  misc_feature (1)..(546): n is a, c, g, or t
atgaaacttcttcttcactgctgttgcgctccctgttccgtctcatgtgtcggcaatcttcgcaccgagaaaatagaaccgtatttattttggtacaacccgaatattcccccgtatacggaatataaatcgcgaagagattgcctgaatgaattcgtaaaaagcgaaaagttagctcttacgtccgttgatgaatacggacttagagtatttttaaatgaagtttattcacagactgacagcaattcaatttcccatccgcagaggtgtaaaaaatgttatcgcatacgccttgaaaagactgcggatttcgcatcacgtgaaggatattccgccttcagtacgactttgctgataagcccgtatcaggatcatgatgagataaagctggcgggcgaagaaaccgcggaaaaatacggagttaattttttatacagggatttccgtccgctcttccgcgaagggcagtccggcgcccgcgccgcgaatatgtacatgcagaagtactgcggttgtatattcagcgaggaagaacggtatttgtag

SEQ ID NO: 53556 - protein, 181 aa, Unknown
  Obtained from environmental sample
  DOMAIN (3)...(179): Uncharacterized BCR, COG1636
  misc_feature (1)..(181): Xaa is any amino acid
MKLLLHCCCAPCSVSCVGNLRTEKIEPYLFWYNPNIPPYTEYKSRRDCLNEFVKSEKLALTSVDEYGLRVFLNEVYSQTDSNSISHPQRCKKCYRIRLEKTADFASREGYSAFSTTLLISPYQDHDEIKLAGEETAEKYGVNFLYRDFRPLFREGQSGARAANMYMQKYCGCIFSEEERYL

SEQ ID NO: 53557 - DNA, 756 bp, Unknown
  Obtained from environmental sample
  misc_feature (1)..(756): n is a, c, g, or t
gtggaagccggttatcgcggtttcggcacggaaatgatcgaagaagaggtacgccgcacctttcccgatctccgccttcgccgcattgacgctgacaccgcgtcaaaaaaaagcggcggcagacttgaggaaactctaaaattatttaaaaaaggagaaattgacattttgcttggaacgcaaatggtagcgaaaggattgaactttcccggagtgcggcttgtaggcgtagtgtttgccgacacgggtcttcacctgcccgacttccgcgccgctgagagaaccttctctctgattgtacaagtcgcgggacgcgccggaagatatttccccgacagcaaagtaattgttcaaacccttcgtaccgacgatcctgtaattataagatcatgcgcattggacgttacgggcttttttaacgccgagttaaaacaccgccgctcactcggctttcccccctattcaagacttattcgcttcactatccgcgccaaagaggaaaacagagcaaacgccgctattaccagactcgcatccatcgccgctaaattacttcccaaagaggccgatatgctaggacctgcggaatgtcccatcggtattataaataataattttaggcggcagttgatccttcgcggtccgtccatcggcgcgattcattcaatggcgcgggaagtcgtctcaatttatgaaaaaggcaaagaaagtaaagtctaccttgaaattgatgttgatcccctgagtatgttataa

SEQ ID NO: 53558 - protein, 251 aa, Unknown
  Obtained from environmental sample
  DOMAIN (18)...(110): Helicase conserved C-terminal domain
  misc_feature (1)..(251): Xaa is any amino acid
MEAGYRGFGTEMIEEEVRRTFPDLRLRRIDADTASKKSGGRLEETLKLFKKGEIDILLGTQMVAKGLNFPGVRLVGVVFADTGLHLPDFRAAERTFSLIVQVAGRAGRYFPDSKVIVQTLRTDDPVIIRSCALDVTGFFNAELKHRRSLGFPPYSRLIRFTIRAKEENRANAAITRLASIAAKLLPKEADMLGPAECPIGIINNNFRRQLILRGPSIGAIHSMAREVVSIYEKGKESKVYLEIDVDPLSML

SEQ ID NO: 53559 - DNA, 1170 bp, Unknown
  Obtained from environmental sample
  misc_feature (1)..(1170): n is a, c, g, or t
ttgggactcgacgctgtagtagtaatcggcggcgatgattcaaataccaacgcggctcttcttgccgagtacttcctttccaacggttcatcaacacaggtaatcggctgcccaaaaacaatagacggcgatttaaaaaacgaatatatcgaaacatcttttggttttgacactgcctgtaaaacatattctgagcttatcggtaacctctgccgcgataccaacagcgcgaaaaaatactggcactttattaaattaatgggacgctccgcaagtcatatcgccctcgaatgcgccctgcaaacccagcctaacgtctgtcttatttctgaagaaatagagaaaaaaaatctttctctcgacaaaataatcgagcagatttgcgcgtcaatagcaaaacgcgcggaaaacggagacaatttcggcgttatacttataccggaaggtcttgttgaatttatccctgaaattaaaaaattaattgaagaacttaacgataccattgccgacgaagaggaaagcttttcatcattaacaaatttcgtggatcaattacagtggttcgcaggaaggctttcagacatttcttacggtattttaaaaacccttcccgccgaaatcgcgcagcaatttttaatggatcgcgaccctcacggtaacgtacaggtttcaagaatagaaactgataaattactagtcggaatgacagaaaaaaaattgagaatcatgaaggaaaagaaacagtacaaaggcaaattcagcgccctgacacattttttcggctatgaaggacgctgcgcgtttccttcaaattttgacgctgactattgctacagtctaggttacagcgcctttgcgctgatcgcttcggggctgacaggttatctttccagtgtaaggaatcttaccgctccggcggacaagtggagcgcgggaggagtaccccttacaatgatgatggatcttgaacaccgacacggcacaaaaaaaccggttataaagaaagctcttgttgaattagacggcaaaccttttaagacttttgaagaaaaacgcggaatatgggcggaaaaaacttgtttccttgtccccggatcaattcaatatttcgggccgcctgaagtctgcgatacctcgactgtaacgcttcgccttgaacacggtttataa

SEQ ID NO: 53560 - protein, 389 aa, Unknown
  Obtained from environmental sample
  DOMAIN (1)...(187): Phosphofructokinase
  misc_feature (1)..(389): Xaa is any amino acid
MGLDAVVVIGGDDSNTNAALLAEYFLSNGSSTQVIGCPKTIDGDLKNEYIETSFGFDTACKTYSELIGNLCRDTNSAKKYWHFIKLMGRSASHIALECALQTQPNVCLISEEIEKKNLSLDKIIEQICASIAKRAENGDNFGVILIPEGLVEFIPEIKKLIEELNDTIADEEESFSSLTNFVDQLQWFAGRLSDISYGILKTLPAEIAQQFLMDRDPHGNVQVSRIETDKLLVGMTEKKLRIMKEKKQYKGKFSALTHFFGYEGRCAFPSNFDADYCYSLGYSAFALIASGLTGYLSSVRNLTAPADKWSAGGVPLTMMMDLEHRHGTKKPVIKKALVELDGKPFKTFEEKRGIWAEKTCFLVPGSIQYFGPPEVCDTSTVTLRLEHGL

SEQ ID NO: 53561 - DNA, 888 bp, Unknown
  Obtained from environmental sample
  misc_feature (1)..(888): n is a, c, g, or t
atgagcgcaatgctgccgcttgttgaatcgcaaattgacgcgcgtaaaatccttatttacagcggcgcaggcagtcatccccgcctcggagcggaactgaaaaatacaagcaaaatgaaacttcccgcaggccccattacagtttatgacggcggagtttacgccggagacgccctcatcgaattctggaatgagaatgaaagcaggttaatctcctttggagacgacctttcagtaactgcggttaccggcagcacgacaaccaacgctgttagtacggtaaatatttcaggcggcgttatgacaattaaccgcagcttgacatatatcaaaacatacacgttcctgaattcagcttccgcagccaaacaattgatacttgaacattcaaaaaccgctaacacgaatcttgttactccggcagctaacgatcagacagcgtcaaattaccgttttaacgtaacgcttcccgcaaaccgtgaaacggtttttaccgtgaacgaacaaagaccaatatctgaaagaataacgcttctttcccagcgtcctgagacaattttaagctacactacaaaccaggaaattccggctcgtgtacgcgaagccttacagcgggctgtggaattgaagaagggagcggacgcggctgatcttgcggtaaaggaaattgaagaacagcgaagccgcttaatagccgatcaggacagaatcaggcgcaaccttgaagcggcgggaaaccagacacagcagggaatggaatacttaaagcggctggcggctcttgacagcgaaattgacgctatggctccggctcttgataaagcaagaacaaacgcaaagaatgcgcagcaggcttacagcaattatctttcggggcttaatctgtag

SEQ ID NO: 53562 - protein, 295 aa, Unknown
  Obtained from environmental sample
  misc_feature (1)..(295): Xaa is any amino acid
MSAMLPLVESQIDARKILIYSGAGSHPRLGAELKNTSKMKLPAGPITVYDGGVYAGDALIEFWNENESRLISFGDDLSVTAVTGSTTTNAVSTVNISGGVMTINRSLTYIKTYTFLNSASAAKQLILEHSKTANTNLVTPAANDQTASNYRFNVTLPANRETVFTVNEQRPISERITLLSQRPETILSYTTNQEIPARVREALQRAVELKKGADAADLAVKEIEEQRSRLIADQDRIRRNLEAAGNQTQQGMEYLKRLAALDSEIDAMAPALDKARTNAKNAQQAYSNYLSGLNL

SEQ ID NO: 53563 - DNA, 555 bp, Unknown
  Obtained from environmental sample
  misc_feature (1)..(555): n is a, c, g, or t
atgctggaagttaaagatctatccgccggttacaaaggcgcaagcaatgaacgctatgacgttatacgcaacatcagttttaaggcggagaggggagaaagcctttgcatactaggtcccaacgggagcggaaaaagcactttgcttaaatcaatagcgcgtattattgattaccgcggatctgtgttaataagcggcgaagacatttccgccgtctcgcgcaaagagctggcgaaaaaaatcgccttgctgtcccagagcgcgcaagtgtttttccctttcacagtttatgagaccgtatcaatgggacgttacgcgtattcgcagggctttctgaaaaatctttccgccgaagacagaacggttatcgaaaatattttgaaaaaactggatatttgggaaaacaaagaccgtatgatagacgaattaagcggcggagaattgcagaggatatttctcgccagaaccctggcgcaaagcccggagttgattctgcttgacgagccgagcaatcacctggacttaaaacaccaaattgaacttctcaagtactaa

SEQ ID NO: 53564 - protein, 184 aa, Unknown
  Obtained from environmental sample
  DOMAIN (32)...(184): ABC transporter
  misc_feature (1)..(184): Xaa is any amino acid
MLEVKDLSAGYKGASNERYDVIRNISFKAERGESLCILGPNGSGKSTLLKSIARIIDYRGSVLISGEDISAVSRKELAKKIALLSQSAQVFFPFTVYETVSMGRYAYSQGFLKNLSAEDRTVIENILKKLDIWENKDRMIDELSGGELQRIFLARTLAQSPELILLDEPSNHLDLKHQIELLKY

SEQ ID NO: 53565 - DNA, 1053 bp, Unknown
  Obtained from environmental sample
  misc_feature (1)..(1053): n is a, c, g, or t
atgaaaaataaaataatgtattttagtggtcagataaaccgtatcataatcggagcagttatctcgcttttaataattgtcgccgctgcctctttgggcagttcaggcataagtttgcgcgatactgttttaatcattttgcataaaattttccgtctgccgcttgcacatggtatagacccaaaaaatgtttcaattgtgtggttactgcgcctgccgcgggtacttctggcgtttcttgtcggcggcgggcttgcggtaagcggcgctgtttgtcagtcaatcctgcgaaatccgcttgcctccccctacattttgggagtctcctccggagcgtctctgggcgcgggaataatcattatcagcggaatcgcgcttcctttgcttggcggcttcacattaccgctgacgggatttgtcttcgggatgggggcggtttttctcgtcgccgctttttcttcgcggatagacaaatcgatgtcgaataacacaattattctgtgcggaatggttttctcgcttttcctaagcgcgatgcttacaatgttaagcgccgtcttttccgatgacctgcggcggatagccctgtggcaaatgggcagcttcgccatgcgcggctggtcgtcggtattgcttttgcttccttttctgtccgtcggaataaccgggattttcctcttcacaaaagaaatggacattttaagcttcggcgacgaacaggcaaaatcttccggcgtggaaacaggcgcagtgcgtaaaaaactcctcgccctctgcgccgtgttgacaggagccgccgtcgctctttccggagttatcggctttgtagacctgatagcccctcatgcggcgcgccggaattgcgggtctaatcacaaatatttaatcccaatatcatttatcttaggcggctccttgcttgttttaaccgatttgttggcaagaactttagtctctccctcggaacttcccgtaggcgcgattaccgcgctaatcggcgcgccgtttttcgcctgggtttatttcaggcggcggcgcagggcgcaggtgtaa

SEQ ID NO: 53566 - protein, 350 aa, Unknown
  Obtained from environmental sample
  DOMAIN (95)...(344): ABC 3 transport family
  misc_feature (1)..(350): Xaa is any amino acid
MKNKIMYFSGQINRIIIGAVISLLIIVAAASLGSSGISLRDTVLIILHKIFRLPLAHGIDPKNVSIVWLLRLPRVLLAFLVGGGLAVSGAVCQSILRNPLASPYILGVSSGASLGAGIIIISGIALPLLGGFTLPLTGFVFGMGAVFLVAAFSSRIDKSMSNNTIILCGMVFSLFLSAMLTMLSAVFSDDLRRIALWQMGSFAMRGWSSVLLLLPFLSVGITGIFLFTKEMDILSFGDEQAKSSGVETGAVRKKLLALCAVLTGAAVALSGVIGFVDLIAPHAARRNCGSNHKYLIPISFILGGSLLVLTDLLARTLVSPSELPVGAITALIGAPFFAWVYFRRRRRAQV

SEQ ID NO: 53567 - DNA, 2025 bp, Unknown
  Obtained from environmental sample
  misc_feature (1)..(2025): n is a, c, g, or t
gtgcgaatgaacctgtggcggatagcgataatcattctgttagctctcggactgttgctctcgaccgtccgttacagccgcagccgccttaaattgtccgcgaaaatcctgttgatcctactacgggccggatggattgtcgcaatcgcgcttgcatttatagaacctattatacactttgaacgctttgagtcgagccggatgaaaattccggtgctggttgacgtctccgccagtatgcaaaacttctcgccggaggcaagcgtcgttccgtttttagacaccctttcatcactgcaatccaaaacaaacggacgtgtgagcttcgagtattttctattcggcgattcgacccgcgtacgtcaatcaaaccaatccgcgccgatgttattcaatgatacaaggagtttcttcccgtccgtgcttgacgaaacaggaagtaaactatcgagcgatatgatactgataaccgacggccattggacaaggccgcgccgaagcaacgaggtgtttccgcgcaattccatccgttatctcacgttgccggaagccaagccgaacccgttcgtaacggtatcgagcgacgcgccggaaaccgctccgaccgattcatcctttaacgcgcgcatttccgcgaacggttacgccaaggcaaagtgtacattgtcaatatcgctcaaagaaaacgggaagacgataaaatcaagtaatatcgacattgatatgggctatttcacacaaacaatcacatttaagacaagcaactcgcgtccgggaaggcggctctacaccgtggaagcggacatcggcggcgatataccgccgtccgtgtcgggcttcgtccaccaaaccgtcccgcgtttcttcacctactccacctacgcggcgaggccgacgttagacagacgctacgtaacccaagctttgcaatcaagcgacatcttcaaagagaaagcgtcgtcccccgatatgctgttcttgtttgactgggacagtaccgccaccaaattgatccgaagcctgccgcgccacgccgtagccgtattctccggcgcaacaccgtgcagttcaagccgtatgtacgaaccgcctgtcaccgtaaaggccgtggatagagacatactgataaattcacgcttagacctgcgagcaatgccgccgccgcaggaaattatcatctgcaaacaacctccggtcgccgcgatgaagcgtatgcttaccgcgtccgtcaatacagccggcggacgtgtcaacagcggtaatgccgttaatagtattaataccaataccgcgaaagcgaatgatagcagacaaaccgacttaccgatactcttcagcggacgcttcatgggtacgcagtcactattctgtacggtcagaggcatttggcgttgggatttttggccgatggcctccgaccgcgcggagaacgagctattcagcttctccggcacactgctatcggtcgcgaaggatttattgcttgacaacatctccgatcaactgatactctaccccgcaaacacgctgacggaaaccgattcggcgagattcttcatgtcgctcccgtccgccgttccgatattcgaaccgatcaatttatcattacaaataaagaatgacggaattgccatcgatacggcaataacctaccgccccaacggattgaacaaacaaccgctatccctgccgatcctgccgtccggcagatacgccatatcccgcaccctgaccgcccccggcgtcaagggggccttcagcgacagcttcaccgtcaacatagacatgagcgaactctccgtactgtcgcaaaacactcaatacctgcaagagttcgcccaaccgctcgacatggccgacagcatagcgaccaacgccgtcttcgactcgtgggaacgcagaagcgcggagaagaacacggtcacggagacggtacggatcaacagatcgtggttgttattgtggattatattgacactgttggcggcggaactggttttgcggaggatgcggggggttgattaa

SEQ ID NO: 53568 - protein, 674 aa, Unknown
  Obtained from environmental sample
  SIGNAL (1)...(26)
  misc_feature (1)..(674): Xaa is any amino acid
MRMNLWRIAIIILLALGLLLSTVRYSRSRLKLSAKILLILLRAGWIVAIALAFIEPIIHFERFESSRMKIPVLVDVSASMQNFSPEASVVPFLDTLSSLQSKTNGRVSFEYFLFGDSTRVRQSNQSAPMLFNDTRSFFPSVLDETGSKLSSDMILITDGHWTRPRRSNEVFPRNSIRYLTLPEAKPNPFVTVSSDAPETAPTDSSFNARISANGYAKAKCTLSISLKENGKTIKSSNIDIDMGYFTQTITFKTSNSRPGRRLYTVEADIGGDIPPSVSGFVHQTVPRFFTYSTYAARPTLDRRYVTQALQSSDIFKEKASSPDMLFLFDWDSTATKLIRSLPRHAVAVFSGATPCSSSRMYEPPVTVKAVDRDILINSRLDLRAMPPPQEIIICKQPPVAAMKRMLTASVNTAGGRVNSGNAVNSINTNTAKANDSRQTDLPILFSGRFMGTQSLFCTVRGIWRWDFWPMASDRAENELFSFSGTLLSVAKDLLLDNISDQLILYPANTLTETDSARFFMSLPSAVPIFEPINLSLQIKNDGIAIDTAITYRPNGLNKQPLSLPILPSGRYAISRTLTAPGVKGAFSDSFTVNIDMSELSVLSQNTQYLQEFAQPLDMADSIATNAVFDSWERRSAEKNTVTETVRINRSWLLLWIILTLLAAELVLRRMRGVD

SEQ ID NO: 53569 - DNA, 411 bp, Unknown
  Obtained from environmental sample
  misc_feature (1)..(411): n is a, c, g, or t
gtgtggacgcttgccgacgattccggtcttgaggtggacgctctcggcggcgcgcccggcgtgttaagcgcgcggtacggcggcgagggggcggactccgcaaagaataatgagaaattgctgaacgctctccgtgatgttcccgaaggcgaacgcaccgctcgctttaaatgcgtgttggtattgaagacgggaatcgatacatatctatccgctgaaggcgtttgcgaggggcgaatcgtcaatgaggctgtcggcggcaacggcttcgggtatgacccgctgtttgtcccaaaaggttatgataagacgatggcgcaactcagttcggaagaaaaaaacagcataagccataggggagcggcgttgaaggggctgtatgcaatgattttgactttggcagttgactga

SEQ ID NO: 53570 - protein, 136 aa, Unknown
  Obtained from environmental sample
  DOMAIN (1)...(130): Ham1 family
  misc_feature (1)..(136): Xaa is any amino acid
MWTLADDSGLEVDALGGAPGVLSARYGGEGADSAKNNEKLLNALRDVPEGERTARFKCVLVLKTGIDTYLSAEGVCEGRIVNEAVGGNGFGYDPLFVPKGYDKTMAQLSSEEKNSISHRGAALKGLYAMILTLAVD

SEQ ID NO: 53571 - DNA, 1014 bp, Unknown
  Obtained from environmental sample
  misc_feature (1)..(1014): n is a, c, g, or t
ttggaaacctccgctattccggtattagttctctttggtccgacagcgtcaggtaaaacaggcattctccttaaacttttcaactctcaatccaacttacaagccgaggttatttccgccgattccatgcaagtctacagaggcatgaacatcggaacagccaagccttcggctgatgaaagagcgaaactcccccaccatttaattgatatccgagacccttcggaacaatttaacgctggcgattttgtccgccttgccgatgaagcttgcgctgaaattgcctctcgaggaaaactccctgtggtgtcgggggggacgggtttttacttaaaaaactttattttaggattgagcgaagcaccccccggcgacaaaataatccgtgaacaattaaagcgtgaattaagcgaaaaaggcgctgcgtctctaatggaagaacttgcctcctgcgacaacgtcagcgcaaatcgtattcacataaatgacgagtaccgtcttcttcgcgctctggaagtttaccgcttctgcggcaagcccctatcatcgtttgaagtcaacaccgataaaaaccgtcccaaattcaattttcttattatcggtctttcacgcccaagagaagaattgtaccgccgcataaacttacgctgtgctgatatgttcaaacagggtcttgccgccgaggtaagctcgcttttcaagtcgggttacacacccgaagaccctggtttgcgagccatcggctacagagaattttttgtcgaggcggcgcaagacggcgatttttccgcagacaaacaaggcaagtggcggctttcggaagatatcgaaggagtgcagactttggttgcgcaaaacagccgccgttacgcaaaacgacaaattacttttttttcgggtattccaaatgttaattggatagagcccgggcgtgatgatgcggagacggcggagaagattaagggattattggaagaattttaccgtgaacctcacggaagagagaaaaattaa

SEQ ID NO: 53572 - protein, 337 aa, Unknown
  Obtained from environmental sample
  SIGNAL (1)...(18)
  DOMAIN (43)...(310): IPP transferase
  misc_feature (1)..(337): Xaa is any amino acid
METSAIPVLVLFGPTASGKTGILLKLFNSQSNLQAEVISADSMQVYRGMNIGTAKPSADERAKLPHHLIDIRDPSEQFNAGDFVRLADEACAEIASRGKLPVVSGGTGFYLKNFILGLSEAPPGDKIIREQLKRELSEKGAASLMEELASCDNVSANRIHINDEYRLLRALEVYRFCGKPLSSFEVNTDKNRPKFNFLIIGLSRPREELYRRINLRCADMFKQGLAAEVSSLFKSGYTPEDPGLRAIGYREFFVEAAQDGDFSADKQGKWRLSEDIEGVQTLVAQNSRRYAKRQITFFSGIPNVNWIEPGRDDAETAEKIKGLLEEFYREPHGREKN

SEQ ID NO: 53573 - DNA, 315 bp, Unknown
  Obtained from environmental sample
  misc_feature (1)..(315): n is a, c, g, or t
atggaagaaaataagtataaaaggccaagctgggacgagtatttcatggaagtatgcgatgccatctcaaagcgggccacctgcgacagggggcgttcaggctgcgttatcgccagggacaaccagctattggttaccggctatgtgggcgcgcccgcgggccttccccactgcgacgaaatagggcatcaattcaaaaaaatgcttcatgaagacggcggcgtaactacccactgtgtccgtacggtacacgccgagcagaacgcgatctgccaggccgccaagcgcggcgttcaatcaacctcggccatctga

SEQ ID NO: 53574 - protein, 104 aa, Unknown
  Obtained from environmental sample
  DOMAIN (9)...(103): Cytidine and deoxycytidylate deaminase zinc-binding region
  misc_feature (1)..(104): Xaa is any amino acid
MEENKYKRPSWDEYFMEVCDAISKRATCDRGRSGCVIARDNQLLVTGYVGAPAGLPHCDEIGHQFKKMLHEDGGVTTHCVRTVHAEQNAICQAAKRGVQSTSAI

SEQ ID NO: 53575 - DNA, 843 bp, Unknown
  Obtained from environmental sample
  misc_feature (1)..(843): n is a, c, g, or t
ttgaatggtatgatctataggcgcggaaaaaaacgcctcattgcgcttgcggttcttttttggacgcttcttgcaggagtgtccgcaaaagacctggttcacatcgtagtgaggggcgagacagtttattccatctcacggcggtacagtgtgagtcaggatgctctcatgcgccgcaacgacatttctgacccttcaaaattatttgagggaatgaggctcgttattccttccgccgtagaaattccggtcggcatggccgccggcacggccaccgcgcccgctaaaaccgtcttttttgagtatactgtgctgccaaacgacacattgtacagcatcgcccgctcacagggcgtgatgtttaaggcgctttgcgacataaacaatttccccaataactataaggtcaaagccgcgggaaaaaataaaaataccaaaaccggcccccgtgccgactccggcgccgactccggcgcaaccttcagtagcggcgcaaccttcagtagcggcgcagcctcctgcagcggcgcagccttcagcagcggcgcagcctcctgtagcggcgcagcctcctgcagcggcgcagcctcctgcagcggcgcaaccttcagtagcggcgcaaccttcggcggcagcgcaacccacggtggtcgtacagccccctgtacaacccatagctcagccaactcctgtgcttataatgccctcatgggcggcgctggaaaggccctcaaacgcgaagcctgtccccaaaaatccttcaatccgctggccgatttccgcgaaagaaattttttatatgaacggcaacataggggtgctcgtttcaggcgaagagtctga

SEQ ID NO: 53576 - protein, 280 aa, Unknown
  Obtained from environmental sample
  SIGNAL (1)...(25)
  DOMAIN (34)...(77): LysM domain
  misc_feature (1)..(280): Xaa is any amino acid
MNGMIYRRGKKRLIALAVLFWTLLAGVSAKDLVHIVVRGETVYSISRRYSVSQDALMRRNDISDPSKLFEGMRLVIPSAVEIPVGMAAGTATAPAKTVFFEYTVLPNDTLYSIARSQGVMFKALCDINNFPNNYKVKAAGKNKNTKTGPRADSGADSGATFSSGATFSSGAASCSGAAFSSGAASCSGAASCSGAASCSGATFSSGATFGGSATHGGRTAPCTTHSSANSCAYNALMGGAGKALKREACPQKSFNPLADFRERNFLYERQHRGARFRRRV

SEQ ID NO: 53577 - DNA, 330 bp, Unknown
  Obtained from environmental sample
  misc_feature (1)..(330): n is a, c, g, or t
atgggttgtacagggggctgtacgaccaccgtgggttgcgctgccgccgaaggttgcgccgctactgaaggttgcgccgctgcaggaggctgcgccgctgcaggaggctgcgccgctacaggaggctgcgccgctgctgaaggctgcgccgctgcaggaggctgcgccgctactgaaggttgcgccgctactgaaggttgcgccggagtcggcgccggagtcggcacgggggccggttttggtatttttattttttcccgcggctttgaccttatagttattggggaaattgtttatgtcgcaaagcgccttaaacatcacgccctgtga

SEQ ID NO: 53578 - protein, 109 aa, Unknown
  Obtained from environmental sample
  misc_feature (1)..(109): Xaa is any amino acid
MGCTGGCTTTVGCAAAEGCAATEGCAAAGGCAAAGGCAATGGCAAAEGCAAAGGCAATEGCAATEGCAGVGAGVGTGAGFGIFIFSRGFDLIVIGEIVYVAKRLKHHAL

SEQ ID NO: 53579 - DNA, 663 bp, Unknown
  Obtained from environmental sample
  misc_feature (1)..(663): n is a, c, g, or t
gtgccgactccggcgccgactccggcgcaaccttcagtagcggcgcaaccttcagtagcggcgcagcctcctgcagcggcgcagccttcagcagcggcgcagcctcctgtagcggcgcagcctcctgcagcggcgcagcctcctgcagcggcgcaaccttcagtagcggcgcaaccttcggcggcagcgcaacccacggtggtcgtacagccccctgtacaacccatagctcagccaactcctgtgcttataatgccctcatgggcggcgctggaaaggccctcaaacgcgaagcctgtccccaaaaatccttcaatccgctggccgatttccgcgaaagaaattttttatatgaacggcaacataggggtgctcgtttcaggcgaagagtctgaatcagttaaaagtcttacaaaaggaaccgtcgtccacgccagcccctggcgcggttacggcaatgtcgcgattattgaggcggacgggggttacaggtatttatatggggcatgtaaaaccctgtcggtcaggaaaggggacaacatcgaaccgggaacagaattgggaaaattgggtatatatccggcatccaacaaaccggagctggtttttatagtaacgcgtaacgggtcgccggttgatccggtaaaggcgccgagactctag

SEQ ID NO: 53580 - protein, 220 aa, Unknown
  Obtained from environmental sample
  SIGNAL (1)...(20)
  DOMAIN (119)...(214): Peptidase family M23
  misc_feature (1)..(220): Xaa is any amino acid
MPTPAPTPAQPSVAAQPSVAAQPPAAAQPSAAAQPPVAAQPPAAAQPPAAAQPSVAAQPSAAAQPTVVVQPPVQPIAQPTPVLIMPSWAALERPSNAKPVPKNPSIRWPISAKEIFYMNGNIGVLVSGEESESVKSLTKGTVVHASPWRGYGNVAIIEADGGYRYLYGACKTLSVRKGDNIEPGTELGKLGIYPASNKPELVFIVTRNGSPVDPVKAPRL

SEQ ID NO: 53581 - DNA, 1023 bp, Unknown
  Obtained from environmental sample
  misc_feature (1)..(1023): n is a, c, g, or t
atgacagacgctttcatggaatttgattctgatgatttggaacatgaattgatagagacccgtcccgtaagatcgtccgcggttaagaattcaaaacggtcaaaanccggcaaagagtcagatcctctggcgctgtatttcaggcaaatttctaatttccccctgctgacggtgcaggaagagcagaacataggggaaaaaattataagccttcgcgctaagcagaaagaacttgaggccgaacgtaaaactaaggcttcaaacgactacgaaagggaaaaagcggcccttgacagcacccttctgttctataaaaacaaaatgatcaattccaaccttcgccttgtggtttctatagcgaaaaattaccagcaccgcgggctttctcttcttgacctgatcgacgagggcaacataggccttatcgaggctgtcgagcgtttcgattatacgcgcggctgccgtttctcgacttacggcacatggtggatcaggcaggccataataaaaagcatagccgataagggtagggtgatccgcatcccaatccacatgcttaacactataaaaaaatgttattatgtcgccaaacaactgactcaggacctcggcagggatcccagcgaggaagagttgtcggaatatcttagaatacccgtttcaaaggtcaaggacataattaaactttcgcaggaaactaccagccttaacgccatagtggacgacggaaaccttacaagactcgccgatcttatcaaagacgaatccacgacagaaccgtttgaaatggttttttctatgacacttcaggaaaccatcagggacattctctcgcagctctcggagcgtgaaatgaagataatccagctccgttacggactggccggcgagggccncctcactctggaagagactggtaagctgctcgggataacccgcgagcgtgtgcgccagatccaggaaaaagccaccttcaaactgcggaatatcaaggcgctaagcgaactgaaagaaacgtgctaa

SEQ ID NO: 53582 - protein, 340 aa, Unknown
  Obtained from environmental sample
  DOMAIN (40)...(76): Sigma-70 factor, region 1.2
  misc_feature (1)..(340): Xaa is any amino acid
MTDAFMEFDSDDLEHELIETRPVRSSAVKNSKRSKXGKESDPLALYFRQISNFPLLTVQEEQNIGEKIISLRAKQKELEAERKTKASNDYEREKAALDSTLLFYKNKMINSNLRLVVSIAKNYQHRGLSLLDLIDEGNIGLIEAVERFDYTRGCRFSTYGTWWIRQAIIKSIADKGRVIRIPIHMLNTIKKCYYVAKQLTQDLGRDPSEEELSEYLRIPVSKVKDIIKLSQETTSLNAIVDDGNLTRLADLIKDESTTEPFEMVFSMTLQETIRDILSQLSEREMKIIQLRYGLAGEGXLTLEETGKLLGITRERVRQIQEKATFKLRNIKALSELKETC

SEQ ID NO: 53583 - DNA, 336 bp, Unknown
  Obtained from environmental sample
  misc_feature (1)..(336): n is a, c, g, or t
ttgtttggcgacataataacatttttttatagtgttaagcatgtggattgggatgcggatcaccctacccttatcggctatgctttttattatggcctgcctgatccaccatgtgccgtaagtcgagaaacggcagccgcgcgtataatcgaaacgctcgacagcctcgataaggcctatgttgccctcgtcgatcaggtcaagaagagaaagcccgcggtgctggtaatttttcgctatagaaaccacaaggcgaaggttggaattgatcattttgtttttatagaacagaagggtgctgtcaagggccgctttttccctttcgtagtcgtttga

SEQ ID NO: 53584 - protein, 111 aa, Unknown
  Obtained from environmental sample
  misc_feature (1)..(111): Xaa is any amino acid
MFGDIITFFYSVKHVDWDADHPTLIGYAFYYGLPDPPCAVSRETAAARIIETLDSLDKAYVALVDQVKKRKPAVLVIFRYRNHKAKVGIDHFVFIEQKGAVKGRFFPFVVV

SEQ ID NO: 53585 - DNA, 1017 bp, Unknown
  Obtained from environmental sample
  misc_feature (1)..(1017): n is a, c, g, or t
gtgatggaccttagcactggggcaaacatccatgaaacccgcgagtggatattgagaaattctccagtccccataggcaccgtccccatttaccaagcgctggaaaaagcgggcggcaaggccgaagacctgacatgggacatttatcgcgacaccatcatcgaacagtgccagcagggcgtggactatttcaccatccacgctggcctgcgcttggcgcatgtaccacttgcagcaaagagggccactgggatagtcagccgtggcggttcaatcatggccaaatggtgcatggcccacaacagcgaaaattttctgtactcccactttgatgagctgtgcgagctgcttgccagctatgacgcagcgttcagcctaggggatgggctgcggcctggctccgtggccgacgccaacgacgaagcccaattcgctgagcttgacacattgggccaattgaccctgcgggcatgggaacacgactgccaagtgttcatcgaaggccctggccacgtcccgatgcacctgatacaagaaaacatggatcgccagttgaagacatgccacggtgcgccattttacaccttgggcccgctgaccaccgacatcgcgcctggctacgaccacatcacgtctgccattggtgcagccatgattggatggatgggcaccgccatgctgtgctatgtcacccccaaagaacaccttgggctcccaaacaaaaaagatgtcaaagaaggcgtgattgcttacaagattgccgcacacgcggcagacttggccaaggggcaccctgcggcttgggcttgggacaaagccatgggcaaagcgcgattcgagttccgctggcaggatcagttcagcttggccttagaccctgagaccgcctgcgaataccgccgctcgaccatgccgccagatggtgaaggtgcgtccaatttctgctccatgtgcggccccaatttttgcgccatgaggatttctggggaggcgatgacagggctaggcaaatcttga

SEQ ID NO: 53586 - protein, 338 aa, Unknown
  Obtained from environmental sample
  DOMAIN (1)...(332): ThiC family
  misc_feature (1)..(338): Xaa is any amino acid
MMDLSTGANIHETREWILRNSPVPIGTVPIYQALEKAGGKAEDLTWDIYRDTIIEQCQQGVDYFTIHAGLRLAHVPLAAKRATGIVSRGGSIMAKWCMAHNSENFLYSHFDELCELLASYDAAFSLGDGLRPGSVADANDEAQFAELDTLGQLTLRAWEHDCQVFIEGPGHVPMHLIQENMDRQLKTCHGAPFYTLGPLTTDIAPGYDHITSAIGAAMIGWMGTAMLCYVTPKEHLGLPNKKDVKEGVIAYKIAAHAADLAKGHPAAWAWDKAMGKARFEFRWQDQFSLALDPETACEYRRSTMPPDGEGASNFCSMCGPNFCAMRISGEAMTGLGKS

SEQ ID NO: 53587 - DNA, 417 bp, Unknown
  Obtained from environmental sample
  misc_feature (1)..(417): n is a, c, g, or t
gtgccccttggccaagtctgccgcgtgtgcggcaatcttgtaagcaatcacgccttctttgacatcttttttgtttgggagcccaaggtgttctttgggggtgacatagcacagcatggcggtgcccatccatccaatcatggctgcaccaatggcagacgtgatgtggtcgtagccaggcgcgatgtcggtggtcagcgggcccaaggtgtaaaatggcgcaccgtggcatgtcttcaactggcgatccatgttttcttgtatcaggtgcatcgggacgtggccagggccttcgatgaacacttggcagtcgtgttcccatgcccgcagggtcaattggcccaatgtgtcaagctcagcgaattgggcttcgtcgttggcgtcggccacggagccaggccgcagcccatcccctag

SEQ ID NO: 53588 - protein, 138 aa, Unknown
  Obtained from environmental sample
  misc_feature (1)..(138): Xaa is any amino acid
MPLGQVCRVCGNLVSNHAFFDIFFVWEPKVFFGGDIAQHGGAHPSNHGCTNGRRDVVVARRDVGGQRAQGVKWRTVACLQLAIHVFLYQVHRDVARAFDEHLAVVFPCPQGQLAQCVKLSELGFVVGVGHGARPQPIP

SEQ ID NO: 53589 - DNA, 510 bp, Unknown
  Obtained from environmental sample
  misc_feature (1)..(510): n is a, c, g, or t
atgcgccaagcgcaggccagcgtggatggtgaaatagtccacgccctgctggcactgttcgatgatggtgtcgcgataaatgtcccatgtcaggtcttcggccttgccgcccgctttttccagcgcttggtaaatggggacggtgcctatggggactggagaatttctcaatatccactcgcgggtttcatggatgtttgccccagtgctaaggtccatcaccgtgtccgcgccccaccttatggcccaagcatcttttcgacttcttcctctatggaagaagcgacggcagagttgcctatgttggcgtttatctttaccaaaaaagccctgccgatgatcatgggttcggcctctggatggttgacgttggcgcagatgacggccctgccactggctatctcttgccggacaaattctggcgtgatgtggctatcatcggtacggcccaaattttcgcggatggacacgtattccatttcgggagtgactatgccctttttggcatag

SEQ ID NO: 53590 - protein, 169 aa, Unknown
  Obtained from environmental sample
  misc_feature (1)..(169): Xaa is any amino acid
MRQAQASVDGEIVHALLALFDDGVAINVPCQVFGLAARFFQRLVNGDGAYGDWRISQYPLAGFMDVCPSAKVHHRVRAPPYGPSIFSTSSSMEEATAELPMLAFIFTKKALPMIMGSASGWLTLAQMTALPLAISCRTNSGVMWLSSVRPKFSRMDTYSISGVTMPFLA

SEQ ID NO: 53591 - DNA, 672 bp, Unknown
  Obtained from environmental sample
  misc_feature (1)..(672): n is a, c, g, or t
atgtctgaattagcgatgcagttggcggaatgtcggaagccctttcctgcctctgaaaaaatatatgtgccagggcaaagggcgggagtgagcgtgccattccgcagggtgcatttaggcccaacaaaaggccaagacggacaatgcaggccaaacgagccaatgatcctatatgacacgaccggcccatacacagacccagaggcaacgatagacctggccaagggtctgccgccgcttaggcggcagtgggcgttggagaggggcgacgcggtagagctaactggagattcagcagcgtacaggccagagcaagacaacaaaaccgctaaagccatccgcttcccaaccctgccaacgcaaatgcgggccaaagaggggcggaagattacccagatgcactatgccaaaaagggcatagtcactcccgaaatggaatacgtgtccatccgcgaaaatttgggccgtaccgatgatagccacatcacgccagaatttgtccggcaagagatagccagtggcagggccgtcatctgcgccaacgtcaaccatccagaggccgaacccatgatcatcggcagggcttttttggtaaagataaacgccaacataggcaactctgccgtcgcttcttccatagaggaagaagtcgaaaagatgcttgggccataa

SEQ ID NO: 53592 - protein, 223 aa, Unknown
  Obtained from environmental sample
  misc_feature (1)..(223): Xaa is any amino acid
MSELAMQLAECRKPFPASEKIYVPGQRAGVSVPFRRVHLGPTKGQDGQCRPNEPMILYDTTGPYTDPEATIDLAKGLPPLRRQWALERGDAVELTGDSAAYRPEQDNKTAKAIRFPTLPTQMRAKEGRKITQMHYAKKGIVTPEMEYVSIRENLGRTDDSHITPEFVRQEIASGRAVICANVNHPEAEPMIIGRAFLVKINANIGNSAVASSIEEEVEKMLGP

SEQ ID NO: 53593 - DNA, 600 bp, Unknown
  Obtained from environmental sample
  misc_feature (1)..(600): n is a, c, g, or t
atgatagattacatccgcggcaaactcaccgataaggagttgacgcacgtttccatagagaccgccggggttggatactccgtatctataccgctgtcgacgtatgagaaactcccggaaacgggaaaggacgccttgatctatatccattattatgtacgggaggatgatgtaaaactgtacggattcgcgtctaaggacgacagagagatttttcgccaccttattaccgtgaattcagtggggcctaaagtggccatgggtattatgtccggcatatcgatagagaatctggtgatgtacgtcaacgccggcgatacggcggggttgaagaaagtgcccggcgtggggctgaagacggcggagcgcatcatcatagagttgaagggaaagctgggatcgtacgcgtcttccgcgacgccgctagtgcggtcgaaggtcccgatagcgaaaggtcgtaaagaggaggcgtacgccgctatgttatcattgggatataatgataaacaggtcgcaaaggcgatagaccgcgtgtcgttggaaataggtggggacgctcaaatagaggaatggataaggacagcgttgaaaattatataa

SEQ ID NO: 53594 - protein, 199 aa, Unknown
  Obtained from environmental sample
  DOMAIN (152)...(199): RuvA, C-terminal domain
  misc_feature (1)..(199): Xaa is any amino acid
MIDYIRGKLTDKELTHVSIETAGVGYSVSIPLSTYEKLPETGKDALIYIHYYVREDDVKLYGFASKDDREIFRHLITVNSVGPKVAMGIMSGISIENLVMYVNAGDTAGLKKVPGVGLKTAERIIIELKGKLGSYASSATPLVRSKVPIAKGRKEEAYAAMLSLGYNDKQVAKAIDRVSLEIGGDAQIEEWIRTALKII

SEQ ID NO: 53595 - DNA, 510 bp, Unknown
  Obtained from environmental sample
  misc_feature (1)..(510): n is a, c, g, or t
atgataataatgggtatagaccccggtaccgccgttaccgggtacggtgttatcagcgtttcgggcaactctgtttcttgggttgactcgggggtgatcgttaccgataccgccgagccgcttagtcagcggctgttgacgatttacgacgggttgtctaagaagattaatgagcactccccgggccgcgtggctgtagaggaggctttttacggcaagaacgtccacactactttggttctcggccacgctcgcggcgtggctatgctggcggcggcgcagcgggggtgcggggtgtttgagtacagtccgcgcgagatcaaaaagtcggtgacgggcaacgggaacgcgtctaaggatcaggtggagtacatggtgaagacgctcttacggccaagcggcggcaagatgcggcaggacgcttacgacgcgctggctgtggcgatgtgcgatttttacaatatggggcgggcggctttgctcataaataaggacaaaaaggataaataa

SEQ ID NO: 53596 - protein, 169 aa, Unknown
  Obtained from environmental sample
  DOMAIN (3)...(151): Crossover junction endodeoxyribonuclease RuvC
  misc_feature (1)..(169): Xaa is any amino acid
MIIMGIDPGTAVTGYGVISVSGNSVSWVDSGVIVTDTAEPLSQRLLTIYDGLSKKINEHSPGRVAVEEAFYGKNVHTTLVLGHARGVAMLAAAQRGCGVFEYSPREIKKSVTGNGNASKDQVEYMVKTLLRPSGGKMRQDAYDALAVAMCDFYNMGRAALLINKDKKDK

SEQ ID NO: 53597 - DNA, 1932 bp, Unknown
  Obtained from environmental sample
  misc_feature (1)..(1932): n is a, c, g, or t
atgcttcgcgttatacgcaatcaccggcgggccgtatacaacagccccgacgcggagtatgaagacctgcacaccataccctgcgggattgatcaggcaagctgcccggcatacctgctggacgccgcaagggccgcctgggatcgggcgctggaacttggcaaggcccacggctaccgtaatgcccaggtcagcgccattgccccaaccggcactatcggcctgttgatggactgcgacactaccggcgttgaaccggattacgcccttgtaaaattcaagaaactcgccggcggcgggtacttcaaaattatcaatcagtcggtgccccccgcgctggaagctctgggctattcgccgcaattaatagaagaaattatcgcgtatgccacgggttataaaacgcttaacggcgcgccctatatcaacccggatacgcttaaggcaaaatcttttaccccggaggcaatttccgccgcagaagacgcggtcaaatcagccctgaatctggaaggagtttttaccccctggacgcttggcagggattttgttgaaaagatccttcacattccggaatctacatggtcgctgccaggcttcagcctgcttaagcacattggctttagcgcggaggatattgcggatgcggaactgtacgcctgcggaacaatggggcttgaaaacgccccgggcctgaaaaaagaacattacgcggtttttgacaccgcgacgccgtccggcaagaacggcaagcgttcaatttcctggacagctcatatcggaatgatggcggcggtgcagccttttatttccggggctatttcaaagacgaataatatgccccactcggcaaactacgaagatgtaaaaggcgcgtatatgctttcgtggaagaacggtctgaaagcggtggccctgtaccgcgacgggtcaaaactctcgcagccgctttcgtcgtttgccccgggaaccgatcccctggccgacaccatacttaaaattgagaaagggcttgatacgccgcagccgcagattgtcgaccggaaaaatacagcccgcggactgcggaagctcctgccaagccgcagaacgggttatacgcagaaagcgaaaataaccacccacacaatttacctccgcaccggcgagtacgaagacggcagtctcggcgaaatttttcttgatatgcaccgtgagggcgcggccttccgcggcctcctgaacaatttcgcgattgcggtttcgcttggattgcagtacggcgtgccgttggaagaatacgtcgacgctttaaccttcagcaaatttgagccgaacggcccggtacaggggcatgattatgtgaagatgacaaccagcgtgattgattacatcttccgcgaccttgcgataagctatcttaaacgctacgatcttggccaagtgaagcctgaagacctcgtccctaccgctaccaaaagcgatgttgtggacagttatgaaataaagcagcgcatcagcgacaaacagagcgccgggttcaggccttataattcctcatctgcgcctgcggccggcaccggcgttttaccagccggatccgccggtctgctgccggaacaaaaaacaacacccccaggctctgcctcccccgggctgcccggccgcagtgaaaacatcaaggaaacgacaaaaggattgtcaggaagcgccgaaacataccgccagaccgcaaggccggcagaaggcgcaatttccacacagaccgcccagccgcctgttcaggtgctagcccagtcccaccctgatcagaacgaattggctaaaatcgcacaggcccgcattaaaggctacgagggagacccgtgcccctcctgcggttctttcaccctgatacggaacggcacctgcatgaaatgccatacctgcggcggcacaacaggctgctcctga

SEQ ID NO: 53598 - protein, 643 aa, Unknown
  Obtained from environmental sample
  misc_feature (1)..(643): Xaa is any amino acid
MLRVIRNHRRAVYNSPDAEYEDLHTIPCGIDQASCPAYLLDAARAAWDRALELGKAHGYRNAQVSAIAPTGTIGLLMDCDTTGVEPDYALVKFKKLAGGGYFKIINQSVPPALEALGYSPQLIEEIIAYATGYKTLNGAPYINPDTLKAKSFTPEAISAAEDAVKSALNLEGVFTPWTLGRDFVEKILHIPESTWSLPGFSLLKHIGFSAEDIADAELYACGTMGLENAPGLKKEHYAVFDTATPSGKNGKRSISWTAHIGMMAAVQPFISGAISKTNNMPHSANYEDVKGAYMLSWKNGLKAVALYRDGSKLSQPLSSFAPGTDPLADTILKIEKGLDTPQPQIVDRKNTARGLRKLLPSRRTGYTQKAKITTHTIYLRTGEYEDGSLGEIFLDMHREGAAFRGLLNNFAIAVSLGLQYGVPLEEYVDALTFSKFEPNGPVQGHDYVKMTTSVIDYIFRDLAISYLKRYDLGQVKPEDLVPTATKSDVVDSYEIKQRISDKQSAGFRPYNSSSAPAAGTGVLPAGSAGLLPEQKTTPPGSASPGLPGRSENIKETTKGLSGSAETYRQTARPAEGAISTQTAQPPVQVLAQSHPDQNELAKIAQARIKGYEGDPCPSCGSFTLIRNGTCMKCHTCGGTTGCS

SEQ ID NO: 53599 - DNA, 858 bp, Unknown
  Obtained from environmental sample
  misc_feature (1)..(858): n is a, c, g, or t
atgatgggaacaattattaagcgtcttttggtatttttcataggagttccggttattgtttttttggttatatatcttccgcacttgcatcatcttgcgtttaacattgtcgtaatactcttctccgctctgggcgcggttgaatttgcggcaatactcgataaaaagcaaatgcgagtttcaataattgaagctgttatctttggttcttttgcccctttggcatatacattaattatttgttttaattttccacaatggataattcctttatatattatgtcggctgtatgctgggtaatgctgtctttggcgtttacaggttcggtaaaaatggagaacgccataaaccgcctcgccggatgtttttccgtaattatctaccctggattttttatgtcatggattgtaaaaatgagcatatgggaaatttcaggcgctgtcctttttttcctgttaattgtattcggcaacgattccgcggcatggcttgcgggctctctttttggcgcgagcaataaaggcatgtttccggcaagcccgaataaaagcatagccggctttataggcggaataatatgcgcgataataatttccgccggcgcggtatttttaactccttttatttttccgggaaatgataatattgccaaaataattattcttggcgtcattaccgccgttttcggaaatctgggagatttggcggaatccgccattaaaagaagcgttaatattaaagattccggcaacctgatgctggggcgcggcggaattctggattcaatcgactctgtctcgcttgcggctccggtatactttattctttttaacatgtttttttataacttccaatga

SEQ ID NO: 53600 - protein, 285 aa, Unknown
  Obtained from environmental sample
  DOMAIN (6)...(280): Cytidylyltransferase family
  misc_feature (1)..(285): Xaa is any amino acid
MMGTIIKRLLVFFIGVPVIVFLVIYLPHLHHLAFNIVVILFSALGAVEFAAILDKKQMRVSIIEAVIFGSFAPLAYTLIICFNFPQWIIPLYIMSAVCWVMLSLAFTGSVKMENAINRLAGCFSVIIYPGFFMSWIVKMSIWEISGAVLFFLLIVFGNDSAAWLAGSLFGASNKGMFPASPNKSIAGFIGGIICAIIISAGAVFLTPFIFPGNDNIAKIIILGVITAVFGNLGDLAESAIKRSVNIKDSGNLMLGRGGILDSIDSVSLAAPVYFILFNMFFYNFQ

SEQ ID NO: 53601 - DNA, 879 bp, Unknown
  Obtained from environmental sample
  misc_feature (1)..(879): n is a, c, g, or t
atgaaaaaacgcatttctattctcggcgcgacaggttctatcggaaaaagctcccttgatgtaatttcgcgcaataaagatatttttgacgtggttcttctttcagctaacacaaaaggggaagaactggataaattaaaaacactttggccttccgccgtttgtgtgctttcaggcattgaaggcggaaaagataaacttcttgccgctatagcagaagcaaatgccgatattacaataaacggcatatcgggatcaggcggccttgaaccgtctctggcggcgatagaatcaggctcatgcctagcgctcgcaaacaaggaaacgctggtcatggcggcccccctcgttttccgcctcgcgaaagaaaaaaacgtaaaaataattcccgttgattccgaacattcggcaattttccgcctgatacaggcacatgccgacggcgaaaaagaaacggtaagcgaaataatattaaccgcttcaggcggtcctttcaggaaaatggggcttgaggacttgaaaaaagtcaccgcgaaggaagcgctttcccaccccacatggaaaatggggccgaaaataacgattgattccgcttcaatggcaaacaaggggcttgaaattatcgaagcctgcgctctttttgacatgcctcaggataaaatcaaggtgataattcaccctcaaagcatcgtacattccatggtaaaactctgtaacggcgcgatttacgcccagctttccaaaccggatatgcgaaaccccattcatgacgcgcttttttggccgaagacggcgccattggatatggaagcgataaattttgattctcttacccttgaatttgaaaagnccggacattcaaaaattccccatgcttga

SEQ ID NO: 53602 - protein, 292 aa, Unknown
  Obtained from environmental sample
  SIGNAL (1)...(19)
  DOMAIN (5)...(114): 1-deoxy-D-xylulose 5-phosphate reductoisomerase
  misc_feature (1)..(292): Xaa is any amino acid
MKKRISILGATGSIGKSSLDVISRNKDIFDVVLLSANTKGEELDKLKTLWPSAVCVLSGIEGGKDKLLAAIAEANADITINGISGSGGLEPSLAAIESGSCLALANKETLVMAAPLVFRLAKEKNVKIIPVDSEHSAIFRLIQAHADGEKETVSEIILTASGGPFRKMGLEDLKKVTAKEALSHPTWKMGPKITIDSASMANKGLEIIEACALFDMPQDKIKVIIHPQSIVHSMVKLCNGAIYAQLSKPDMRNPIHDALFWPKTAPLDMEAINFDSLTLEFEKXGHSKIPHA

SEQ ID NO: 53603 - DNA, 720 bp, Unknown
  Obtained from environmental sample
  misc_feature (1)..(720): n is a, c, g, or t
ttgaaaaacattaaaggcataaaaatttcaaatgaaaacgggaatctcggactgggatataaaagaacggcttattatcataacggcggatacacggcggtatcatttaaattgttattggatcccgataataatattattaaacacagaataaaaatttccggcaatttggacgctttcaatgttctggacaaggaatatcaattatataccgcgcttgataaatataaaaaagaaacatacgccaacagaatatatttaaaatcagaaaaaaccgacggcgagcttttttctaaaatgatagtttgttttaatgaatatttcggaataagtgaaaaaatcaatataccggaaaaaatatacagcgattattccgcattgatcgatccgtttgatgaggatatttacggatttttagtcggtcttgggggcagcgttccgggcggccggtcggcaatagaaaggattaaattagaaaaaaacaaagatatattaaaacttattatggcctcgccgaatccaacaggaagaatttacgctattgaggcaatcagcggcggaaaaatcgataatttaattaataataaagaatattcatatatgctgaataaactttttaaattaaaaattccaattgaggctggctccggctgtataattaccagtataacaatagattcatacaaaaaagtaattgaagcgatgaaatatgtattttag

SEQ ID NO: 53604 - protein, 239 aa, Unknown
  Obtained from environmental sample
  misc_feature (1)..(239): Xaa is any amino acid
MKNIKGIKISNENGNLGLGYKRTAYYHNGGYTAVSFKLLLDPDNNIIKHRIKISGNLDAFNVLDKEYQLYTALDKYKKETYANRIYLKSEKTDGELFSKMIVCFNEYFGISEKINIPEKIYSDYSALIDPFDEDIYGFLVGLGGSVPGGRSAIERIKLEKNKDILKLIMASPNPTGRIYAIEAISGGKIDNLINNKEYSYMLNKLFKLKIPIEAGSGCIITSITIDSYKKVIEAMKYVF

SEQ ID NO: 53605 - DNA, 843 bp, Unknown
  Obtained from environmental sample
  misc_feature (1)..(843): n is a, c, g, or t
ttgcggattcccacgcgggtgggaaaaacttctctggcgcgggcgttggctcagtctatccgctggaggccggaagatatggcggcggtcgccaataacggcggcgcgggaaacagcgccgcaaaaatggaagggttcagccgtatccaatgtacggtcgatcttcttccgcaggatatacttggctataaccgttttttgggacattcgggagaacttatattcaacaaaggacctatctttgcgcattttgtgttatgtgacgaaattaacctgcttactcccaaaactcagggaagtttttttcaggttatggaagagcaaagcgttactatagaagggaaactgtaccgcctgcatgatccgttttttataatcgctacaatgaaccttaaaggcgttcacttgtttcccctgcctgttcctcagcttgatcgttttatgatccgcctctcgcttggttatccatgtgaagaagatgagaaggaaattatcaacaggcacggcagaattgacgcatggaacaattttgacagcgttattgacagcgcagatttaatccgctggaagaaaatggttgacgaagtgcaaatacacgctgatgtaacctcgtatcttgttaaatgcgtaaggctgacaagagtacaccccgatattgaaactccggcaagtcctcgttccggcgtgcgtatttcgcgccttgcccgttctctcgctttatgccgcggtatggactacgttcctattgatataataaaggaaatatttattcactcaatggctcaccgtattattacccgtgatccttccataccgcctgaacgccgctgcaaagtatattaa

SEQ ID NO: 53606 - protein, 280 aa, Unknown
  Obtained from environmental sample
  DOMAIN (25)...(149): ATPase family associated with various cellular activities (AAA)
  misc_feature (1)..(280): Xaa is any amino acid
MRIPTRVGKTSLARALAQSIRWRPEDMAAVANNGGAGNSAAKMEGFSRIQCTVDLLPQDILGYNRFLGHSGELIFNKGPIFAHFVLCDEINLLTPKTQGSFFQVMEEQSVTIEGKLYRLHDPFFIIATMNLKGVHLFPLPVPQLDRFMIRLSLGYPCEEDEKEIINRHGRIDAWNNFDSVIDSADLIRWKKMVDEVQIHADVTSYLVKCVRLTRVHPDIETPASPRSGVRISRLARSLALCRGMDYVPIDIIKEIFIHSMAHRIITRDPSIPPERRCKVY

SEQ ID NO: 53607 - DNA, 1107 bp, Unknown
  Obtained from environmental sample
  misc_feature (1)..(1107): n is a, c, g, or t
atggtctctatcggcgagggggcgcagcttgacatccgtcagcagatagaatcgatgggcaccaacgtactcaccgtccggcccggcaacataagcgcgcgcggcggtattcgcatcgcgcaagggcggcgcacactcactattcaggatgttgacaagcttcgcagtctaccaggcatagccgccatctcgcccgtctcccgcgccacggggcagatagtcggcggcacgggcaattggcgcactcaggcgttcggcgttaccgccgactacctatcgatacgcagttgggagctacaagacggaacgatattttccgatcaggacatcaaaagctcggctaaggtcgccgtaatcggcaagaccgtggtcaacgagctgttccccaatctcgatcccatcggccaatccatccgcatcggctctatcccagtcaaggtgataggcgtattgcgggagcgcggtcagggcccggcgggcgacgatcaggacgacgtcgtactcatgcccgtcaccacggtcatgcagcgtatgaacggcacgacgcggttcgtcgatcagataatgatgagcgccgagtcgatggacgcgataaacgaagttcaggcgcaggcggaggaggctctgcgtgcggcgcaccgcttgtcgccgtcggaggagagcgatttccacatccgcaaccagtcggagatgatggaacgcgctaccgagaccgcccgcgtaatgaccatgctcctcggcgcgatagccggcatctcgctcgtcgtaggcggcatagggatcatgaacatcatgctcgtgtcggtaacggagcgcacgcgagaaatcgggatcaggatggccgtgggggcgcgcgagggggatatcttaatgcagtttttgatagaggcggtagttttaagcgtgacgggcgggcttatcggcgtggccctgtcgatagggcttatgtgggtgatgaacgacttcgtgggggtgacgaccgtgttcgcgccgcagacgatactgatgtctatggggttctcagggttcgtgggcgtgttcttcgggttctatccggcccggaaggcggcgcggctcaatccgattcaggcgttacgctttgagtag

SEQ ID NO: 53608 - protein, 368 aa, Unknown
  Obtained from environmental sample
  DOMAIN (185)...(361): Predicted permease
  misc_feature (1)..(368): Xaa is any amino acid
MVSIGEGAQLDIRQQIESMGTNVLTVRPGNISARGGIRIAQGRRTLTIQDVDKLRSLPGIAAISPVSRATGQIVGGTGNWRTQAFGVTADYLSIRSWELQDGTIFSDQDIKSSAKVAVIGKTVVNELFPNLDPIGQSIRIGSIPVKVIGVLRERGQGPAGDDQDDVVLMPVTTVMQRMNGTTRFVDQIMMSAESMDAINEVQAQAEEALRAAHRLSPSEESDFHIRNQSEMMERATETARVMTMLLGAIAGISLVVGGIGIMNIMLVSVTERTREIGIRMAVGAREGDILMQFLIEAVVLSVTGGLIGVALSIGLMWVMNDFVGVTTVFAPQTILMSMGFSGFVGVFFGFYPARKAARLNPIQALRFE

SEQ ID NO: 53609 - DNA, 1611 bp, Unknown
  Obtained from environmental sample
  misc_feature (1)..(1611): n is a, c, g, or t
gtgaaataccagaatttagagctcgacccgttccaaatggccgcggtcgaggctatcgacaaaggcgagtcgctcatcgtcgccgcccctacgggatgcggtaagacgctcatcgccgagtacgcggtcgaggagtctgtgaagcagggcaagcgcgccgtctacaccgcgcccatcaaggcgctgtcgaaccagaagtaccgcgacttcaggaagcgcttcggcgacgaggccgtgggcatccagacaggggatgtcacgatcaaccaagacgcgcagctcctcataatgaccaccgagatattccgcaacctcatcctcgaaaactccgggcggctgaacgacatctattacgtgatattcgacgagatccactacttggacgacccggagcgcggcacggtgtgggaggagagcatcattctggccccgcagggcatccgtttcatgtgcctcagcgccacggtgccgaacatcggcgaactggctacgtggatgggggcggtgcggaacacgacgtttaaggtgattgaggagacgcatcgcccggttccgctgcagcacgcattctatcaccccaagttcgggttcatcacaataaagggcattcggcgcaagttcaagagcagccctgaggtgcggaagcgctttcagcggcgcaagccgtcgtcgcgaaagatcgtgcagttcgctatacgggagggacatctgcccatactatacttctgcttcaaccgccgcgcctgcgaacgcaacgccgagcagcacatgatgcacttagacttgctgacggacgccgaacgcgtccgcgtatcgcaacttgtggacgaattggtgcgccaatacggcataggcgactacgagcgcctcaacttcttgcggcagctctgggagtccggctgcgcctaccaccacgccggaatacttcccgccgcgaaagagattgttgagcgattatttaccatgggattgataaaactgttattttgcacggagacattcgcgctcggcgtcaatatgccggcgagctctgtgatattcgacgagcttgaaaagttcgacggcgtgcagttcaactatttgatgacccgcgaatacaaccaaatggctggccgcgccgggcggcgcgggatggacgaggtgggctacgtttactcgcaggtaattccggaggcgaccgacccggatcaacttgagcgcatactctacggcgccaacgagcgcataaacagccgtttttacgcttcgtactcgacaattctctcactgtacagccaattcggcgacggcgcgttcgatattttccgcaagagccttcacaatttccgtaaaggcgtattttcaatgtcgaagatatatcaaaaagaggaggcgcagataaggaatagaataaagttcctccaatcaagcggtttcttggacggtactaaactgacccccaaaggacagttggcggcggcggtaagcggttacgaaatacaaaccgcagagctctactactgccgtgatttcgaggatgtctccgcggcgcagctgccggtgttacttgccgcgcttatcaccgaagaggcgcgcagccgcaaagccccgccgatcaccaacgtcgcgtga

SEQ ID NO: 53610 - protein, 536 aa, Unknown
  Obtained from environmental sample
  DOMAIN (5)...(158): Type III restriction enzyme, res subunit
  misc_feature (1)..(536): Xaa is any amino acid
MKYQNLELDPFQMAAVEAIDKGESLIVAAPTGCGKTLIAEYAVEESVKQGKRAVYTAPIKALSNQKYRDFRKRFGDEAVGIQTGDVTINQDAQLLIMTTEIFRNLILENSGRLNDIYYVIFDEIHYLDDPERGTVWEESIILAPQGIRFMCLSATVPNIGELATWMGAVRNTTFKVIEETHRPVPLQHAFYHPKFGFITIKGIRRKFKSSPEVRKRFQRRKPSSRKIVQFAIREGHLPILYFCFNRRACERNAEQHMMHLDLLTDAERVRVSQLVDELVRQYGIGDYERLNFLRQLWESGCAYHHAGILPAAKEIVERLFTMGLIKLLFCTETFALGVNMPASSVIFDELEKFDGVQFNYLMTREYNQMAGRAGRRGMDEVGYVYSQVIPEATDPDQLERILYGANERINSRFYASYSTILSLYSQFGDGAFDIFRKSLHNFRKGVFSMSKIYQKEEAQIRNRIKFLQSSGFLDGTKLTPKGQLAAAVSGYEIQTAELYYCRDFEDVSAAQLPVLLAALITEEARSRKAPPITNVA

SEQ ID NO: 53611 - DNA, 825 bp, Unknown
  Obtained from environmental sample
  misc_feature (1)..(825): n is a, c, g, or t
atgccaaaatcactattgatcatcgccgccgtcgccctgctgttctcttgttctcccggaggcaaaaacgacaccgcctcccgcgccgacgccggcgccttccactcccttgccgacttcagcggcaaaaagatcgccagcgaagccggcaccgtcttctcaatattcatcaaccgcgtaatccccaacgttaggcacgtgtattgctttcatttcgaggaattggtcgccgtcctccacaccgacgccgtcgacgccgtcgccctcgacatgcccgtggcgctttatctggcggcgaacaacaagaatttcgcggtctttccctacgtcgtctcggtggacacctacggtttcgccgtccccaagggatcgtcgctttgcagccgcgccaacgaggctctcacgactctgaaggagagcggagtgatagacgacgccgagatgtactggttcgccgccgacgaggccggcaaggagaagtcgatgccggtactgactcaccgcccccgtttcaacggatccgccggcaccataaggttcggctgcgaaaacacgctgatccccatgagctacacgacacccgacggcaaacccacgggtttcgacatagacatcctctacaggatagcctacgagctgaacatgaaggtagtggtcaaaacgatgcacttcaccgaactcttccccgccctcctagacggccgtttggacatgataggcggtagcatgacaatcaccgaagaccgcaaagaatacgtagatttcataggcccctatttcgaaggcggcacggcgctggtggtaaagaagaagaacctgccgtaa

SEQ ID NO: 53612 - protein, 274 aa, Unknown
  Obtained from environmental sample
  SIGNAL (1)...(22)
  misc_feature (1)..(274): Xaa is any amino acid
MPKSLLIIAAVALLFSCSPGGKNDTASRADAGAFHSLADFSGKKIASEAGTVFSIFINRVIPNVRHVYCFHFEELVAVLHTDAVDAVALDMPVALYLAANNKNFAVFPYVVSVDTYGFAVPKGSSLCSRANEALTTLKESGVIDDAEMYWFAADEAGKEKSMPVLTHRPRFNGSAGTIRFGCENTLIPMSYTTPDGKPTGFDIDILYRIAYELNMKVVVKTMHFTELFPALLDGRLDMIGGSMTITEDRKEYVDFIGPYFEGGTALVVKKKNLP

SEQ ID NO: 53613 - DNA, 1533 bp, Unknown
  Obtained from environmental sample
  misc_feature (1)..(1533): n is a, c, g, or t
gtggcggtggctatgggcggcggggcgttcaacctcacctatccgcgcgtcgtgaaagtcgatctgacgggggcgctgcctccttgggtctcggctaaggacatcatcctcgccctcctcgagattttgggcacaaaggggaacgccgactccatcgtcgagtacggcggggcggcggtcgcggcgctcagcgtccccgaacgggccaccatgacaaatatgggcgcggaactcggagtcatcacatccgtattcccgtccgacgggaagacgcgctcgttcctgaaagcccaagggcgcgagggggacttcgccgaggtatccgccgacggcggcgcctcttacgaccgcgtgataaatatagacctctcgacgctcgccccgcgcgccgcctgcccgcactcgccgggcaacgtgaagaagctctcggagctcagcggcgcgaaggtcgaccaggttctcgtaggctcctgcacgaatgcctcttatagggacataatgctcacggcggcgatgctgaaggggcgcaaagtatcgccatccgtctctctcggcgtggcctgcgggtcgcgccaagttttggagatggtcagcaaaaacggcgccctcgccgacatagtctcggccggggcgaggattctggagagcgcctgcggcttctgcataggcaactcggcggcgccgcgaaccgacgccgtgtccgtacgcacctctaaccgcaacttcttcggcagaagcggcaccccctcggcccaagtatacctcgcatcccccgaagccgcgatagccgccgccctgacgggagaaatgcgcgacccggaagagttcttcgctagtcaaaaatacccgcagataaccgtccccgataactttatcatagacgacaccatgatattagaacccgccgcagacccaacccaaataaccatatttcgcggcccgaacattggtgcccccccctcaaacgagccatgccccgacacgataaacggacaagtaaccataaaagtaggcgacaaaatcaccacagaccacgtaatgcccgccggcagccgcctaaaataccgctccaacatccaaaaatacgccgagttcgtcttcgagcgagaggacccgacgttcgccaaaagagcccttgacaacaagggaaaaggaattaacaacataatagtagccggagaatcctacggtcaaggctcatcaagagaacacgccgcgatatgccccatgtatctaggcgttaaaatggtaatatccataaccatggagcgcatacacagagcgaacctaataaacttcggcataatcccggcgtttttcgaaaccgccgatgattataataagctaaaccgcgacgacgaactgacaatttccgatgtccgtaatcgtataaataaagacgaaggcctaatagcggtcagaaagagcgatggcttgtcgattaagctgaatgtagagttgacagagagagaaaaagggatgattctagcgggagggttgatcaatgagtgtcgtgggagttcgggaggataa

SEQ ID NO: 53614 - protein, 510 aa, Unknown
  Obtained from environmental sample
  DOMAIN (330)...(443): Aconitase C-terminal domain
  misc_feature (1)..(510): Xaa is any amino acid
MAVAMGGGAFNLTYPRVVKVDLTGALPPWVSAKDIILALLEILGTKGNADSIVEYGGAAVAALSVPERATMTNMGAELGVITSVFPSDGKTRSFLKAQGREGDFAEVSADGGASYDRVINIDLSTLAPRAACPHSPGNVKKLSELSGAKVDQVLVGSCTNASYRDIMLTAAMLKGRKVSPSVSLGVACGSRQVLEMVSKNGALADIVSAGARILESACGFCIGNSAAPRTDAVSVRTSNRNFFGRSGTPSAQVYLASPEAAIAAALTGEMRDPEEFFASQKYPQITVPDNFIIDDTMILEPAADPTQITIFRGPNIGAPPSNEPCPDTINGQVTIKVGDKITTDHVMPAGSRLKYRSNIQKYAEFVFEREDPTFAKRALDNKGKGINNIIVAGESYGQGSSREHAAICPMYLGVKMVISITMERIHRANLINFGIIPAFFETADDYNKLNRDDELTISDVRNRINKDEGLIAVRKSDGLSIKLNVELTEREKGMILAGGLINECRGSSGG

SEQ ID NO: 53615 - DNA, 1857 bp, Unknown
  Obtained from environmental sample
  misc_feature (1)..(1857): n is a, c, g, or t
gtggcagcatttatgggaatacgctccatcagcagcctaaaatctgtggcggaagcagccaaccaaatgtacgacacaggagccgtgcccctaggcatctttgtgggcagcgcggtgaaagtgcaagaccttagggttggggcacgcaactggcaaatcgcaaggtcaactgacgagcgcgcgaacatcatcaaaggcatgagggcttccaacgccgctctggagcaggaattaatcgctcaggagaaactcacagacgaaacaggccagaagcttttgcgaaaagtgtcaaaagtaaccgatgatttcatagacacgcttgaggcttttgccaaacgagccaaaaattattctcctgaaggggtctgcttagacccactgccagatggtcttaccaaagttggctcacaagcactggctgatttggatgccgtaaaagaatacatgaccaatcaaacccgccatctcgcagacactgcagcagatcatgcctcatcaagcgtaagccaggcaaccgttattttggtggttgtgattctcatcgccattgccctcggcatattcctaaccctttccataaccaaccctctgtcaaggacagttgccactcttggcaagatagagaaaggcgatatgaccgttcgcgtgaatctggaacgcggagacgaattcgggcagctatccaaatcagtggacaacgttgcctcaagactgcaaaccataatgaaagatttgcgtacggaatctgacaaccttgcaagctctgccgaagagctttccgtgataagcaagcagcttgtgtcaaactccgaagaaacagccaacaagagcaaggctgttcttggtgttgccgaggattgcagcaaaggagttaccgccatagccagcacagccgaagaagcatccgcccagataagcgatgtggcaagctcggttgagcagatgactgtgaacataaacacaatggcgagcggcgcagaacaagcatccgcaaacgtgaacgatgtggcaaatgcggttgaccaagttgcaagcaacatcaacgcaatggcaagcgcggcagaagaggcctctgtgaacgcaaacgaagtggcaggcgcggcagagcaaatgtctgcgaacatgaacactgttgcaacagccatagaagagatgagcacaagcataaacgaaatctccaccgttgcaggcgaagcccgtacggttgcaggcgaagccaccgtgaagtccaaagaggcaacagaggtgatgaacaagctgggtatagcggcaaaggaaatcggtcaggttaccgatgttatcaaaaagatagccgacaaaaccaaccttctcgctttgaacgccaccattgaggcggctagtgcaggcgaggcaggcaaaggatttgcggttgttgcaaacgaaatcaaagagcttgctaaccagagcgcgcagagcgcggacgatatagcccagcgtattgagggcatacagagcggcacaagcaatgcggtgactgtgataaacgatgtgtctcagataatagtgaagataaacaaaagtgctgaggcaatagcaggtcacgccgcacagcanaccaaagcgagcggtgagattgcaaacaacgttgcgcaggcaaacacaggcgcaaagcgtgttgctggagccatcggtgaagttgcaaagggcagtaaagacattgccaaaaatgcagctagtgccgcaaagggaaccgccgatgcaagcaatggtgctgcaagcgtgaaccagattgcgaacgacagtaccaaaggcgctcatcaggttgacaaatatgccggtgagcttgcgaaggtggctggcagcttgaaaggcgttgtgaaccagtttagagtttaa

SEQ ID NO: 53616 - protein, 618 aa, Unknown
  Obtained from environmental sample
  DOMAIN (171)...(240): HAMP domain
  misc_feature (1)..(618): Xaa is any amino acid
MAAFMGIRSISSLKSVAEAANQMYDTGAVPLGIFVGSAVKVQDLRVGARNWQIARSTDERANIIKGMRASNAALEQELIAQEKLTDETGQKLLRKVSKVTDDFIDTLEAFAKRAKNYSPEGVCLDPLPDGLTKVGSQALADLDAVKEYMTNQTRHLADTAADHASSSVSQATVILVVVILIAIALGIFLTLSITNPLSRTVATLGKIEKGDMTVRVNLERGDEFGQLSKSVDNVASRLQTIMKDLRTESDNLASSAEELSVISKQLVSNSEETANKSKAVLGVAEDCSKGVTAIASTAEEASAQISDVASSVEQMTVNINTMASGAEQASANVNDVANAVDQVASNINAMASAAEEASVNANEVAGAAEQMSANMNTVATAIEEMSTSINEISTVAGEARTVAGEATVKSKEATEVMNKLGIAAKEIGQVTDVIKKIADKTNLLALNATIEAASAGEAGKGFAVVANEIKELANQSAQSADDIAQRIEGIQSGTSNAVTVINDVSQIIVKINKSAEAIAGHAAQXTKASGEIANNVAQANTGAKRVAGAIGEVAKGSKDIAKNAASAAKGTADASNGAASVNQIANDSTKGAHQVDKYAGELAKVAGSLKGVVNQFRV

SEQ ID NO: 53617 - DNA, 516 bp, Unknown
  Obtained from environmental sample
  misc_feature (1)..(516): n is a, c, g, or t
gtgctaatctctttaatagcagccgtcgcagaaaatggcgtgataggaaaagacaataaattgccttggcatttgcccgcggatttgcaatttttcaaaaaaacaactattaaccacccaataataatgggacgcaaaaattttgaaagcatcggcagaaccttgccagaacgaaccaatattatcctaacccgaaatcagaatttcaaagttccagaaggttgcataaaagttcactcgctaaaagcagcttttgagattgcagaaaaaaccgctacagacgaatgttttgttataggtggctccgagatttacaaagaagccctgcccttttgccaaaaactatacataacaagggtgcatgggatttttgaaggcaactcttttatgcccgaatttgaaaacgaatttcgcagagttagctgcgaaacccatttcaaagatgaaaaaaataaatgggattatgattttgaagttttagagcaccctaccccttctaaattcaaccaagtttga

SEQ ID NO: 53618 - protein, 171 aa, Unknown
  Obtained from environmental sample
  DOMAIN (2)...(162): Dihydrofolate reductase
  misc_feature (1)..(171): Xaa is any amino acid
MLISLIAAVAENGVIGKDNKLPWHLPADLQFFKKTTINHPIIMGRKNFESIGRTLPERTNIILTRNQNFKVPEGCIKVHSLKAAFEIAEKTATDECFVIGGSEIYKEALPFCQKLYITRVHGIFEGNSFMPEFENEFRRVSCETHFKDEKNKWDYDFEVLEHPTPSKFNQV

SEQ ID NO: 53619 - DNA, 795 bp, Unknown
  Obtained from environmental sample
  misc_feature (1)..(795): n is a, c, g, or t
ttggaagaagagcagtcaattaaagatgccctgctgaatgtttattgggacagggtatttacgcctagcagtggcgaagaggaacttcatccatatgggtattggtataattcttctgtgttgctcaccttgcccgaacacgaaagaaacacctttaaaaacgtaatgaagcacaacgaagaaattcaagaagatttgtgggggaaaaacggtcacaaacttttggaagtactttccaaagaagccgatatgctcgtatgtgcagaagatttgggcgcagttccgaactgcgttccgggtgttttggaaaaccttggcattttggcgctcagggttgagcggtggcaccgcgattggaagcaagccggacagccttatgtgccgctttctcagtatcccaggctctctgtttgcacaacaagcaaccacgactcctccactctactaggtctttggacagagcacgattttgacaaggatttttactggaagcatattggaggggacggttctgcacccgatgttttgaatgctgggcacgtgaacatcataatcaaaaacttgttccattcaaacagccttgttgcaattttgcctcttcaagattttatggcactatctcaaaaattcattccgcaaaatccagaaatagacagggtgaatgtccccggcaccataggtcctcaaaactggagctggagaatgccttgccatttggaagatttgctaaaagagagtgagcttaaccacgaaatttcaaacttggttgaatttagaaggggtagggtgctctaa

SEQ ID NO: 53620 - protein, 264 aa, Unknown
  Obtained from environmental sample
  misc_feature (1)..(264): Xaa is any amino acid
MEEEQSIKDALLNVYWDRVFTPSSGEEELHPYGYWYNSSVLLTLPEHERNTFKNVMKHNEEIQEDLWGKNGHKLLEVLSKEADMLVCAEDLGAVPNCVPGVLENLGILALRVERWHRDWKQAGQPYVPLSQYPRLSVCTTSNHDSSTLLGLWTEHDFDKDFYWKHIGGDGSAPDVLNAGHVNIIIKNLFHSNSLVAILPLQDFMALSQKFIPQNPEIDRVNVPGTIGPQNWSWRMPCHLEDLLKESELNHEISNLVEFRRGRVL

SEQ ID NO: 53621 - DNA, 1137 bp, Unknown
  Obtained from environmental sample
  misc_feature (1)..(1137): n is a, c, g, or t
atgaattacggtaaaatttcatcttatcaaacaggcgttgtggttcctttgttttctctgctttcaaaagatagcattggcattggcgagtttttagacctcattccctttgggaaatgggcaaaaaaatgcgggttggatttaatccagcttttgccggtaaatgacacaggcgaagaaccaagcccttatagcgcaagaagcgcattcgctcttaatcccgtatatatacgcttgcaagaaatagaaggcgcacacgagattttaggcgaagaaccggagaaacacaataaaaagtttatgaaacatccgcgcattccttatgtggaagtggttcgctacaaacgccacgccttgcgcgagattttcaacaaaagaaggcacgaaattttaggacacgagcatttcacaaaatggatggaacagaacgaatgggttaattcttatgccgtattttgtgccctcaaagccgaaaatcacgaggcttcgtggaaacattgggaaaaaaaagaaaaacccaaagcaagtgatgttatgtttcaaaaatggatgcaatgggttgcagaagaacaatttttaaaggctgtttcggaactcaacaaactaggcattcgcttaaaaggcgatattcccattttaataaacgaagatagcgcagatgcttggcactatcctcagtttttcagcttggacaaccgtgccggagcccctcccgatatgttctgctacagtgggcaaaattgggcattcccaacttacaaatgggataaccttgaaaaggaaaattttagctggtggcgcgatagaattaaacacgccgcaaaattttaccacgcgtatcgcatagaccacgttcttggatttttcagaatatgggtggtgccagaacaggaatacaccggaattttggggcattttgttccctccattccaatttatatgaatgaacttgcgcaagccggcattccaagggaaaccgtgcattatctaaccaacccaaattttggagacgaacaacttcaaagtaggtttggctcagatacggaaacggcaaagcaaaaatattttgagcctttgcaaggctcttatggccgctatattttgaaaaaagaataccactccgagcgttcaatttag

SEQ ID NO: 53622 - protein, 378 aa, Unknown
  Obtained from environmental sample
  DOMAIN (15)...(378): 4-alpha-glucanotransferase
  misc_feature (1)..(378): Xaa is any amino acid
MNYGKISSYQTGVVVPLFSLLSKDSIGIGEFLDLIPFGKWAKKCGLDLIQLLPVNDTGEEPSPYSARSAFALNPVYIRLQEIEGAHEILGEEPEKHNKKFMKHPRIPYVEVVRYKRHALREIFNKRRHEILGHEHFTKWMEQNEWVNSYAVFCALKAENHEASWKHWEKKEKPKASDVMFQKWMQWVAEEQFLKAVSELNKLGIRLKGDIPILINEDSADAWHYPQFFSLDNRAGAPPDMFCYSGQNWAFPTYKWDNLEKENFSWWRDRIKHAAKFYHAYRIDHVLGFFRIWVVPEQEYTGILGHFVPSIPIYMNELAQAGIPRETVHYLTNPNFGDEQLQSRFGSDTETAKQKYFEPLQGSYGRYILKKEYHSERSI

SEQ ID NO: 53623 - DNA, 678 bp, Unknown
  Obtained from environmental sample
  misc_feature (1)..(678): n is a, c, g, or t
atgtcaaaaacaggaaatattaaggcgcttatcattgataatcatccgctttttattgtggggctttcatctcttcttgagaagaccgctaatattaatattatcggcacggccgataattattccgacgcgttagaaatagccgaaaaggaaaaaccatctttagtactgacggaaatccgccttggcaaagaaaacgggttggattttattaaaaaattgaagtctataactcctggagccgtgattttaataatttcattacttgacgagcgtttttactctgaaagaattcttcgtcttggagccagaggatatgtttcaaaaacagaatcggcggacactataatggaagctataaatacggtcttgaataaaaaagtttatttaagcggaaatgaaagggaaaggatatttcacacagcggaagaaaacacggacaagtgtttaaaggaagactggaccgattccatgcataaactttccgaccgcgaattacaggttttttcacttgttgccaaaggattaggtactactgatattgcggccaagttaaaattaagcaagaaaacagttgatacccacaaggaacatacaaagaaaaaattgcatatcaaaacatcgatggaactcaggcagaaggcgatagaatgggctaaccactcaactaacctttaa

SEQ ID NO: 53624 - protein, 225 aa, Unknown
  Obtained from environmental sample
  DOMAIN (151)...(203): Sigma-70, region 4
  misc_feature (1)..(225): Xaa is any amino acid
MSKTGNIKALIIDNHPLFIVGLSSLLEKTANINIIGTADNYSDALEIAEKEKPSLVLTEIRLGKENGLDFIKKLKSITPGAVILIISLLDERFYSERILRLGARGYVSKTESADTIMEAINTVLNKKVYLSGNERERIFHTAEENTDKCLKEDWTDSMHKLSDRELQVFSLVAKGLGTTDIAAKLKLSKKTVDTHKEHTKKKLHIKTSMELRQKAIEWANHSTNL

SEQ ID NO: 53625 - DNA, 1257 bp, Unknown
  Obtained from environmental sample
  misc_feature (1)..(1257): n is a, c, g, or t
atgaaagataattcatcggttctttttaatgactcatggaaatttttacttggagacgtgaaaaatgcctattcggtgaatttttgcgaccgcacatggaaaaacgtggatcttccgcatgattgggtcatatcacagccgttttttcgcgggacgaaagacggatggacagaccaaagcaaacagggatttttcgtgtgggaaggcgtttgctggtaccgcaaggaatttttgctgtccggtaccagcggcaaggctgtgtgcgtttattttggcggagcgtaccgtaacagcaaggtttatgtaaacggaaaggaagcgggcggacgcgcgtcgggttacgtaagttttgaaattgacataactgaatttgttaaagatggaaaaaatctgattgcggtgcggctggataacggctgcgaagcccccgacaggtggtattcaggttcaggattatacagaaacgtgttattaaaaattcttcccgcgatccatataaaaacatggggtattcatgtagagatagaacagaatgacgttactgttacgacgacaattgtaagccgcgggcaatccgcaaaaggtaatttaaaccttcaaatatttaagcctgacggaagccttgcggcagagaatgcggttctttttgacatgaacgggaaaaatgaaataaacgttagtcaaaaagtcagtatcaaaaatccggcgttgtggtcaagtgagaacccgaatctgtaccgcgccgttgtcaatattgaaacaggctctgagggaatgccggaagaagtaaaattcggctttcgtaccgttaaaattgaatataaaaagggaatgacagttaacggaaaaaaaataaaacttaaaggcgtttgcctgcaccacgactgcggaataaccgggtcggcttattatgacgaggcgtggaggagaaggcttttaacgcttaaaaccctggggtgtaacgcgatcagaaccagccataatccgccagcgcaggaattattggatctatgcgacgagcttggtttttatgttatagacgaatgttttgacaaatggaaaagcggatattacgcggcgcatttgactctgacgcccgccgcgatcttacggattttattatccgcgaccgcaaccatccgtctgtgtttttatggagcgtcggcaacgaggttgaaaaccagggcgcgccggaaatgctggaaatccaaaaaacgctcgtntccgttgtccgcggccttgacgaccgcccggtaa

SEQ ID NO: 53626 - protein, 418 aa, Unknown
  Obtained from environmental sample
  DOMAIN (164)...(268): Glycosyl hydrolases family 2, immunoglobulin-like beta-sandwich domain
  misc_feature (1)..(418): Xaa is any amino acid
MKDNSSVLFNDSWKFLLGDVKNAYSVNFCDRTWKNVDLPHDWVISQPFFRGTKDGWTDQSKQGFFVWEGVCWYRKEFLLSGTSGKAVCVYFGGAYRNSKVYVNGKEAGGRASGYVSFEIDITEFVKDGKNLIAVRLDNGCEAPDRWYSGSGLYRNVLLKILPAIHIKTWGIHVEIEQNDVTVTTTIVSRGQSAKGNLNLQIFKPDGSLAAENAVLFDMNGKNEINVSQKVSIKNPALWSSENPNLYRAVVNIETGSEGMPEEVKFGFRTVKIEYKKGMTVNGKKIKLKGVCLHHDCGITGSAYYDEAWRRRLLTLKTLGCNAIRTSHNPPAQELLDLCDELGFYVIDECFDKWKSGYYAAHLTLTPAAILRILLSATATIRLCFYGASATRLKTRARRKCWKSKKRSXPLSAALTTAR

SEQ ID NO: 53627 - DNA, 861 bp, Unknown
  Obtained from environmental sample
  misc_feature (1)..(861): n is a, c, g, or t
atggaaaagcggatattacgcggcgcatttgactctgacgcccgccgcgatcttacggattttattatccgcgaccgcaaccatccgtctgtgtttttatggagcgtcggcaacgaggttgaaaaccagggcgcgccggaaatgctggaaatccaaaaaacgctcgtntccgttgtccgcggccttgacgaccgcccggtaacctgcgcccttcagcctcatgtcaatcccaaaacgctgattggagcccccaactcggagcttgtgaaggtgacgaaaaaactggcaaaggacgtggacgcgctgggcctgaattaccatgaggatttgtttaaggattacagcgccgccattgacaggcccatcatcgcgacagaatgttacgattactacagcggcacggcggttaattacgaggatataaccacaaaaaacccctggacttatgtgctggaaaatgacaatgtaatcggccagtttatctgggccggcattgattatcttggcgagagttcctggcccgcgaaaggctggacaggctcggtactggacatctgcggtttcaggaaaccaaacgcgtggttccgcaaaagcatctggagcgatgagcctgtggtgtaccttgccttttacgatcaaagcgtcaagccggattattgccgcgggcgctggtcattcccgccgctttcttcccatctcaaccatgatcattttaagcggcggactgtaaccgccgtaattttttccaactgcgaaacggtgtccctgtggattaacggaaaaaaactgggctcaagagcccccggggattttgcgaataacattatcgagtggacttttgagtacgcaagcgggaaataa

SEQ ID NO: 53628 - protein, 286 aa, Unknown
  Obtained from environmental sample
  misc_feature (1)..(286): Xaa is any amino acid
MEKRILRGAFDSDARRDLTDFIIRDRNHPSVFLWSVGNEVENQGAPEMLEIQKTLVSVVRGLDDRPVTCALQPHVNPKTLIGAPNSELVKVTKKLAKDVDALGLNYHEDLFKDYSAAIDRPIIATECYDYYSGTAVNYEDITTKNPWTYVLENDNVIGQFIWAGIDYLGESSWPAKGWTGSVLDICGFRKPNAWFRKSIWSDEPVVYLAFYDQSVKPDYCRGRWSFPPLSSHLNHDHFKRRTVTAVIFSNCETVSLWINGKKLGSRAPGDFANNIIEWTFEYASGK

SEQ ID NO: 53629 - DNA, 732 bp, Unknown
  Obtained from environmental sample
  misc_feature (1)..(732): n is a, c, g, or t
gtgaaccgcgtagacattaaagcgcggataaacggcggcgaactcgccatnttcgagatacagtttcttcaagagtttgacttcttcgcgagggtgctnttcggcgtctgcagcgcgatagttgaccaagttgaggcgggtgatttctacaacataaaaaaagtctactcaataaacatcgcctattttaacctgaacgccaagcgcgagtatttattttccggcgatataaacacttttaagggcgtccactacaaagacgaacaaatcccgtttgagcgggctgtctctcctaaatcaaagaaaatggtagacatacacccggagtattacctgattttaccgcgaatgttcgacgaaaagatgcgcagcaggttcgacgagtgggtatacgtcttgaagaaatccgccgtccgcgacgacttcaaagccgccggaataaaggaagccaaagcgaaattagactatatccgcatgactcccgaacaaagaaaggtatactttaggtatatggacaaccgcagaggcgcagacagcgcgatccaaacggcggagggcaaaggagaacgcagaggcatacggaaaggcctgcagaaaggcctgcagaaaggtcaggaattggaatgcgccaaacacgtcaaaagcatgcacaaaacgggctttacggtcaaacagatagtgaaaggcctcgaactttccgaaaccgccgtcaagcggattttgggcttgtaa

SEQ ID NO: 53630 - protein, 243 aa, Unknown
  Obtained from environmental sample
  misc_feature (1)..(243): Xaa is any amino acid
MNRVDIKARINGGELAXFEIQFLQEFDFFARVLFGVCSAIVDQVEAGDFYNIKKVYSINIAYFNLNAKREYLFSGDINTFKGVHYKDEQIPFERAVSPKSKKMVDIHPEYYLILPRMFDEKMRSRFDEWVYVLKKSAVRDDFKAAGIKEAKAKLDYIRMTPEQRKVYFRYMDNRRGADSAIQTAEGKGERRGIRKGLQKGLQKGQELECAKHVKSMHKTGFTVKQIVKGLELSETAVKRILGL

SEQ ID NO: 53631 - DNA, 717 bp, Unknown
  Obtained from environmental sample
  misc_feature (1)..(717): n is a, c, g, or t
gtgaatttcggctttgataacatatttgtacttatctgcgctattttcataattccacccgccgtaattattttttcgcgtatgaaagacccatttgttgccgccatccctcttggcgcgcccggcggcgttccttttaaaacttcgcagataaacggcattgtcaaattactaaagtttttagaattaacaggaatatttttactttttttcagcgcggctggaccttcaatgaagagcgctgaaattgtttggctgaaccggggagcggatataatttttattttagatgtcagcccaagcatggcggcgattgatatggacgggaaaaaccgttatgaaatcggcaaatcattgcttacccagttcgcgcaaaagcgtcccacggacagcatagggttagtcgcattcggcgaagacgcagccttgcttctgccgcccacttcggacagatatgcgcttgaattgcggcttgaacagcttcgcataggggaattgggagacggtacggctatcggcatgggaatcgctgttgccgcgtatcaccttgataaatccagcgccaagcgaaagatcgcggttttaattacagacggggaaaataacgccggtacaattcatcctgaaacggcggcggatttgttacgcgaacttggcatatcattttgggttattgccgtaggctcaatgggagaagtaccgactcggccgatctga

SEQ ID NO: 53632 - protein, 238 aa, Unknown
  Obtained from environmental sample
  DOMAIN (91)...(238): von Willebrand factor type A domain
  misc_feature (1)..(238): Xaa is any amino acid
MNFGFDNIFVLICAIFIIPPAVIIFSRMKDPFVAAIPLGAPGGVPFKTSQINGIVKLLKFLELTGIFLLFFSAAGPSMKSAEIVWLNRGADIIFILDVSPSMAAIDMDGKNRYEIGKSLLTQFAQKRPTDSIGLVAFGEDAALLLPPTSDRYALELRLEQLRIGELGDGTAIGMGIAVAAYHLDKSSAKRKIAVLITDGENNAGTIHPETAADLLRELGISFWVIAVGSMGEVPTRPI

SEQ ID NO: 53633 - DNA, 909 bp, Unknown
  Obtained from environmental sample
  misc_feature (1)..(909): n is a, c, g, or t
atgaaaaaatatccagtttttcttttattcagttttataataacctttactttaaacgctcaaaacagaagcgcgtatcttgtcccgcgtattatatatgtgggagaccccgcttcttatgttttaccgcttccggcttcttcacaagacgaagattttgttatcacgtcttatgataaggacttactgccttcgtctccaaatattgattttcacagaataattctggaacggcgcactacgggaagcagattgataattgaatttacgcctttcgcagccggagttttagaactgcccaatataaaaataggaggcgattctttttccggcttttcaattacggtaaattcattaatagacagccgttctgcgcccgtgctttccgctccggcttccgctcttgcgatgccgggaactgcggcaatgctttatggttcaatggcggtcattgtaattataatactttcggcgctttggttcatatttaaaggacgcgccgcgattggcaaattacgcgaagaattaaaacggcgcaggctttttaagtcgataaaaaataccgagaaaaacctttacagactggttttaaaaggcgcgaaaaaaagaaaaattctcgataaactttcagaagaatttaaaaattttctttctatctttaccgaacacaactgccgtaccatgactgcccgcgaatttacggaatttttttcacatttaccgcagcaatttttagcgcgggaaaacgacgcgttctttctgggaaattttttccgccgttgcgatgaattgcgtttttccggctctgaaattgacgcgcaggcggtagttaatttgttgtcggaactccatgattttacctatgcgcttgaaaataaagaaaaagataaaacaagggaggcggcttaa

SEQ ID NO: 53634 - protein, 302 aa, Unknown
  Obtained from environmental sample
  SIGNAL (1)...(20)
  misc_feature (1)..(302): Xaa is any amino acid
MKKYPVFLLFSFIITFTLNAQNRSAYLVPRIIYVGDPASYVLPLPASSQDEDFVITSYDKDLLPSSPNIDFHRIILERRTTGSRLIIEFTPFAAGVLELPNIKIGGDSFSGFSITVNSLIDSRSAPVLSAPASALAMPGTAAMLYGSMAVIVIIILSALWFIFKGRAAIGKLREELKRRRLFKSIKNTEKNLYRLVLKGAKKRKILDKLSEEFKNFLSIFTEHNCRTMTAREFTEFFSHLPQQFLARENDAFFLGNFFRRCDELRFSGSEIDAQAVVNLLSELHDFTYALENKEKDKTREAA

SEQ ID NO: 53635 - DNA, 795 bp, Unknown
  Obtained from environmental sample
  misc_feature (1)..(795): n is a, c, g, or t
atggaaacaagcgatttactgcggaccattattaaccttcccattttttcaagaagtcttgccgatgaaatgctcgccggaaatttcagctctatctttaagggacagggaatggaatttgacgaagcgcggcattatgagcttggcgacgatataagatcgatagactggaacgcaagcgcgcgcttcggcgttccgtttgtaaaaatgttccgcgaagaacgcgaattaactattttaattttacttgatatttctccttccatgcacagaacgcatatcgcgcagcaggggttaagcccttacgaacaggcgctgctctgcacggcgttaatcgccttttccgcagagcatacagaccagcgcgtaggagcgtttttatttgacagagacgtagaaaaagtttttccgccgcgcaagggacgcaaggctataatgtcgattgtaatgtccgcgcttcagtatcagaacaatataatgcagcgcagatcccagtacggcagcgatattgcctccgcgctgacgggagcgcagaggcttttaaaaaaacgctcgcttgtcgtgcttatatcggattttttcagcataaactgggaacgtgaaatgggaagcctctgccgcaaacacgacgtaatagcgataaaaatttccgacccgcaggaacttccctttcacgggcttataactcttgaagaccccgagacaggcgtgcggatagaagcccccacaggccttgattcattcaagggaagctgggcaaattggcttgaggaaaatcggctcatttggaactag

SEQ ID NO: 53636 - protein, 264 aa, Unknown
  Obtained from environmental sample
  misc_feature (1)..(264): Xaa is any amino acid
METSDLLRTIINLPIFSRSLADEMLAGNFSSIFKGQGMEFDEARHYELGDDIRSIDWNASARFGVPFVKMFREERELTILILLDISPSMHRTHIAQQGLSPYEQALLCTALIAFSAEHTDQRVGAFLFDRDVEKVFPPRKGRKAIMSIVMSALQYQNNIMQRRSQYGSDIASALTGAQRLLKKRSLVVLISDFFSINWEREMGSLCRKHDVIAIKISDPQELPFHGLITLEDPETGVRIEAPTGLDSFKGSWANWLEENRLIWN

SEQ ID NO: 53637 - DNA, 999 bp, Unknown
  Obtained from environmental sample
  misc_feature (1)..(999): n is a, c, g, or t
atggaagatatttttacttttgatgatattctgaatgtggatgataaaaaactaaagcaagtagtatgggaaatagacacaaaagaattatccaaagctttaatttcagaaagcggcgaattaaggaaaaagttttatcgtaatatgtccactgcaagccttcgaatacttaataaggatatgatggatacggaacgatttacagtttccgaaaagaaaaacgcgcaaagaactcttttgaaattaatcgcgaaaatgccggaatataataaaaagagatttgaaaacggttttgaatcgttgaatgattttgaagattatctattaatgcggacaccgaatgatggcagttatggcatctttgataaagatgtaaccatgtgccgcctggattcggttaaaaatggcgaagaaattctggctgacattgaacaaaaaaatgaaaaagaaaaaatgggaaatattacaattccgaatacaaagataaaattgataaatttttcattgtgcccggcctgtaataaagtattctcatttaaggatttatctgattattacgcaaatcccaaagtcgatacaagatataaaaatttaaaagaacaatatcgtcaggatacaagggtttattgcaaagattgcggcacttattttctacctgctttgattatttcagatgggactccaaagagccagattcaatttttatgcagaatacagactatgcacgccattgaagatttttatcgaaaaaagaaaggcgttgaggtattatcgcgaaaaaaaaggaatattctggaaaaagaagtaacttctacaattacggataatgaaaggactattgtaactgcaataagaaatgatgtttttataaaagacatggaagaaaaaccaacgcttattacaaatttactgcaatatacgccggcaaatattgtaatgaatgttatagacggttcgaattttcgtgaaaaagatgttctgtttggtgtttggggataa

SEQ ID NO: 53638 - protein, 332 aa, Unknown
  Obtained from environmental sample
  DOMAIN (2)...(89): FliG C-terminal domain
  misc_feature (1)..(332): Xaa is any amino acid
MEDIFTFDDILNVDDKKLKQVVWEIDTKELSKALISESGELRKKFYRNMSTASLRILNKDMMDTERFTVSEKKNAQRTLLKLIAKMPEYNKKRFENGFESLNDFEDYLLMRTPNDGSYGIFDKDVTMCRLDSVKNGEEILADIEQKNEKEKMGNITIPNTKIKLINFSLCPACNKVFSFKDLSDYYANPKVDTRYKNLKEQYRQDTRVYCKDCGTYFLPALIISDGTPKSQIQFLCRIQTMHAIEDFYRKKKGVEVLSRKKRNILEKEVTSTITDNERTIVTAIRNDVFIKDMEEKPTLITNLLQYTPANIVMNVIDGSNFREKDVLFGVWG

SEQ ID NO: 53639 - DNA, 933 bp, Unknown
  Obtained from environmental sample
  misc_feature (1)..(933): n is a, c, g, or t
gtgaagaacaaaaggaggaattttttcttcaacttgtcgccgcgcgttgaaaaaaattcagagcatccgcttgcctcagccattgtgcgcgaagcggagaaacgcgggcttacactgctgtctgtaactgattttaaagccttacccggcagaggcatagaagcaaaaatctcctctctctctctatccgctactaactattcactaccagctacaaactaccaactgcctattctcgtaggaaaccgtaaactcatggatgagcggaatatttcatttaccgaacttgaagccgcttccgacaggcttgccggtgaaggaaaaacgccgatgtttgccgctcttgacgacaaggccgcgggaattgtggcggttgccgacgtgcttaaaccttcaagcaaggcggctcttgaaaagcttcataaaatgggaatacaaaccgccatgatcacgggggacaataaaaaaaccgctgacgctatcgccagacaggtggggattgaccgcgtgctcgcggaagttttgccgcaggataaatccgccgaagtaaaaaaattgcaggacgaagggaaaaagatagcttttgtgggagacggcatcaacgacgctccggcgctggcgcaggcggacataggaatcgccataggaagcgggacggacgtggctatggaatccgccgacatcgtgcttatgcgttccgaccttggcgacgttcccacggctgttaatttaagcaaacggacaatacgcaatataaagcaaaacctgttctgggccttcggttataatgtgctgggaattcccgttgcagccggtttgctttatctgtttgggggacctcttcttaaccctgttttcgccgccgccgcaatgagtttaagctcagtatcggtactaaccaacgcgttgagattgaaaagatttaaagcataa

SEQ ID NO: 53640 - protein, 310 aa, Unknown
  Obtained from environmental sample
  DOMAIN (5)...(219): haloacid dehalogenase-like hydrolase
  misc_feature (1)..(310): Xaa is any amino acid
MKNKRRNFFFNLSPRVEKNSEHPLASAIVREAEKRGLTLLSVTDFKALPGRGIEAKISSLSLSATNYSLPATNYQLPILVGNRKLMDERNISFTELEAASDRLAGEGKTPMFAALDDKAAGIVAVADVLKPSSKAALEKLHKMGIQTAMITGDNKKTADAIARQVGIDRVLAEVLPQDKSAEVKKLQDEGKKIAFVGDGINDAPALAQADIGIAIGSGTDVAMESADIVLMRSDLGDVPTAVNLSKRTIRNIKQNLFWAFGYNVLGIPVAAGLLYLFGGPLLNPVFAAAAMSLSSVSVLTNALRLKRFKA

SEQ ID NO: 53641 - DNA, 369 bp, Unknown
  Obtained from environmental sample
  misc_feature (1)..(369): n is a, c, g, or t
atggctcatcttgaggcaggcttcccgcttagatgccttcagcggttatcctttccggacatggctacccggcgcttgcccctggcgggacaaccggcacaccagcggtccgtccgtctcggtcctctcgtactaaaaacagctcctctcagccatccaacgcccatggcagatagggaccgaactgtctcgcgacgttctgaacccagctcacgtaccgctttaattggcgaacagccaaacccttgggacctgcttcagccccaggatgcgatgagccgacatcgaggtgccaaaccttcccgtcgatgtggactcttggggaagatcagcctgttatccccggagtaccttttatccgttaagtga

SEQ ID NO: 53642 - protein, 122 aa, Unknown
  Obtained from environmental sample
  misc_feature (1)..(122): Xaa is any amino acid
MAHLEAGFPLRCLQRLSFPDMATRRLPLAGQPAHQRSVRLGPLVLKTAPLSHPTPMADRDRTVSRRSEPSSRTALIGEQPNPWDLLQPQDAMSRHRGAKPSRRCGLLGKISLLSPEYLLSVK

SEQ ID NO: 53643 - DNA, 303 bp, Unknown
  Obtained from environmental sample
  misc_feature (1)..(303): n is a, c, g, or t
gtgccaaaccttcccgtcgatgtggactcttggggaagatcagcctgttatccccggagtaccttttatccgttaagtgacggcgcttccactcgctgccgccagatcactaagacccgctttcgcgcctgcccggcctgtcggcctcgcagtcaggcccccttgtgcctttacactcatacgccgatttccaaccggcgcgaggggaccgtcgcgcgcctccgttactgtttgggaggcgaccgccccagtcaaactgcccgcctaccgctgtccccgcgccggtttcacggcgcgggttag

SEQ ID NO: 53644 - protein, 100 aa, Unknown
  Obtained from environmental sample
  misc_feature (1)..(100): Xaa is any amino acid
MPNLPVDVDSWGRSACYPRSTFYPLSDGASTRCRQITKTRFRACPACRPRSQAPLCLYTHTPISNRREGTVARLRYCLGGDRPSQTARLPLSPRRFHGAG

SEQ ID NO: 53645 - DNA, 321 bp, Unknown
  Obtained from environmental sample
  misc_feature (1)..(321): n is a, c, g, or t
gtgacggcgcttccactcgctgccgccagatcactaagacccgctttcgcgcctgcccggcctgtcggcctcgcagtcaggcccccttgtgcctttacactcatacgccgatttccaaccggcgcgaggggaccgtcgcgcgcctccgttactgtttgggaggcgaccgccccagtcaaactgcccgcctaccgctgtccccgcgccggtttcacggcgcgggttagaagcctagccaggaaagggtggtatttcaccgccggctccgcgcaggctgacgcccacgcctcacagcctcccacctatcctacacatgcctag

SEQ ID NO: 53646 - protein, 106 aa, Unknown
  Obtained from environmental sample
  misc_feature (1)..(106): Xaa is any amino acid
MTALPLAAARSLRPAFAPARPVGLAVRPPCAFTLIRRFPTGARGPSRASVTVWEATAPVKLPAYRCPRAGFTARVRSLARKGWYFTAGSAQADAHASQPPTYPTHA

SEQ ID NO: 53647 - DNA, 399 bp, Unknown
  Obtained from environmental sample
  misc_feature (1)..(399): n is a, c, g, or t
atgaaccggtttcccatcggctacggctttcgccctcgccttaggggccgacttaccctgggaagattgcctttacccaggaaacctcgggcttccggcggagggggatcccacccctcttttcgtctacttatacctgcattctcccttccgctccctccagcataccttccagtacgccttcgtcggtctgcggaatgctcccctaccatctcgcgattgctcgcgaaatccgcggcttcggttgcatgcttagccccgttacattgtctgcgcgccgtgactcgaccagtgagctgttacgcactctttcaaggaatggctgcttctaagccaacctcctggctgtcctcgccagggcacatcatttcacactcagcatgctatccgggaccttag

SEQ ID NO: 53648 - protein, 132 aa, Unknown
  Obtained from environmental sample
  misc_feature (1)..(132): Xaa is any amino acid
MNRFPIGYGFRPRLRGRLTLGRLPLPRKPRASGGGGSHPSFRLLIPAFSLPLPPAYLPVRLRRSAECSPTISRLLAKSAASVACLAPLHCLRAVTRPVSCYALFQGMAASKPTSWLSSPGHIISHSACYPGP

SEQ ID NO: 53649 - DNA, 471 bp, Unknown
  Obtained from environmental sample
  misc_feature (1)..(471): n is a, c, g, or t
gtgaggccccctagtccatccagtgctctacctgcgcgaggttttggcgaggctgtccctcaaggcatttcggggagaaccagctatttccaagtttgtttagtctttcgctccaagccacaggtcatccctgccttttttaacagactagggttcggccctccacccggtttcacccgggcttcagcctgcctgtggctagatcacttggcttcgggtctatggcatgtaactaaattatcgccctgttcagactcggtttccctgcggctccgggactcccatcccttagcctcgctacataccataactcgcaggctcattctacaaaaggcacgccgtcaccgcatctctgcggctccgacctgttgcgggtccacggtttcaggttctttttcactcccctcgccggggttcttttcgcctttccctcacggtacttctgcactatcggtcgctctctgtgtttag

SEQ ID NO: 53650 - protein, 156 aa, Unknown
  Obtained from environmental sample
  misc_feature (1)..(156): Xaa is any amino acid
MRPPSPSSALPARGFGEAVPQGISGRTSYFQVCLVFRSKPQVIPAFFNRLGFGPPPGFTRASACLWLDHLASGLWHVTKLSPCSDSVSLRLRDSHPLASLHTITRRLILQKARRHRISAAPTCCGSTVSGSFSLPSPGFFSPFPHGTSALSVALCV

SEQ ID NO: 53651 - DNA, 633 bp, Unknown
  Obtained from environmental sample
  misc_feature (1)..(633): n is a, c, g, or t
atgataggcagaacaatagttctattaatactcatagctattatgtctgtgggcggtcttatttggttcgattttttaaatgttatagacgctaaaggcattcttgcccctatttacgcgcgcgctccatttttaaccaaaatactcaaaatacccggggtgagcagaattcagccaaaaacaaaacctgatgaaatactcgatcttaactccgaaaggctggcaataaggcttgaagcccttgaattgcttaatctggaaatggacacaaaaaagcgggatttggacagccggtacggggaaattgagcagatggcgcaggaacttgaagaacgtcaaaaagcgcttgacgagcaggaaaattccctcagagcgcgggctgcggatgccgaaaataaagataggaatgtcgagcagaatgcccggtatctgacaggtatgccgccgcaaaacgcggtgggtataattgccaagctggatgatcaggacgcaatagacgttctccgaaagaccgaggaaatagcgcgagccgaaggcacggtttcaatcgtatccttctggttctccctgatggacccggttcgggcggccgaactgcagagaaaaatggcaagcaggcctcccaaactgtaa

SEQ ID NO: 53652 - protein, 210 aa, Unknown
  Obtained from environmental sample
  misc_feature (1)..(210): Xaa is any amino acid
MIGRTIVLLILIAIMSVGGLIWFDFLNVIDAKGILAPIYARAPFLTKILKIPGVSRIQPKTKPDEILDLNSERLAIRLEALELLNLEMDTKKRDLDSRYGEIEQMAQELEERQKALDEQENSLRARAADAENKDRNVEQNARYLTGMPPQNAVGIIAKLDDQDAIDVLRKTEEIARAEGTVSIVSFWFSLMDPVRAAELQRKMASRPPKL

SEQ ID NO: 53653 - DNA, 315 bp, Unknown
  Obtained from environmental sample
  misc_feature (1)..(315): n is a, c, g, or t
atggccactgaaaatattctaatgtactgcgtaaaaaaaggcggcgacaggcaggctctccacgagaggataaggcttcactccgtggaagcggcaaaaaaaataaagttacaaggcggggacaatgatttaatcgtccgcattttagcggactcatcttttggaatgatggaaaaagaaatgaataatctgctttcggcggaacaatttacaggcagggcaaaagaacaaacggaagaatttttatcagaagttaaaaatattttagataagaataaggaactactaggcgtagatgttaagataacggtttaa

SEQ ID NO: 53654 - protein, 104 aa, Unknown
  Obtained from environmental sample
  misc_feature (1)..(104): Xaa is any amino acid
MATENILMYCVKKGGDRQALHERIRLHSVEAAKKIKLQGGDNDLIVRILADSSFGMMEKEMNNLLSAEQFTGRAKEQTEEFLSEVKNILDKNKELLGVDVKITV

SEQ ID NO: 53655 - DNA, 864 bp, Unknown
  Obtained from environmental sample
  misc_feature (1)..(864): n is a, c, g, or t
atgcccgaaagcaaaaccgattatccacttggagccacttcctgctatgtgggcgataacaccgacatcattcaacagcgttatgcgcttttgcaaataaagaaattacttgtaaatacaatagccaaactctgcgaattcgccggcaaatacaaagaccttccttgccttgctttcacgcattttcaggcggctcagccgactacgatgggaaaacgcgctactctctggattcaggatttactgtcagaccttgaatatcttgaattcacgcttaacggtttaaaattgctcggctgtaaaggcacaacgggaacgggagcgagttttctttccctctttgaaggcaatcatgaaaaagtaaaatctcttgaaaaaaaaatagccgaaaaaatgggctttgacaaagtatatgcggtaagcggacaaacatattcaaggaaagtcgactattacaccgtctccgttctttcgggtatcgctcaaagcgcgtataaattttctaatgatattcgtttattgtctcaccttaaagaagttgacgaaccgttcgagaatacgcaagtaggctcttccgcaatggcttacaaaagaaaccctatgagaagcgaacgcatcgcttcccttgcccgttatgtaactgttgacgctcttaatccagcgcttaccgcaagcgcgcaatggcttgagcgcactctcgatgattccgctaaccgccgtatatctattccggaggcgttccttgccgtagatgcaatactttcgctttacatcaatattgccggcggacttaatgtctaccccaaagtaatagaaaaacatttaaacgaagaactgcctttatggccactgaaaatattctaa

SEQ ID NO: 53656 - protein, 287 aa, Unknown
  Obtained from environmental sample
  DOMAIN (3)...(215): Lyase
  misc_feature (1)..(287): Xaa is any amino acid
MPESKTDYPLGATSCYVGDNTDIIQQRYALLQIKKLLVNTIAKLCEFAGKYKDLPCLAFTHFQAAQPTTMGKRATLWIQDLLSDLEYLEFTLNGLKLLGCKGTTGTGASFLSLFEGNHEKVKSLEKKIAEKMGFDKVYAVSGQTYSRKVDYYTVSVLSGIAQSAYKFSNDIRLLSHLKEVDEPFENTQVGSSAMAYKRNPMRSERIASLARYVTVDALNPALTASAQWLERTLDDSANRRISIPEAFLAVDAILSLYINIAGGLNVYPKVIEKHLNEELPLWPLKIF

SEQ ID NO: 53657 - DNA, 369 bp, Unknown
  Obtained from environmental sample
  misc_feature (1)..(369): n is a, c, g, or t
atgcctgaccggtacgaaaaccctctatgtaaaagatacgcaagcgcgcaaatgcagtctattttctccgacgataataaattttccacttggcgtaaattatggattgcgcttgccgaaagccagaaagaacttgggcttgatataagcgcggagcagattgatgaaatgaaagctcagcaaaccaacataaactatgaaacagcggcaaaaatcgaggcggagacaagacacgacgtaatggcgcatatacgcgccttcggcgaacaatgcccgaaagcaaaaccgattatccacttggagccacttcctgctatgtgggcgataacaccgacatcattcaacagcgttatgcgcttttgcaaataa

SEQ ID NO: 53658 - protein, 122 aa, Unknown
  Obtained from environmental sample
  misc_feature (1)..(122): Xaa is any amino acid
MPDRYENPLCKRYASAQMQSIFSDDNKFSTWRKLWIALAESQKELGLDISAEQIDEMKAQQTNINYETAAKIEAETRHDVMAHIRAFGEQCPKAKPIIHLEPLPAMWAITPTSFNSVMRFCK

SEQ ID NO: 53659 - DNA, 534 bp, Unknown
  Obtained from environmental sample
  misc_feature (1)..(534): n is a, c, g, or t
gtgttcgggaatatgtgggaagcgtactccaaaggaaaagaattttgcggtcaaaaaatagaaggcaattataaacttgccgaaaaacttgccgctcccctctttactccctcgacaaaagcgcgtgaaggacacgacgaatatatttccgttcaatatcttgcggataatatcggcgctgacttggctaagaaaatagaaaaactatgcttcgatatttacacaacttgttacgattacgcatacaaaaaaaacatcatcatagccgacacaaaatttgaattcggtcttgacgaaaacaataatctctttatagccgacgaaattcttactcccgattcaagcaggttctggagtctttccgagtatcaaatcgggacttcgccgaaaagttatgacaaacaatttgtccgcgactggcttcagaacaacaaaaaagacggagagatgcaattcgacaatgttcccgacgacgtgttaagcaaaacatctgatatttacgccgaatgtctacggaggctggttaatgcctga

SEQ ID NO: 53660 - protein, 177 aa, Unknown
  Obtained from environmental sample
  DOMAIN (4)...(159): SAICAR synthetase
  misc_feature (1)..(177): Xaa is any amino acid
MFGNMWEAYSKGKEFCGQKIEGNYKLAEKLAAPLFTPSTKAREGHDEYISVQYLADNIGADLAKKIEKLCFDIYTTCYDYAYKKNIIIADTKFEFGLDENNNLFIADEILTPDSSRFWSLSEYQIGTSPKSYDKQFVRDWLQNNKKDGEMQFDNVPDDVLSKTSDIYAECLRRLVNA

SEQ ID NO: 53661 - DNA, 306 bp, Unknown
  Obtained from environmental sample
  misc_feature (1)..(306): n is a, c, g, or t
gtgtacataggaagcgccgcattaatcgcccttggctgccacttgtgcagaagctgtcacggcggcaaatgcaactggggcatagcgacgcaagttcccgaacttgtaaaacgcctgaaccccgatttgggatataaacgcctcatcaatttaatgactgcgtggcagcacgaaataaaagaaatgatgggcggcatgggaattaactcgattgacggtcttaaaggaaatcgtcttatgcttcgcggagtcggcttaaacgaaaaagagttggaaattttaggcattaaacacgccggagaataa

SEQ ID NO: 53662 - protein, 101 aa, Unknown
  Obtained from environmental sample
  misc_feature (1)..(101): Xaa is any amino acid
MYIGSAALIALGCHLCRSCHGGKCNWGIATQVPELVKRLNPDLGYKRLINLMTAWQHEIKEMMGGMGINSIDGLKGNRLMLRGVGLNEKELEILGIKHAGE

SEQ ID NO: 53663 - DNA, 783 bp, Unknown
  Obtained from environmental sample
  misc_feature (1)..(783): n is a, c, g, or t
ttggtcgccattggcccgtctattgaaaacggtttttactacgattttcagtttcccgcgcgggaaggctcccatgttccaatcagcgccgacgatctcccaaaaatcgaagcggaaatgaaggcgatcatcgacagccgcgtagactttgtacgcgtggaagtaagccgcgaagaagcgctaaagcgtttttcgggcgagcctttcaagcaggagctaattaaaaaccttcccgagggggaagcaatcagcatctacgaaaaccgggacgccgaaggtaaagtccgctggtcggatctctgccgtggacctcatgtccaaaactccagggagattcactcaggcgcgtttaagctcatgagtatagcgggagcttactggcggggggacgaaaaccagcccatgctaacccgcatttatggcactgcctgggaaaaccccaaagacctgaaagcccacctggcatttcttgaagaagttgaaaagcgcgatcaccgccgccttggaaaagagatggaaatttactccacccacgaagaagccggggcggggcttatatattggcacccaaacggcggccgcatgagagtcgcaattgaaaatttctggcgcgccgagcattacagaaacggttacgaaattctctatactccccacattggaaaagcctggctttgggaaacctcangccatctgggtttttacangggcaatatgtacaacccgatgcagatcgacaaccaggactacattataaagccgatgaactgccccttccattaa

SEQ ID NO: 53664 - protein, 260 aa, Unknown
  Obtained from environmental sample
  DOMAIN (83)...(140): Threonyl and Alanyl tRNA synthetase second additional domain
  misc_feature (1)..(260): Xaa is any amino acid
MVAIGPSIENGFYYDFQFPAREGSHVPISADDLPKIEAEMKAIIDSRVDFVRVEVSREEALKRFSGEPFKQELIKNLPEGEAISIYENRDAEGKVRWSDLCRGPHVQNSREIHSGAFKLMSIAGAYWRGDENQPMLTRIYGTAWENPKDLKAHLAFLEEVEKRDHRRLGKEMEIYSTHEEAGAGLIYWHPNGGRMRVAIENFWRAEHYRNGYEILYTPHIGKAWLWETSXHLGFYXGNMYNPMQIDNQDYIIKPMNCPFH

SEQ ID NO: 53665 - DNA, 951 bp, Unknown
  Obtained from environmental sample
  misc_feature (1)..(951): n is a, c, g, or t
ttgggaaacctcangccatctgggtttttacangggcaatatgtacaacccgatgcagatcgacaaccaggactacattataaagccgatgaactgccccttccattaatgatctataaaaacaaaggtcgctcttaccgtgaccttcccctgcgctgggcggagcttggtacagtgtaccgctacgagcgatccggcgtcctgcacggccttttgagggttcgcggttttacccaggatgacgcccacatattctgcacgccggaacaaatggaagacgaaatccgcgaggttctgcgattcagcctatggatatggaagcaattcggctttaaggaaattaaggcgtaccttgccaccaagcccgcggaatccgtcggcgagcaaagccgctgggacgccgccctggaaagcctccgcagggccattgatgccgagggccttggctatgaaatcgacgagggcggcggcgctttttacggccccaagatcgatctaaagataaaagacgcccttggccgtgaatggcagatgaccacaattcagtttgacttcaacgagcctgaacgttttgacatgacctttgtggacgcggacggaaagcaaaagcgcccctacatgattcaccgcgcccttttgggcagcctggaacgtttcttcggcgtgttaatcgagcacttcggcggagctttccccgtttggattgcacccgaacaaattgccgttatcccggtttctgaaagctacaacgaatacgccaaaaagatatgcgcggaattaaaagatgtgaatctcagggttacctcggagctgggcgacgccaggcttaacgccaaaattcgcgactgccagaaccgcanaatcccctacatgctgatcgtgggcgagcgcgaagaaaaagaaggaccgtttcggtccgcttcagggacggcaggcaaacgccctccatga

SEQ ID NO: 53666 - protein, 316 aa, Unknown
  Obtained from environmental sample
  DOMAIN (1)...(141): tRNA synthetase class II core domain (G, H, P, S and T)
  misc_feature (1)..(316): Xaa is any amino acid
MGNLXPSGFLXGQYVQPDADRQPGLHYKADELPLPLMIYKNKGRSYRDLPLRWAELGTVYRYERSGVLHGLLRVRGFTQDDAHIFCTPEQMEDEIREVLRFSLWIWKQFGFKEIKAYLATKPAESVGEQSRWDAALESLRRAIDAEGLGYEIDEGGGAFYGPKIDLKIKDALGREWQMTTIQFDFNEPERFDMTFVDADGKQKRPYMIHRALLGSLERFFGVLIEHFGGAFPVWIAPEQIAVIPVSESYNEYAKKICAELKDVNLRVTSELGDARLNAKIRDCQNRXIPYMLIVGEREEKEGPFRSASGTAGKRPP

SEQ ID NO: 53667 - DNA, 483 bp, Unknown
  Obtained from environmental sample
  misc_feature (1)..(483): n is a, c, g, or t
gtgcagcggcggctttcggaaattgcatctacagaacctgatacgccggtaattgtcatgggtgatctcaacgaaaaccacgatgagttttaccggactcaggaattgtgcgccctgctccctgacgatcaaaacgcggcgtcgctggcttctatagggcataaggattttctcgttttaagcggcgagaaaccgccccgaagtgaatttttctccggcgaagtggagccgctttatacaccttggggagctgaattaatcaacggctcttattattacaaaggggaatgggaaaccatagatcactttttgctttcaaaggctctctttggcagctcgccgtggaggttttccggctgcagggttttgaaccaggagccttttacaacgactaaaggagttccaagcgcctatgtccacagaacaggcaggggcttaagcgatcatcttccgctcatgctgtatttgaagtatgtggaataa

SEQ ID NO: 53668 - protein, 160 aa, Unknown
  Obtained from environmental sample
  misc_feature (1)..(160): Xaa is any amino acid
MQRRLSEIASTEPDTPVIVMGDLNENHDEFYRTQELCALLPDDQNAASLASIGHKDFLVLSGEKPPRSEFFSGEVEPLYTPWGAELINGSYYYKGEWETIDHFLLSKALFGSSPWRFSGCRVLNQEPFTTTKGVPSAYVHRTGRGLSDHLPLMLYLKYVE

SEQ ID NO: 53669 - DNA, 561 bp, Unknown
  Obtained from environmental sample
  misc_feature (1)..(561): n is a, c, g, or t
atgaaaaacataattaaagcttcgattatcttttctgcaattttcttttttgtaaaatgcagtttttcttctcctgccgtttctgcgccgggagattttatggcggtggtgtggaacacgcaggcgttttttgacgggatcgaagacgggtatgaatacgaggaatacaccgaggcggcggggtggacgcaggaaaaatacaatgcccgcctccttgccttgtcccaggcgatcttgcagatggagtcttccgaagcggttccggatttaatcggacttgtggaaattgagaaccagggggtgcttgatgatctcagcagcggtacgctttccaaatacgcctacaattggacggcgtttgcgaatctaccgggctcttctctgggggtcggcgttttaagccgccatccaatcaaagacatagttgcccattcgatcacgatggaaaaagatactgcccccaggccggtattggaagtaagggttgaaccccgcggcaagccgctggtcttctttatctgccactggaaatcaaaactgggaaaggataccgaaggttaa

SEQ ID NO: 53670 - protein, 186 aa, Unknown
  Obtained from environmental sample
  SIGNAL (1)...(26)
  misc_feature (1)..(186): Xaa is any amino acid
MKNIIKASIIFSAIFFFVKCSFSSPAVSAPGDFMAVVWNTQAFFDGIEDGYEYEEYTEAAGWTQEKYNARLLALSQAILQMESSEAVPDLIGLVEIENQGVLDDLSSGTLSKYAYNWTAFANLPGSSLGVGVLSRHPIKDIVAHSITMEKDTAPRPVLEVRVEPRGKPLVFFICHWKSKLGKDTEG

SEQ ID NO: 53671 - DNA, 1680 bp, Unknown
  Obtained from environmental sample
  misc_feature (1)..(1680): n is a, c, g, or t
ttgaaaatagttttattactatttgcgttgatttttttttcatgcaaatcaacgcccgacgataaaccaaaatcctcagaacagcctaaaagtaacgaggggaaggctcccgccggagggcttgcggaagaaatacgcggcttggtggaaacaggcctgttatcttccatgattcaggcgcaggagtatatccgaagcagggatcttgccaatgttgagtttggccgcacgatgaacgggcttatcacattaatagtcagtcgggtctatcccgattcaaaattagcgcttgccaatcttgatcttccgcaaacttccaattacaaccgcattatcagggaagctgaaaagggcgaatatgtccatcccggggaaaattcaaccgatttttttgaatatgtgcttccgttcttcgcgattaacaatgatacaaaccgcgagcttcttgccgcggctttgaaaaaccttacaaaagccggagagttaaggccgcattccgtactgcctccctacttttcaggatatatctatgaacgcatgaaccaatatcaggacgctgatgcttcttataaaagagcgtattcaatcagcaatgaattctacccggccctgataggcaccgcgcgcattatggcgcttaacggaaaaaaaagtgacgccgccgcccttttgtcagacctgataataagatatccagacagcctgaatgtaaagcgccagcttgccgttatttattatgaaagcaaggattggtcgcgcgccatgcctgttatagatgaaattttacagaacgatccgcgtaatggcgatcttttgctgatgaaagcccatattctgatagaacagaataattacgcgcaggcaaacgcgcctcttgacacttattccccgattaatcccaacaacaggcagtatcttttcctgcgcgccagaatacaggcggaaggaaaccgcaaccgcgattccgcgctgaattatctgcgctcgatcattcgcagcaatcccgatgacgaagaagcggtaatttacgccgcgagtttactcatggattcccagcgcgcctccgatcaggaagaaggcagggcgctccttgaccgccttaggcaaatgtccggctcttcgatcacggttttaagtttaagccttcgcgacgccatacggcgtgaaaactggagagaggcgcagggttatttgaacaagatacttccggtccgcagaaccgatcaggatcttcaggacgcgtataatacggaacgcggtttgaacaacaacgcaagggcgctcgccttcgcgcgggaactgtatgaaaaggacacttctaaaaatgaatatgccgccgtctatatttcggcgttaattgacaacggcagaaaagaagaagcgtccagattattggaaagccgcatagccgccgcaaacacaggtgtcgacaaaggacggtatttttttctgcgcagccgcattcaaaccaatgaagaggctgcgttaagcgatctccgttccagcctctttgaagacccgcgcaatcttgacgcgttaatcgccatgtttgaaatctaccaccgacgccgcgaagaacgccgcgcggttcactatctaaggcaggccctcgccatttctccagacaacccgcgcttgaaacgctacgagacggaatacgcaactttgttgaagaattaa

SEQ ID NO: 53672 - protein, 559 aa, Unknown
  Obtained from environmental sample
  SIGNAL (1)...(17)
  misc_feature (1)..(559): Xaa is any amino acid
MKIVLLLFALIFFSCKSTPDDKPKSSEQPKSNEGKAPAGGLAEEIRGLVETGLLSSMIQAQEYIRSRDLANVEFGRTMNGLITLIVSRVYPDSKLALANLDLPQTSNYNRIIREAEKGEYVHPGENSTDFFEYVLPFFAINNDTNRELLAAALKNLTKAGELRPHSVLPPYFSGYIYERMNQYQDADASYKRAYSISNEFYPALIGTARIMALNGKKSDAAALLSDLIIRYPDSLNVKRQLAVIYYESKDWSRAMPVIDEILQNDPRNGDLLLMKAHILIEQNNYAQANAPLDTYSPINPNNRQYLFLRARIQAEGNRNRDSALNYLRSIIRSNPDDEEAVIYAASLLMDSQRASDQEEGRALLDRLRQMSGSSITVLSLSLRDAIRRENWREAQGYLNKILPVRRTDQDLQDAYNTERGLNNNARALAFARELYEKDTSKNEYAAVYISALIDNGRKEEASRLLESRIAAANTGVDKGRYFFLRSRIQTNEEAALSDLRSSLFEDPRNLDALIAMFEIYHRRREERRAVHYLRQALAISPDNPRLKRYETEYATLLKN

SEQ ID NO: 53673 - DNA, 936 bp, Unknown
  Obtained from environmental sample
  misc_feature (1)..(936): n is a, c, g, or t
gtgattactttctttcaaatatttttaacactgcctgttgttttcagccttttttccgctacaagaaaattcgcgatgtcgatctttgactatatattgaatacattaaaggatttcggcatcagcataggcaaatatattcccaaattattaacgataataattattattcttattacgcattatcttctgcgcggcattaaattttttgttacgcatatagaaaagggaagagtcgctattcccggtttttatcccgaatgggcgcagccgacttataaaatattgcgggtgcttttatgggctttttcattcgcgttaatgtacccctatctgccgggcgccgactctaaagcttttcagggagtttctgtttttatcggtattgttttttcgataggatcaacaagcgcaataggcaaccttatcgccggccttgttattacttacatgcgtccttttaaaataggcgaccgcgtgcaaataaaggaaataaccggctttgtcgtggaaaaaaatcttatggtagtgcgcattaagacgcataaaaatgaatacgttacatttccaaacgtaataattttgggttcaaacataattaattacaacacgtcgtcggacgaagacgaagaaggattaatactttataccgagattacctacgcctactccgtaccatgggaaacaattcatgagctgttaattaacgccgctcttgagacggactatgttcaaaaaaggcccaagccctttgttttgcagacaaaactggacgatttctatacccgttaccagataaactgttatacgaaggaagtagacaaggttccgcttatatattccatgctttaccagaacattcaaaaagaattcagggaagcgaagctggacatgacggcgccgcattttgggattattacgactaggaaggaatag

SEQ ID NO: 53674 - protein, 311 aa, Unknown
  Obtained from environmental sample
  SIGNAL (1)...(25)
  DOMAIN (94)...(299): Mechanosensitive ion channel
  misc_feature (1)..(311): Xaa is any amino acid
MITFFQIFLTLPVVFSLFSATRKFAMSIFDYILNTLKDFGISIGKYIPKLLTIIIIILITHYLLRGIKFFVTHIEKGRVAIPGFYPEWAQPTYKILRVLLWAFSFALMYPYLPGADSKAFQGVSVFIGIVFSIGSTSAIGNLIAGLVITYMRPFKIGDRVQIKEITGFVVEKNLMVVRIKTHKNEYVTFPNVIILGSNIINYNTSSDEDEEGLILYTEITYAYSVPWETIHELLINAALETDYVQKRPKPFVLQTKLDDFYTRYQINCYTKEVDKVPLIYSMLYQNIQKEFREAKLDMTAPHFGIITTRKE

SEQ ID NO: 53675 - DNA, 588 bp, Unknown
  Obtained from environmental sample
  misc_feature (1)..(588): n is a, c, g, or t
atggcaaaaattaagctcacaaagaatgagctgaaaaaacaaaaagactctcttaaaatgtacaggcgttatttgcctacgctgatgttgaaaaagcaacagttacagggggagatcaggcttacagacgcgcggttaaaagaattgaaaatatccgaagaacagttggacgaatcgtttaaatcatggattggcgtttttggagaaaccgaagtttttacaaaagagattttaaaaataaaagacgtgcggacaagccacggaaatatagccggagtttcaataccggtttttgaaggcgcggattttgaaattacggattatgatttcttaaaaacgccgctttggctcgatttagcggtcgatcgcatgaaacaggcgctccttttgcaaatggaaatggatattgtcgaagaacagcgaagaaggcttgataaagaattgcgcacgacaacccagcgcgttaatctttttgaaaaaataaaaattcccgaatcaagaaacaatattaaaaagattcaggtttatttaggcgaccagcagacggcggcggttgtacggggcaagatcgccaaaaccgggctgtaa

SEQ ID NO: 53676 - protein, 195 aa, Unknown
  Obtained from environmental sample
  DOMAIN (2)...(195): ATP synthase subunit D
  misc_feature (1)..(195): Xaa is any amino acid
MAKIKLTKNELKKQKDSLKMYRRYLPTLMLKKQQLQGEIRLTDARLKELKISEEQLDESFKSWIGVFGETEVFTKEILKIKDVRTSHGNIAGVSIPVFEGADFEITDYDFLKTPLWLDLAVDRMKQALLLQMEMDIVEEQRRRLDKELRTTTQRVNLFEKIKIPESRNNIKKIQVYLGDQQTAAVVRGKIAKTGL

SEQ ID NO: 53677 - DNA, 1101 bp, Unknown
  Obtained from environmental sample
  misc_feature (1)..(1101): n is a, c, g, or t
gtgcgctttttagggcggcccatgcaggtgccgttttccgaaaacctcatgggcagggtgttttccggttcgggagcaccacgcgacaagggcccggccctgcgcgaaaactacatccccattggcggcccctcggtcaacccctccgagcgcataatcccccgcaagatgatccgcaccggcatccccatgatcgacctgttcaacaccctggtcgtttcccagaaactgccgatcttctcggtctcgggcgagccttacaacgagcttctcgcacgtatcgcgatgcaggcggaagttgacgtaatcgtgcttggcggcatgggcttgaaatatgacgactaccttaccttcaagaacacgcttgaaaacgccggcgccctcgcgcgcacggtcatgttcatgcacaccgccagcgaccccaccgtcgaatgccttatgatccccgatatgtccctcgcggtcgccgaacagttcgccctgaagggtaaggacgtgctggtgcttcttaccgacatgaccaacttcgccgacgcgatgaaggaaatatccattatacaggaacaggtaccgtccaaccgcggctatcccggcgacttatacagccagcttgccagccgctatgaaaaggccgttgactttgaaaaagccggttccattacagtactgggcgtaacgacaatgcccggcgacgacgtaacccacccggtgcctgacaataccgggtatatcaccgagggccagtactacctgaagcacggcagaatagagccattcggctccttaagccgccttaaacagcaggttaacggcaaaacccgcgctgaccatcgcgccctgatggacggtatgatcaagctgtactccgcattccgcgacactctggaaaaaaaggcgatgggttttataatgacgccctgggatgaaaaacttttaaaatacggcgttcagtttgaaaaaagaatgatggatctttcagttaatattccgcttgaaaaagcgcttgacttgggctgggaaattctttcggattgctttaacaaagaagaaacaggtttacgcacggaattgattaatgaattctggccgaaaaaagaatag

SEQ ID NO: 53678 - protein, 366 aa, Unknown
  Obtained from environmental sample
  DOMAIN (60)...(263): ATP synthase alpha/beta family, nucleotide-binding domain
  misc_feature (1)..(366): Xaa is any amino acid
MRFLGRPMQVPFSENLMGRVFSGSGAPRDKGPALRENYIPIGGPSVNPSERIIPRKMIRTGIPMIDLFNTLVVSQKLPIFSVSGEPYNELLARIAMQAEVDVIVLGGMGLKYDDYLTFKNTLENAGALARTVMFMHTASDPTVECLMIPDMSLAVAEQFALKGKDVLVLLTDMTNFADAMKEISIIQEQVPSNRGYPGDLYSQLASRYEKAVDFEKAGSITVLGVTTMPGDDVTHPVPDNTGYITEGQYYLKHGRIEPFGSLSRLKQQVNGKTRADHRALMDGMIKLYSAFRDTLEKKAMGFIMTPWDEKLLKYGVQFEKRMMDLSVNIPLEKALDLGWEILSDCFNKEETGLRTELINEFWPKKE

SEQ ID NO: 53679 - DNA, 1830 bp, Unknown
  Obtained from environmental sample
  misc_feature (1)..(1830): n is a, c, g, or t
atgcggcgtttcggcattataatttgtctctttttcattttatcgttctttcccgcggcgctgtccgcgcagactcaagcgtcttccgcggtgtactatgagcgcggcaaaagtctcatggcggaagaaaattggtattccgcggttgagtcatttcttgaatgtacaaggctcaaccccgcccatgccgagggaaccgcctctcttgcggaatgttattacgagcttgcggaatttgacgaagcgcttaaatgggtaagaaaggcaagacagcttgcgcgcaccaatatgtccgttgcgaatctggaagtatttaccctgattgcgctgggacagttggaaagcgccgccgacactctcatcaaagaaatactggcaaaggaaccctacaacagggaaacgctctttgcgccgggagaacttgacatagcgcggaacaggccttccgaggcgatgttgcgctaccgcgacgcggtaaggcgttaccccgacgaccgcaggcttttaatttcactggctcttgtaactctttccatgggagacggcgacacggcggtttcctacataaacagcgcgctcgaacaacaccctgacgattaccgcgtgttttattacgcggcctacatttattcaatgaacaatagagttaaggaagcgataaattttgcggaacgttcgctttactataagccaagccatctgccaagccgatctttaatgtccgtccttcgttaccgtaacggcgaatatgaggaagcggcgaggctgtgcgacactttaatcgccgctaacaggcaggatatgagcgcgtggtatttaaaaggtttgtccctaatcagaatgaaccgcaatcaggacgcgataaccgttctttccaacgcgatttcaattaacgaggaagatgagtttatccgcgctattttagaagaagccgttatttcgtccaccgttttagaggacccgcgccgcgtaagattcgcggcatggcattttaacaaagcgagaaatttccgccagcgcaatttaaatgaacaagcgctttntgagtaccgccgaggattaagactgaacccattcgcgcaggacaggcgcgaatacgccgagattttaagacttttaggctaccctgcccgctaccttgaagaacttcgcttcttgcaggatcagggagtctcggacaaaaacataaatgacgctgtggaagcctacgcttccctgctttccaacgcgctttttaaacaatggcaggtaaaccccgtcgatctggctgaacggcattggaaaatagctgtcttttccctcgcgggacaatcaagtttttaccatgcggatgcgggttctgtagccgcgggagtcatcaaggaattgcttgtacacgacaggaacattaaccccataaatctggaacagcggcaggctatcttttctcaggcgtttaaacaggcaagggaaagcggagccgattactttatacttgtctcggtaacggaaagcgagcgcgatatttcaataaaagccgaagtctttgtaggaaggacaggctctccggcgggaactttttacacttaccgcacaggagtagacagactgcgcgacgcctcccgaggcatagtaacccaactttcagcgtcaatgccgattcgcggcagactgcttatacgaaaacagggacaggcgctcattaacaaaggaaaagccgatggtattcaaaaagactcggtatacgacgttgtaaaacgcggacgctttcaaacggcaaacgaaggtatcgccgttatttattcaaacgacgatcttgtgggaaagnctgacaattaccgatgtagatga

SEQ ID NO: 53680 - protein, 609 aa, Unknown
  Obtained from environmental sample
  SIGNAL (1)...(23)
  DOMAIN (29)...(62): Tetratricopeptide repeat
  misc_feature (1)..(609): Xaa is any amino acid
MRRFGIIICLFFILSFFPAALSAQTQASSAVYYERGKSLMAEENWYSAVESFLECTRLNPAHAEGTASLAECYYELAEFDEALKWVRKARQLARTNMSVANLEVFTLIALGQLESAADTLIKEILAKEPYNRETLFAPGELDIARNRPSEAMLRYRDAVRRYPDDRRLLISLALVTLSMGDGDTAVSYINSALEQHPDDYRVFYYAAYIYSMNNRVKEAINFAERSLYYKPSHLPSRSLMSVLRYRNGEYEEAARLCDTLIAANRQDMSAWYLKGLSLIRMNRNQDAITVLSNAISINEEDEFIRAILEEAVISSTVLEDPRRVRFAAWHFNKARNFRQRNLNEQALXEYRRGLRLNPFAQDRREYAEILRLLGYPARYLEELRFLQDQGVSDKNINDAVEAYASLLSNALFKQWQVNPVDLAERHWKIAVFSLAGQSSFYHADAGSVAAGVIKELLVHDRNINPINLEQRQAIFSQAFKQARESGADYFILVSVTESERDISIKAEVFVGRTGSPAGTFYTYRTGVDRLRDASRGIVTQLSASMPIRGRLLIRKQGQALINKGKADGIQKDSVYDVVKRGRFQTANEGIAVIYSNDDLVGKXDNYRCR

SEQ ID NO: 53681 - DNA, 747 bp, Unknown
  Obtained from environmental sample
  misc_feature (1)..(747): n is a, c, g, or t
ttgaaagctccttttaagataaatacacaggcaattaaagatctggaagaagaccaaagacagatgatccgaggcgttgtggaattatccgacactacggtaaaagaggtaatggttcccagaaccgacactgtttttctttcggcggacgcctcaaaagaggaattgcttaaattcataagcgaaagcgaacactcgcgttttcccgtatacaaagatacggttgataacgtaacaggcgtacttcacgtaaaagacgtattaaaggcgcttataaatgataaaccgttcaatattaacacattggcaagaaagccgttttttatccccgaatcaaaacatatcgatgaccttttgcgcgagatgcgccgtaaaaaagtccatatcgccgtagtggtagacgaatacggcggagtgtccggtattgttaccatggaagacataatcgaagaaataatcggcgacattcaggatgaatttgatcatgaaaccgaagatgtggtggttctcggagagggaatttggctttgcgacgccagagttaatcttgaatttttagccgaagaaataaacatcgagtttcccgtcgatgattttgatacgctcggcggttttgtttttgatcttttcggcaggataccggcagtaaatgaaaaaacagaatataaggattatgattttatcatacaggaaattgacgggcataaaattaactcgataaaaattgtaacccataaaaaagactag

SEQ ID NO: 53682 - protein, 248 aa, Unknown
  Obtained from environmental sample
  DOMAIN (168)...(246): Transporter associated domain
  misc_feature (1)..(248): Xaa is any amino acid
MKAPFKINTQAIKDLEEDQRQMIRGVVELSDTTVKEVMVPRTDTVFLSADASKEELLKFISESEHSRFPVYKDTVDNVTGVLHVKDVLKALINDKPFNINTLARKPFFIPESKHIDDLLREMRRKKVHIAVVVDEYGGVSGIVTMEDIIEEIIGDIQDEFDHETEDVVVLGEGIWLCDARVNLEFLAEEINIEFPVDDFDTLGGFVFDLFGRIPAVNEKTEYKDYDFIIQEIDGHKINSIKIVTHKKD

SEQ ID NO: 53683 - DNA, 528 bp, Unknown
  Obtained from environmental sample
  misc_feature (1)..(528): n is a, c, g, or t
ttgccggctatacccacgccagaattgaataccccaaacaaaaagaggaaaaggatgaataatgtgactataaacgcgcaggaaatcgacctgcccgcgtggagcggggatgcgtgtagttttgccctgaaagtcctgaatgaaataaagcgcgataattgggagctttccatccttttttgcgacgataaaacaatcactgatttaaaccgtcaataccgcaataaaaacgagcctacggacatactttcctttaatcttggtgaaacggtaaaagaagatgaaaaaaccgtgtttttgccgggagatatcgtaatttcgcttgattctttgaaggaaaacgccaaatacttcaacacacccgaagatgaggagttacgcagactgctgattcatggtattctacacttagacggaatggaccatgaaacattggaaaaggacgagcctatgctcgaattacaggagaaaatactgaataaattgaaaaccgaacaaataatcccaaaaaagggagacaaaaattga

SEQ ID NO: 53684 - protein, 175 aa, Unknown
  Obtained from environmental sample
  DOMAIN (61)...(155): Uncharacterized protein family UPF0054
  misc_feature (1)..(175): Xaa is any amino acid
MPAIPTPELNTPNKKRKRMNNVTINAQEIDLPAWSGDACSFALKVLNEIKRDNWELSILFCDDKTITDLNRQYRNKNEPTDILSFNLGETVKEDEKTVFLPGDIVISLDSLKENAKYFNTPEDEELRRLLIHGILHLDGMDHETLEKDEPMLELQEKILNKLKTEQIIPKKGDKN

SEQ ID NO: 53685 - DNA, 786 bp, Unknown
  Obtained from environmental sample
  misc_feature (1)..(786): n is a, c, g, or t
gtgtcaaaagagaaagccctggcgcgcgcaaaagaagttcaatcacagatagataaaggcggcgccgtaaacggcggggcgctttcgccgcttgcgggcgtgccaatagcgattaaagataatatttccacaacgggaatcgaaaccacttgcgcgtctaaaatgcttaaagggtatacgcccgtgttcaacgcggcggttattgataaactggaaaaagccggaatggttgtcatcgggaaagtcaacatggacgagtacgctatgggcggctctagcgaaacgggcgtaaaaggtccggtacacaatccctgggatattatgcgtgtcgccggcggttcatcgggcggaagcgccgctgccgtcatcgcgggggagacgcccatcgcgctcggttccgacaccgggggcagtatacgccagccctgcgccttttgcggcgttaccggcatcaaaccgacctacggttcggtgtcgcgttacgggcttttggcttacgcgtcgtccctcgatcagatcggccctatcgggcaaaacattgacgactgcgccgcgttgttatcgatcatttcagggcctgatacgcgggacagtacctgcgttatagaaaagccctttgagttcggtaccggagaaaactacatcaggctggaaaatgttaagatagggcttccccgcaactattacggcagcggtattgacgatgaggtaaagaccgccgttctggctgttacaaagagcttgaggcggcgggggcaactatcgaagaatttgaaatgccgctga

SEQ ID NO: 53686 - protein, 261 aa, Unknown
  Obtained from environmental sample
  DOMAIN (4)...(261): Amidase
  misc_feature (1)..(261): Xaa is any amino acid
MSKEKALARAKEVQSQIDKGGAVNGGALSPLAGVPIAIKDNISTTGIETTCASKMLKGYTPVFNAAVIDKLEKAGMVVIGKVNMDEYAMGGSSETGVKGPVHNPWDIMRVAGGSSGGSAAAVIAGETPIALGSDTGGSIRQPCAFCGVTGIKPTYGSVSRYGLLAYASSLDQIGPIGQNIDDCAALLSIISGPDTRDSTCVIEKPFEFGTGENYIRLENVKIGLPRNYYGSGIDDEVKTAVLAVTKSLRRRGQLSKNLKCR

SEQ ID NO: 53687 - DNA, 576 bp, Unknown
  Obtained from environmental sample
  misc_feature (1)..(576): n is a, c, g, or t
atgccgctgatggattatgtgatccccgcctactacatcatcgcctgtgctgaagcgtcgtcaaacctttcacggtatgacggtttgaaatacggttaccgcagttctaacgccgggtctctttccgaagtgtaccgtctttcccgcagtgagggttttgggctggaagtaaaaagaagaataatgctcggttcgtttgtgctttcatccggctactacgatgcctattacaaaaaagctctgcaggtacgcgcccttatcaaagacgcttacacgcggctattcaccaaatatgacatgatactttctccggtcgcgcccaccacggcgtacaaaatcggggaaaattcaggcgacccaataaaaatgtacatgggggatatttacaccgtgtcgattaatctggcgggactccccgcggcggcgctcccttgcggatttgacaaacaaggtttgcccatcggctttcagttgattggcgacgctttttcggaaaacaaacttatcggcgcggcgcgggtgtatcaggcccgtaccgattatcacctaaaaagacctgaggttgtaaaagcatga

SEQ ID NO: 53688 - protein, 191 aa, Unknown
  Obtained from environmental sample
  DOMAIN (1)...(169): Amidase
  misc_feature (1)..(191): Xaa is any amino acid
MPLMDYVIPAYYIIACAEASSNLSRYDGLKYGYRSSNAGSLSEVYRLSRSEGFGLEVKRRIMLGSFVLSSGYYDAYYKKALQVRALIKDAYTRLFTKYDMILSPVAPTTAYKIGENSGDPIKMYMGDIYTVSINLAGLPAAALPCGFDKQGLPIGFQLIGDAFSENKLIGAARVYQARTDYHLKRPEVVKA

SEQ ID NO: 53689 - DNA, 732 bp, Unknown
  Obtained from environmental sample
  misc_feature (1)..(732): n is a, c, g, or t
atgccatgcctatcctgtaacgaccttcgggtctcgttccgcattcagaagaagagcgcctacgccgtgcggggagtgtcgttttccgtcggcgaccgcaggacgctggggatagtcggcgagtctggctgcggtaagagcgtaactgcggcggcgataatgcgcctagtccctaccccgccgggcaagatcgaatcgggatcgatacgctttgaggaaaaagatctgctggccattccggagaaagagatgtgcggggtgcgcgggcggcggatatccatggtgttccaagacccgatgacctcgctcaacccagtcttcacctgcggttaccaaaccgcggaatcactgatcctccacaagggcatggataaacgcgccgcggcggagttatctatggagttgttctcggaggtcggaatcgccgaacccgaacgcgtcttttccagctacccgcacaacctgagcggcgggatgcggcaacgtgttatgatcgcaatggcgctggcctgctcgcccaaattattgatagcggacgaacccactacggccttagatgtgacagtccaagcgcgattgttggaattgttgaagaagctgcaggacaccaaggacatgagcatgatccttatcacccacaatttaggcattgtggccggaatggcgcacgacgtgatagtgatgtacgccggggaaatagttgagtcccgcgccggcgcagaggttatttga

SEQ ID NO: 53690 - protein, 243 aa, Unknown
  Obtained from environmental sample
  DOMAIN (33)...(231): ABC transporter
  misc_feature (1)..(243): Xaa is any amino acid
MPCLSCNDLRVSFRIQKKSAYAVRGVSFSVGDRRTLGIVGESGCGKSVTAAAIMRLVPTPPGKIESGSIRFEEKDLLAIPEKEMCGVRGRRISMVFQDPMTSLNPVFTCGYQTAESLILHKGMDKRAAAELSMELFSEVGIAEPERVFSSYPHNLSGGMRQRVMIAMALACSPKLLIADEPTTALDVTVQARLLELLKKLQDTKDMSMILITHNLGIVAGMAHDVIVMYAGEIVESRAGAEVI

SEQ ID NO: 53691 - DNA, 333 bp, Unknown
  Obtained from environmental sample
  misc_feature (1)..(333): n is a, c, g, or t
ttgacgggatcgttttcaacagcacctccgtatatgggtgccgcggcgactcaaataacctctgcgccggcgcgggactcaactatttccccggcgtacatcactatcacgtcgtgcgccattccggccacaatgcctaaattgtgggtgataaggatcatgctcatgtccttggtgtcctgcagcttcttcaacaattccaacaatcgcgcttggactgtcacatctaaggccgtagtgggttcgtccgctatcaataatttgggcgagcaggccagcgccattgcgatcataacacgttgccgcatcccgccgctcaggttgtgcgggtag

SEQ ID NO: 53692 - protein, 110 aa, Unknown
  Obtained from environmental sample
  misc_feature (1)..(110): Xaa is any amino acid
MTGSFSTAPPYMGAAATQITSAPARDSTISPAYITITSCAIPATMPKLWVIRIMLMSLVSCSFFNNSNNRAWTVTSKAVVGSSAINNLGEQASAIAIITRCRIPPLRLCG

SEQ ID NO: 53693 - DNA, 510 bp, Unknown
  Obtained from environmental sample
  misc_feature (1)..(510): n is a, c, g, or t
ttgaccatttgctgtacaagtggtttaataacaacagggaattcaatggataaatctttatacatactgatatatgttttttccggcattgttttattttggttcggttatcttctctttttcggcaaattgtcgcctttcttcccaaaaatattttcttttaaggaatggaaaaggattaataaaaaaataaaagaaaataaagagaaagaaaacagtatagagaaaggagacccgggtgatgcacgggtatgccccgtctgttcatctaaattaattaaaagcgaacaggttaaatctgtggctttcccttctgtcgcgggcggtaaatatcgtatgatgcacattcgcggctgtccaatctgccttaataataacgcgcccagaaaatgcccgatttgtaatgctgctttaggtttggaagattaccttctttgccgtatgtttgaacgttctgtccgtaaaaatcatattcatgtattaggctgcaatctctgtaaaaaaacctga

SEQ ID NO: 53694 - protein, 169 aa, Unknown
  Obtained from environmental sample
  misc_feature (1)..(169): Xaa is any amino acid
MTICCTSGLITTGNSMDKSLYILIYVFSGIVLFWFGYLLFFGKLSPFFPKIFSFKEWKRINKKIKENKEKENSIEKGDPGDARVCPVCSSKLIKSEQVKSVAFPSVAGGKYRMMHIRGCPICLNNNAPRKCPICNAALGLEDYLLCRMFERSVRKNHIHVLGCNLCKKT

SEQ ID NO: 53695 - DNA, 1221 bp, Unknown
  Obtained from environmental sample
  misc_feature (1)..(1221): n is a, c, g, or t
ttgtgttgtggatacacgacgaagcaactgctggcggcctgcgccaacgatgtatgggagggggttaatattgttaccaataacctgcgcattcttaacacacgcaaaactatcgttgaactgattttagttaatcatccgcatgaatgtactttatgcgtacgcagtaaaaaatgcgaactgcaaacgctggccaaaagtttcagcctctttgaaccgtctttcgaaaatgacagccctgaaatttttacatcaatagaaaaagctacgtttatcgaaaataaaataattgtccgcaacatgaaaaaatgtataaaatgtatgcgctgcgtagaagtatgccaggaagtgcagacaatccgcgcaataaacacttcgcatcgcagttatgagtacagaatatcttccccgtacaaccagcctgtcgaagacggactctgcgtctactgcggaaaatgctcggaagtttgccctgtcggcgcaatatacggatacgatcaagttactaaaattctattgagcctttacggcaaattaaacaacaccggcgaacaacgcgttatagcgcagatttcaccggaactggcggaaattctgaacagagaatatgtttttgaagacaaaaccatcactgcgggaaaaatgataaccgctcttaaaatgctcggctttgacaaagtttatgatacggcaatttcagctaacatctgcaattcacagatgtgcgaagaactggaacagcgtatcaaagacggaggcagactgccgttaatctccggtaactcgctgggcgtaagacgttttataaaaaacttttatccaactttaatcgatcacctttcaaaaaacggaactccgcgtcaagtttttgcggaaacagttaaacccttttacgccgccaaagagggtatagacccgcaaaaagtcatgtccgtttcatttgtaccggatattgcccgaaaatacggagtaaacgataaaactgattatgctcttaccgccatagaacttacgagaatgctcaaaatttcaggaattgaaatcagtaacctgccggaaagcgattttgatactattgaattgccgaatctgggcggcacagcccgtcttgaacaaaaagaaattctgcgaggttatgcgaaagcgcgcaaagtaatggaagcaatccaaaaacgcgaatgtacagcgaaatgggtggaaatcgaaagcagccccaattag

SEQ ID NO: 53696 - protein, 406 aa, Unknown
  Obtained from environmental sample
  DOMAIN (97)...(120): 4Fe-4S binding domain
  misc_feature (1)..(406): Xaa is any amino acid
MCCGYTTKQLLAACANDVWEGVNIVTNNLRILNTRKTIVELILVNHPHECTLCVRSKKCELQTLAKSFSLFEPSFENDSPEIFTSIEKATFIENKIIVRNMKKCIKCMRCVEVCQEVQTIRAINTSHRSYEYRISSPYNQPVEDGLCVYCGKCSEVCPVGAIYGYDQVTKILLSLYGKLNNTGEQRVIAQISPELAEILNREYVFEDKTITAGKMITALKMLGFDKVYDTAISANICNSQMCEELEQRIKDGGRLPLISGNSLGVRRFIKNFYPTLIDHLSKNGTPRQVFAETVKPFYAAKEGIDPQKVMSVSFVPDIARKYGVNDKTDYALTAIELTRMLKISGIEISNLPESDFDTIELPNLGGTARLEQKEILRGYAKARKVMEAIQKRECTAKWVEIESSPN

SEQ ID NO: 53697 - DNA, 2340 bp, Unknown
  Obtained from environmental sample
  misc_feature (1)..(2340): n is a, c, g, or t
gtgacgggttggagcggccgcaacttcaaagtcgccgatttttcttcgtttgctaaggtcggggagtaccgcgtgagggtcggcgcggcggagtcgccggttttctccatcggggagaagatattgcaggttaaaacggggccggatcagctagcttttttcaaagcctataggagcaaggacgaaggggataggaacttgccgatttttgggagcggcggcacccacaatatttacggcggttggttcgacgcgtcgggcgatatggggaagcacatatcccacttgtcgtacgctaattacttcagcccgcagcagataccgcttgtcgcttgggcgcttctccacgctagcgagcttcagccggaggcttttggcgaggcggccaaaacagaggcggcttggggcgcggactttctcctgagggcgctctctaaggaggggttcttctacatgtcggtttttgacaattggggcgacgggtacaggtggacggagcccgcggccggttccaaggcgccgcgtgagatatgcgcttggagcggttcggagggtaaccggtcggccgcttaccagtgcgctatgcgcgagggcggcgggatgtcgatagcggcgctggctcgcgccgcgaaagcggggataagcggcgacagcagcgcggcgcagtacttggcgggagcggagcgggcgtataagcatcttagggataatcccgttaagtatcaggacgacggcaaggagaatattattgacgattactgcggcctcttagccgcaagcgagttgtacaacgctacaagcaaagagcaatatcgctccgacgcccaagatcgggtaacgaaactcctagcccgtcaatcggatgaagggtggtttttctcgggaaccgacagcggcggacggaacattcggccgttctaccatgccgccgacgagggggctctcgtcgtcgcgttgtcgcgttactacgagattatgaaggcggaagcgggtgcggggcgggacatgaacgacgttcgctacgcggtcgggaagaatttgcgtgggtacagcggcatcacccgtgacggcgatgcgaacccgttcctgtacgctaagatgtatagggcggtgagcgtggacgggggcggcgcggtaacaggcggcaaccttgctttgggccggccggccgcagcctcccgcgtggagggcagctacaccgccgacaaagcggttgacggcgacgcgtccagccggtggtcaagctatcagaacggcgcccagaacgattcgcagtggatatatgtggaattagacgacgtgtacaaggttaaccgcgtcgtcctcaactgggaggcggcttacggaaagcactaccgtatagaagtttccgccgccgccgtgacaagcactacgaactggacaaaagcgtttgagatcacgaacaacgatggcgccggacgcaaggagcacacgttctcccccgttgatgccaggtttgtgaggatgtacggcgtaaagcgcggcaacgaatacggcggtttttccctgttccagtttgaggtctacggcgagcaagcctcgcccccgaccccgccgagcccgtatcaggcccgctacttcgttccccacgaaaacgagaccggctattggtggcagggtgaaaacgcgcgcatcgcctctatggcggcggcgttcactatgggcgcgcccgtggccgacaacggcgccgccctctggaacgacacgctgtttggcatggcgacagcccagttagactggatattgggcaaaaacccatttgatctttgcatgatgtacggatacgggaaaaagagctacccgaactacccgagttccgccggcatagaaaatgtaaaaggcggcatctgcaacggcatcaccgcgaaacgctccaaccaaaacgacatagagtgggcgccctaccaagacggcgattccgcttggtgcaactggcgctggatagagcagtggataccgcacaacgcctggtacctgacggccgtatccgccttgtcccataggatagagaacggaatagaggacgatccgatagtgatagcggtgaggcgcggcgtgtcggccaaaaccgtccgtctgaagatatcggcggtcaggggaatgggcataaagataacgctaccgtttaatgcggacgataggacggaggtagcggtctacaatgtgctggggaagagggtctacgcgcataaaatacaacgagggctgcgctccgtatcgatgcgtctcccgccgaccgcggccaaaggaacctacgtagtcgatatcaaagacggggagggtaagaatagggcgttcggaaaagtaattttcagatag

SEQ ID NO: 53698 - protein, 779 aa, Unknown
  Obtained from environmental sample
  DOMAIN (389)...(513): F5/8 type C domain
  misc_feature (1)..(779): Xaa is any amino acid
MTGWSGRNFKVADFSSFAKVGEYRVRVGAAESPVFSIGEKILQVKTGPDQLAFFKAYRSKDEGDRNLPIFGSGGTHNIYGGWFDASGDMGKHISHLSYANYFSPQQIPLVAWALLHASELQPEAFGEAAKTEAAWGADFLLRALSKEGFFYMSVFDNWGDGYRWTEPAAGSKAPREICAWSGSEGNRSAAYQCAMREGGGMSIAALARAAKAGISGDSSAAQYLAGAERAYKHLRDNPVKYQDDGKENIIDDYCGLLAASELYNATSKEQYRSDAQDRVTKLLARQSDEGWFFSGTDSGGRNIRPFYHAADEGALVVALSRYYEIMKAEAGAGRDMNDVRYAVGKNLRGYSGITRDGDANPFLYAKMYRAVSVDGGGAVTGGNLALGRPAAASRVEGSYTADKAVDGDASSRWSSYQNGAQNDSQWIYVELDDVYKVNRVVLNWEAAYGKHYRIEVSAAAVTSTTNWTKAFEITNNDGAGRKEHTFSPVDARFVRMYGVKRGNEYGGFSLFQFEVYGEQASPPTPPSPYQARYFVPHENETGYWWQGENARIASMAAAFTMGAPVADNGAALWNDTLFGMATAQLDWILGKNPFDLCMMYGYGKKSYPNYPSSAGIENVKGGICNGITAKRSNQNDIEWAPYQDGDSAWCNWRWIEQWIPHNAWYLTAVSALSHRIENGIEDDPIVIAVRRGVSAKTVRLKISAVRGMGIKITLPFNADDRTEVAVYNVLGKRVYAHKIQRGLRSVSMRLPPTAAKGTYVVDIKDGEGKNRAFGKVIFR

SEQ ID NO: 53699 - DNA, 564 bp, Unknown
  Obtained from environmental sample
  misc_feature (1)..(564): n is a, c, g, or t
atgcttaaccataaagtcagccatgttaaggagtccccacagactatacagcccccactatccacactatcaacacaatccataccagccgcactatccactcaactctctcaaaccgctcatataaaaagccctgaatgtgttctgcccctgctacggcggtggcagaaccgtaggcaggaaaacttccttgcaattacgcttgacgggtcccatcatgttattaaaatccaccacataaccaaggggcttgcaaacaggactattgtgcatccgagggaatgtttttatcccacaatcaaggactatgccgtatctgtcatcttcgttcacaaccacccgtcaggctccgcaatttcaagcccggaggacgatgaaattactgaccgcctttgcatgtcggctgagatattgggcattaatatgctggatcatatcatcattaccccaaagaatggtctctattcctacaggcgtgaaggtaaacttcccattaagcacaagggctatgcgctaaagaagtttgcaaaatcaataggcaaagcccatgccgcagaatcctag

SEQ ID NO: 53700 - protein, 187 aa, Unknown
  Obtained from environmental sample
  DOMAIN (39)...(163): RadC, DNA repair protein
  misc_feature (1)..(187): Xaa is any amino acid
MLNHKVSHVKESPQTIQPPLSTLSTQSIPAALSTQLSQTAHIKSPECVLPLLRRWQNRRQENFLAITLDGSHHVIKIHHITKGLANRTIVHPRECFYPTIKDYAVSVIFVHNHPSGSAISSPEDDEITDRLCMSAEILGINMLDHIIITPKNGLYSYRREGKLPIKHKGYALKKFAKSIGKAHAAES

SEQ ID NO: 53701 - DNA, 2082 bp, Unknown
  Obtained from environmental sample
  misc_feature (1)..(2082): n is a, c, g, or t
ttgggagaaattttgtcaaaactcaacattgaaacggaattaaatgaaccgcagcttagggcggtacgcgccattaacggacctgtcctaattatcgcgggcgcgggttcgggaaaaaccagagtaattacataccgcatagcgaatatgctggagagcggaattccgcagtcagcgattttagcgcttacatttacaaataaggcggcgcgtgaaatggaacaaagggtgaaggaacttacggggaagaaactgcaaagccttaccgtaagcacgtttcacgccttcgggcttaaaatcataaaagaagaatgcgaggttcttggttacagaaaaaatttttccgtctacgatgaaacggacaaaatgtctctaataaaggaatcgttacgcgaatgtaaaatgttttctcctaaaaccgatatttacgcacttagccagcatttttcaaaaataaaaacaggacttgccaaatggacgcaagacgctaccatgcagcctgtttatgacgagtaccagcaggcgttaaaaatttacaattccgtagattttgacgatctgctgactattccgctggaactttttgaaaaacacagcgatattttggacaagtaccgaaaaaaataccgttatattttggttgacgaattccaggatacaagccttattcagtataaattgttaaagtttctcgcggaaaatgaaaacgccaatatttgcgtagtaggcgatgatgatcagtctatttattcatggagaggcgcgaattacgaaaacttgctgatgtttgaaaaagattttccgggacggatagaaattaaacttgagcagaattaccgctccactactacaattttggacgccgccaacggagtaatttcgcataataccggcagaaaagataaaaacctttggtcgccgaaaacaggcggtaaacccatagagttattttttccgcaaaacgaaacccacgaagccgattttatcgcaacacaaataaaacctttaatgataagggaagattacaaataccatgatttcggagtgcttacaagaaccaactctcttgcgcgtaacatagaagaagcgtttcttgccgataacattccataccgtgtatcaggagggacaagtttcttccagcgcaaggaaattaaggacattatttcatatttgcgcgtaatcgcaaatcccgacgacgatgtaagcctcctgcggattattaacacgcctcgcaggggcataggaaaaactactatcgcttcgttaagcgaaatagcgaaaaagaacaaatgtggtatctggagcgccctatcccgccttaattacgcgaaatctcagggacagcaggggctttttcaggaaaaaggagcggcgaccgagcttgaggaattttccgccatgatagaaaatttcaggctgcttatgcttgaacgaaagtcagaacccggcaggaagtggtccctttcccaatgcgtgcggatgttagtcgataatattgattactggagctaccttgttcttgaacacgggaaggatgaaaaaaaagcaaggtggaagtacggcaatatcgaatattttataaggatgattgaattttgggagaacgatcctgataaccttgacgcgggacttttcccttggcttaaccgtatcagtcttataacacgggacgaaggtgatgatgaaaacgaaggtaaggttaacctctctacaattcacgcggcaaaggggcttgaatacccggttgtttttatcgccggcgcggaaaacggactgctccctcacgaaaaaagcattgaaaaacctgataaaaacgaagaagaggatgaagccggcaacgttgaagaggagcgccggcttttctatgtagccataacgcgcgcaagagaaaaattgtacataacaagctgccgtcagcgccgccgtatgcaaaataccgttgactgcgaaccttcaccgtttctttcggaaattccgcaggagttgattaagtaccatgaaaaaacggaagaatcaaaaatggcagacgacgagcaggcggaaaaatttatttcgcagatgaaagctatgttcggctaa

SEQ ID NO: 53702 - protein, 693 aa, Unknown
  Obtained from environmental sample
  DOMAIN (14)...(482): UvrD/REP helicase
  misc_feature (1)..(693): Xaa is any amino acid
MGEILSKLNIETELNEPQLRAVRAINGPVLIIAGAGSGKTRVITYRIANMLESGIPQSAILALTFTNKAAREMEQRVKELTGKKLQSLTVSTFHAFGLKIIKEECEVLGYRKNFSVYDETDKMSLIKESLRECKMFSPKTDIYALSQHFSKIKTGLAKWTQDATMQPVYDEYQQALKIYNSVDFDDLLTIPLELFEKHSDILDKYRKKYRYILVDEFQDTSLIQYKLLKFLAENENANICVVGDDDQSIYSWRGANYENLLMFEKDFPGRIEIKLEQNYRSTTTILDAANGVISHNTGRKDKNLWSPKTGGKPIELFFPQNETHEADFIATQIKPLMIREDYKYHDFGVLTRTNSLARNIEEAFLADNIPYRVSGGTSFFQRKEIKDIISYLRVIANPDDDVSLLRIINTPRRGIGKTTIASLSEIAKKNKCGIWSALSRLNYAKSQGQQGLFQEKGAATELEEFSAMIENFRLLMLERKSEPGRKWSLSQCVRMLVDNIDYWSYLVLEHGKDEKKARWKYGNIEYFIRMIEFWENDPDNLDAGLFPWLNRISLITRDEGDDENEGKVNLSTIHAAKGLEYPVVFIAGAENGLLPHEKSIEKPDKNEEEDEAGNVEEERRLFYVAITRAREKLYITSCRQRRRMQNTVDCEPSPFLSEIPQELIKYHEKTEESKMADDEQAEKFISQMKAMFG

SEQ ID NO: 53703 - DNA, 630 bp, Unknown
  Obtained from environmental sample
  misc_feature (1)..(630): n is a, c, g, or t
ttgaaatcgggaaaaagtctaccatttcttatgaatatttggtttgcgacaaataatacccataaaaaaacggagcttagcgccattcttaataaagatttaaaaatcccctcggaagaaggtttgtcttttgacccggatgagacaggagcaactttcaacgagaacgcgctgattaaggcgatggcattgcaaaagctaatcggcgggaaggaacctgtcatagccgatgattcgggcttgtgcgtggacgctctaaatggcagacccggcgtcctgtccgcgcgttacggtatggaaaacgggcaaaaacttgcgagcggacaacagaatatcatgcttcttgatgaattgggagacaatccaaaacgaagcgcgaggtttgtttgcgctatggttcttcttttcagtaaagaccgattttttcttattcaggaaacccttgagggtgagcttgtaaaaaagggcgatataaaaggcgacggcggatttggctatgatcctattttttggataccgtctcttgggcgcactcttgccgagctttcgctggaagaaaagaactctttgagccaccgcggaaaagcggggaaacatattgcaagccttttggaaaatttaatatcatag

SEQ ID NO: 53704 - protein, 209 aa, Unknown
  Obtained from environmental sample
  DOMAIN (13)...(204): Ham1 family
  misc_feature (1)..(209): Xaa is any amino acid
MKSGKSLPFLMNIWFATNNTHKKTELSAILNKDLKIPSEEGLSFDPDETGATFNENALIKAMALQKLIGGKEPVIADDSGLCVDALNGRPGVLSARYGMENGQKLASGQQNIMLLDELGDNPKRSARFVCAMVLLFSKDRFFLIQETLEGELVKKGDIKGDGGFGYDPIFWIPSLGRTLAELSLEEKNSLSHRGKAGKHIASLLENLIS

SEQ ID NO: 53705 - DNA, 1140 bp, Unknown
  Obtained from environmental sample
  misc_feature (1)..(1140): n is a, c, g, or t
atggataaagtattagaacatttaaaagaagaaatagaaaaagaatttagtaaagaaaagtcccccgatcatatagaaagaggcaagaacgcaagtaatgaaaaattccccgcttctagcggggtgtcagcgaaactgacggggtgtgccccgccgaaggcggggaagatgtatatccgcgaaaatgcaactcgtgcagcagaatacgaagcattcatatacgaacccgatggcacaaaaattcgtgcaaagaacataaatccatatctaatagatgcgcccaacattttcatagaaagcagaagcaagcccttgtgcgatgtgcctgaaatcggaataggaaacaagcctattgacgatggcaattatcttttcacagaaagcgaaaagtatgaatttttgaaaaaagaaccgcaagctgcaaaatggttcaaaaaatggattggctcggatgagtttataaatagacattttcgctattgcttgtggcttggcgattgctcgccagacgaattgagaaaaatgcccgaatgtataaaacgtgttgaagcggtaaggcagttcaggctggatagcaagagtgatggaacacgaaaaatagcggaaacgccacgccgtttccacgtggaaaatatgccgcaaggaacatatataataattccgcgagtatcatctgaaaagcgaaaatatatcccgattggttttataactccagatatattagctagtgattcagcacacataatccccaacgccactctctaccatttcggcattttgacatccagtatacacaacacttggatgagggcagtttgcggacgacttgaaatgcgttaccgctactcaaaggatattgtttacaacaactttatttggcctaatgcaacagacgaacaaagggcaatgatagaaaaattggcgcaaggtgttttggatgcaagggcaaaatttcctgaaagttcgcttgcggatttatacgacccgttggctatgccaccagagttgctcaaagcacatagggagcttgacaaggctgtgatgaagttgtatgggtttgggaaggatgttagcgaggcggagattgtggcggagttgatggggaggtatgagaggttggcgaacttaaaaaatttgtaa

SEQ ID NO: 53706 - protein, 379 aa, Unknown
  Obtained from environmental sample
  misc_feature (1)..(379): Xaa is any amino acid
MDKVLEHLKEEIEKEFSKEKSPDHIERGKNASNEKFPASSGVSAKLTGCAPPKAGKMYIRENATRAAEYEAFIYEPDGTKIRAKNINPYLIDAPNIFIESRSKPLCDVPEIGIGNKPIDDGNYLFTESEKYEFLKKEPQAAKWFKKWIGSDEFINRHFRYCLWLGDCSPDELRKMPECIKRVEAVRQFRLDSKSDGTRKIAETPRRFHVENMPQGTYIIIPRVSSEKRKYIPIGFITPDILASDSAHIIPNATLYHFGILTSSIHNTWMRAVCGRLEMRYRYSKDIVYNNFIWPNATDEQRAMIEKLAQGVLDARAKFPESSLADLYDPLAMPPELLKAHRELDKAVMKLYGFGKDVSEAEIVAELMGRYERLANLKNL

SEQ ID NO: 53707 - DNA, 450 bp, Unknown
  Obtained from environmental sample
  misc_feature (1)..(450): n is a, c, g, or t
atggggctgagcgagaccgagttcatagagtccgcgagcggcaccataaaagagataatcaaccacgagcgcgccgcgagggagcggcttgcaaaagaggcgaagccggagatcagcgacaaaatcagccgggcgctggggatactgcggaacgcgcagatgcttgggttcgcggaattgctcaatctgacctcggcgctcagactgggaatttgttgcgggctgtgcggcgagtacagcgtggacgacctcaacaaaatcgtgatgctcggtatgccggcccatctgcaaatatacataagcggtttggacggcgcgccctccgacctcgacgtcgttagggcggatctggcgaggtcgtttttcagcgagagaggggacaatgcgaggggagcggagaagcccgccgcgaaaaagggcaggagaaagaaaaccgcgccggaggggtag

SEQ ID NO: 53708 - protein, 149 aa, Unknown
  Obtained from environmental sample
  misc_feature (1)..(149): Xaa is any amino acid
MGLSETEFIESASGTIKEIINHERAARERLAKEAKPEISDKISRALGILRNAQMLGFAELLNLTSALRLGICCGLCGEYSVDDLNKIVMLGMPAHLQIYISGLDGAPSDLDVVRADLARSFFSERGDNARGAEKPAAKKGRRKKTAPEG

SEQ ID NO: 53709 - DNA, 999 bp, Unknown
  Obtained from environmental sample
  misc_feature (1)..(999): n is a, c, g, or t
ttgtggcgcaggccggcgagtatctgtatcgtttcgtttacgtttggcgggtcgaccattatcgtctggaagcgcctcgccaaggcgccgtccttctctatgtatttgcggtactcgtcgagcgtcgtggcgcctacgcactgtatttcgccccgggagagggcgggcttgaagatgttcgaggcgtctaagctgccctcggaaccgccggcgccgactatcgtgtgcagttcgtctatgaatatgactacgttgtcgttcttttggagctccagcatcagcgccttaagccgctcctcgaactgcccgcggtacttcgtgccggcgaccattgaggccatgtctaggtttactacgcgcttgttttcgagtacctgcgggatgctcttctctataatcttctgggccaagccctcgacgatggcggtctttcctatacccggttccccgattaacacggggttgttctttttgcggcggctgaggatctggactacacgttcgatctccttctcgcggcctatgacggggtcgagcttaccctcccgcgccatagccgttaggtcgcggccgaagtggtcgagcatgggcgtcttgctcttctctttggaggtggccggcgtgccgctcacctctccgcccttgagcacgcggccgatttcctctttcacgtggtcgtactcaagccccgccgcggcaagggcgccggccgccgccgactcggtgtccttcataagcgccaagagcaggtgctccgtgccgatgtacttatgcgacatggaccgcgcctcgttcgccgcgatctccaaaaccttcttcgcccgcggcgtgaatggcagcatctgccccgccaacatcatcccgcctacggaggttatggtcttctctatgtttgcgctcaggtcctcaaggtctatgcccatgccgcgcataaccgctaccgcgacgccgtcgccctcctttatcaggccgagcaacaggtgctccgtgcccacgtaa

SEQ ID NO: 53710 - protein, 332 aa, Unknown
  Obtained from environmental sample
  SIGNAL (1)...(27)
  misc_feature (1)..(332): Xaa is any amino acid
MWRRPASICIVSFTFGGSTIIVWKRLAKAPSFSMYLRYSSSVVAPTHCISPRERAGLKMFEASKLPSEPPAPTIVCSSSMNMTTLSFFWSSSISALSRSSNCPRYFVPATIEAMSRFTTRLFSSTCGMLFSIIFWAKPSTMAVFPIPGSPINTGLFFLRRLRIWTTRSISFSRPMTGSSLPSRAIAVRSRPKWSSMGVLLFSLEVAGVPLTSPPLSTRPISSFTWSYSSPAAARAPAAADSVSFISAKSRCSVPMYLCDMDRASFAAISKTFFARGVNGSICPANIIPPTEVMVFSMFALRSSRSMPMPRITATATPSPSFIRPSNRCSVPT

SEQ ID NO: 53711 - DNA, 543 bp, Unknown
  Obtained from environmental sample
  misc_feature (1)..(543): n is a, c, g, or t
ttgattgatgaatggcaggccgcgcccgtattatgggatgcggtgcgtgtagaagtggataaacggggtgaggacggattgtttatccttaccggttcaacctcggtagatgattcaaaaataatgcattcgggtacgggtagaattgcaaggctcatgatgtatccgatgagcttgtttgaatcgggagaatcaaacggaactgtttctttactaaaattatttgacgacaggggctatgatattgacggcgcaaaatcagatttgtctgtggaacaattaatttttgccgcatgcagaggcggctggccggcaagtttattcaagaaaaccgataaagcatcattatttaccgcttcttcttatattgataatatctgtgaaagcgacgcttcgactgtggatggggtaagccgcgacccaaggcggacgcgggagattttgcgatcatacgccagaaatatttccactctgtcgggtaaccaaacaattattaaggatataaccgccaattttggaaccatcagtgagaattgtctttga

SEQ ID NO: 53712 - protein, 180 aa, Unknown
  Obtained from environmental sample
  misc_feature (1)..(180): Xaa is any amino acid
MIDEWQAAPVLWDAVRVEVDKRGEDGLFILTGSTSVDDSKIMHSGTGRIARLMMYPMSLFESGESNGTVSLLKLFDDRGYDIDGAKSDLSVEQLIFAACRGGWPASLFKKTDKASLFTASSYIDNICESDASTVDGVSRDPRRTREILRSYARNISTLSGNQTIIKDITANFGTISENCL

SEQ ID NO: 53713 - DNA, 921 bp, Unknown
  Obtained from environmental sample
  misc_feature (1)..(921): n is a, c, g, or t
gtgaaactcggtattttcggcggaagttttaatccggtgcattacgggcatttttttcttgttgatgccgctgtttcaaaattaaaactggacagggttgtaatgattcccgctttccgttctccttttaagcttgaggcggaaaacatggaaggcggcgctaacgacaggcttgatatgcttaccacagcagccgcgggtgacagcagggtggctatcgatgattgtgagatcaggcggggaggggtttcctacaccgtggacacaatcgaagacattgccgcccgctatctgccggacggaaagccggcgctcattatcggggacgatcttgccgccgatttcccaaagtggcgcgacagtaaaaaaattttggaattagcggatatagtcatagtacgcaggaaaaagtccgtatcaggtaattcggaagacatatacccgtttgcgcatatccttcttgataacgaaataatggatatttcctcgcaaatgatacgggagaagataaaaaccgatcaggactggcgttcccttgtgcctgccggagtaagggtaataatcgaagacagacggctttacggctataacggtaaaggacaatcctcgaacataaagtttgcgaacgacaaagattgttcccgagaaaatattttacgcatagaggaggaggcgcgcagagttcttactgtcgagcgttttcttcattccagaaacacggcccttttggcgcatgatctttgcctccgcttcggcataaatccaaaggcgggttaccttgcgggaatcgcccatgatttggcaaagcagacggagccaaaacttttattgaaaatggtgaaggacgatggtctgccggttacggacattgaaaaaggaaaaccaaaccttcttcacggaagggcggctgcggtatgctaa

SEQ ID NO: 53714 - protein, 306 aa, Unknown
  Obtained from environmental sample
  DOMAIN (5)...(169): Cytidylyltransferase
  misc_feature (1)..(306): Xaa is any amino acid
MKLGIFGGSFNPVHYGHFFLVDAAVSKLKLDRVVMIPAFRSPFKLEAENMEGGANDRLDMLTTAAAGDSRVAIDDCEIRRGGVSYTVDTIEDIAARYLPDGKPALIIGDDLAADFPKWRDSKKILELADIVIVRRKKSVSGNSEDIYPFAHILLDNEIMDISSQMIREKIKTDQDWRSLVPAGVRVIIEDRRLYGYNGKGQSSNIKFANDKDCSRENILRIEEEARRVLTVERFLHSRNTALLAHDLCLRFGINPKAGYLAGIAHDLAKQTEPKLLLKMVKDDGLPVTDIEKGKPNLLHGRAAAVC

SEQ ID NO: 53715 - DNA, 486 bp, Unknown
  Obtained from environmental sample
  misc_feature (1)..(486): n is a, c, g, or t
atgacgatttttgacgctcttttaaaagaacacggaatgaaccgccgtcatcgtataatgcttgaaaccaccgcaatacttcatgatgtcggtacatacataaaagcgtcaggccaccagaaacacggtcagtatattgtcgctaattcggaaattttcggattgcacagcgacgaactgctgattatcgccaatgttattaactatcacaggggagattcgccttcaaactcggatattgaatatattaaactgcaaagcgaagagagaattcttgttttaaaaatggcggctattcttagaatcgccgatgctctggatcgcggtcattcccagcagataaaaaaattcaatgttgaacgccgtcgtgagacaattgttattcatgtggacggaacttatgatttttcgcttgagttaatcggtcttgaagaaaaaggcggaatgtttcaggatgtattcggctacaaagtagttttaggttaa

SEQ ID NO: 53716 - protein, 161 aa, Unknown
  Obtained from environmental sample
  misc_feature (1)..(161): Xaa is any amino acid
MTIFDALLKEHGMNRRHRIMLETTAILHDVGTYIKASGHQKHGQYIVANSEIFGLHSDELLIIANVINYHRGDSPSNSDIEYIKLQSEERILVLKMAAILRIADALDRGHSQQIKKFNVERRRETIVIHVDGTYDFSLELIGLEEKGGMFQDVFGYKVVLG

SEQ ID NO: 53717 - DNA, 1197 bp, Unknown
  Obtained from environmental sample
  misc_feature (1)..(1197): n is a, c, g, or t
ttgggactttcaatcagcaagacttttgtggagatgatgggcggaaaaataattgtagacagcgagtatgaacagggaagcgttttcctggtcataattccgattgtattgggtaaaaaggaagatgttaaatcaaataaaggtttgcctgagggacatatactttacgcgccggacgccaaagttcttgttgtagacgacaatgaattcaacataagggtcgccgaaggactgatcggcttgtttaagatcaatgttcacacggctttttccgggaaagaagccattgatatggttcagaagactgattatgacattgtatttatggatcacatgatgcctgaaatggacggcgttgaagcgacgggcgaaataagaaaacttggcgagaagtatgaacgtcttcccattatagccttgacagctaacgcggttcagggcgcaagagagatgtttttatccaacggatttgacgggtttatctcaaaacccattgatattcaggaaatgtacagaatcctgaaagaatggctgccgcttgagaaaatagagataaagagagagaaagcgccggaaaagattgatgaagagggaagcagtgaatttttacaggcaatgactaaaatagacgaaatcaatgtggatgtgggcttaagccgcgtttccaacatggaaaatatgtaccgggatacgctggagcttttcaatcaaaagatcatatcggaatgcgacgctatgtacaatatgataaattacggggatataaacggattttcaatttccgtgcacgccatgaaatcggcgttatccaccataggggcgatgagtttgtccgaagcggcgttaagactggaaacgtccgcaaaagataatgacttcgccttctgtgtggaaaggtttccggctctcagaaacaagcttgtaaaactgcatgaagagctgtcggttattttcccgaacaaagttgaaaaaaagggcaagaaaaagaacggagataaagcctatttaaaggaaaaattagtaaaagcgtttgaagccgcttctgactttgataatgacgcgggtcttagcgttataaacgatttgatgacctatgatttcggcgagcggaataatgatttattggaaagcgcagccaaagcgtttaaggattttgattttagcgccgctacggaactgttgaataagttaaaataa

SEQ ID NO: 53718 - protein, 398 aa, Unknown
  Obtained from environmental sample
  DOMAIN (60)...(175): Response regulator receiver domain
  misc_feature (1)..(398): Xaa is any amino acid
MGLSISKTFVEMMGGKIIVDSEYEQGSVFLVIIPIVLGKKEDVKSNKGLPEGHILYAPDAKVLVVDDNEFNIRVAEGLIGLFKINVHTAFSGKEAIDMVQKTDYDIVFMDHMMPEMDGVEATGEIRKLGEKYERLPIIALTANAVQGAREMFLSNGFDGFISKPIDIQEMYRILKEWLPLEKIEIKREKAPEKIDEEGSSEFLQAMTKIDEINVDVGLSRVSNMENMYRDTLELFNQKIISECDAMYNMINYGDINGFSISVHAMKSALSTIGAMSLSEAALRLETSAKDNDFAFCVERFPALRNKLVKLHEELSVIFPNKVEKKGKKKNGDKAYLKEKLVKAFEAASDFDNDAGLSVINDLMTYDFGERNNDLLESAAKAFKDFDFSAATELLNKLK

SEQ ID NO: 53719 - DNA, 723 bp, Unknown
  Obtained from environmental sample
  misc_feature (1)..(723): n is a, c, g, or t
atgcgcggttacaagcctgggcgtttttcttttaatgtccgcgggggcagatgcgaaaactgcgagggcgacgggacaattaaaattgaaatgaattttttaccggacgtctacattacctgcgacgtttgtcacggcaagcgctttaacagggagactctggacatacactacaagggtaaaagcatcgccgatgttctggacatgaccatagaagaggcggcggaatttttcgcgcccattccacagattgcccgcaaaatggatacccttctttcggtgggccttggttacgtaaagttaggccagtccgcccttacgctttcagggggcgaggctcagcgggttaagctcgccctcgaactatccaagcgctccacgggaaaaacattttacatccttgacgagcctaccaccggtctccacttcgccgatgtaaagcagctgatggaagtgatacagcgcctcgttgatcagggcaatacggtggcgatgatcgagcataacctggatgtgcttttgcaggcggatcacataatagacctggggccggaaggaggcgacaggggcgggcaagtgataattaccgggacgcctgaagaagtggccgaatattccctctcgtatacaggtaattacattaaggagcatttaaaagagcacggcaggaaacccgcgagtgccggtgcgttaaagcaaggggcgcggcaaaaatcaaagtga

SEQ ID NO: 53720 - protein, 240 aa, Unknown
  Obtained from environmental sample
  DOMAIN (29)...(186): ABC transporter
  misc_feature (1)..(240): Xaa is any amino acid
MRGYKPGRFSFNVRGGRCENCEGDGTIKIEMNFLPDVYITCDVCHGKRFNRETLDIHYKGKSIADVLDMTIEEAAEFFAPIPQIARKMDTLLSVGLGYVKLGQSALTLSGGEAQRVKLALELSKRSTGKTFYILDEPTTGLHFADVKQLMEVIQRLVDQGNTVAMIEHNLDVLLQADHIIDLGPEGGDRGGQVIITGTPEEVAEYSLSYTGNYIKEHLKEHGRKPASAGALKQGARQKSK

SEQ ID NO: 53721 - DNA, 1965 bp, Unknown
  Obtained from environmental sample
  misc_feature (1)..(1965): n is a, c, g, or t
gtgaaaaaagctcttttccttttagttttgctttttcttttcccggtttttgcaattttgccccaaagcgccgggacagccgccgctacaccggtacaagctgcggaggatgataaaaacccgaaagaagatgctgaagaagaaaaggtctcttacattgaaatggacattaggacctccactcttttggagctggccgcgtggtgcagggaattgggactaagcgatggaggatcctggggacagctcgcctcaaggctccgctcacattacaatctgcgctctcagagaagcgcctatcagcctgggcagcagatcattaccattgagtccgcaaagaccacagagtactttacccttgaagtggtggatgaagaatacgcccggcttaaaggggatgtaatagtaagccttaaggacggggccactgttcaccggattaaagcctgggagatattgtataaccgtacgcgtaatgtgatgactgctacaggaaatgtagagtataccaaagaggaaggagctaccgttgaaactttcaagggtgagtccattacggttaatctggacaactggtcggctattttcatggacggctcgtcgcaaaaatctaccgtaggcagatcagccgcgttcaggttttcgggaacggttatttcaaaaaatgacgaaggcgcgaccgttctttccggggcagatataactaatcctgcaaacgaagaagcttattggtccctgcacgcctcaaagttatggcttcttcccggaaatgactgggcgatttttaacgccgttcttaaagtaggcaatattcccctgctataccttccgtttttcttttaccctgcggatgaaattatttttcaccccgtgcttggttatcgttccagggaaggaacgtttctgcaaaccacaacttacatacttggcaggccaaagtcttcgggaatgtcggaaaactcaataaccaggattttcgggggcgaatccgacagcgagggaaaagtcagggaaggtgtattccttagggcttcaaaagaaaaggcagtagataccagcgcgacgcagttttcagttctttttgacgcctatgtgaatcttggcgcttatctgggaactgaacttgccctgcctgccaaaggattgttcggaaataccagcatttcggttggccttggcctgaccagggatatttatgttagcggcggaaattatactccgtttcccaacttttacggggagagtagctggaattcttccagattttttttcatggacgtgccgttaaggtacaggttcaaattaaacagctcttttaacgtaaaaaatggctcgctttcctttgagattcccttctattcggacccttatgtggatcgcgattttatgaggcggactgaagttctggactggcttgccatgctcagggaaggggtatctgcttcgggggccgtaagcgacaccagcataagctcctatgagtggaagcttggcggttcttttaatccttcgatttcaagccttgcgccgtatgtcagctccttttctatatcgaatctgagcagcaccctgcttttcagccagagaaattccagaagctataccgacacgacagcgccgcccaatccgggaagggcttttttctttcccaaccgctttaccattctttcagccagcgctgcggttgccggtactccgctgaaaacaggaaacacaagtcagagccagactgttgttaaaaccgaaccgccgcccggggacgcgcttcttccggaccttccaatttctccctggggtgtgggacaggaagatgaagccaatgccgcatataccagggttgtttccgatgtctatgatttttcgccccccgtattaagccaaagattcaccatgcctgccacagggggcgcacagctttccgtagattaccgccttgcgctantacggaacctcggcngaatctga

SEQ ID NO: 53722 - protein, 654 aa, Unknown
  Obtained from environmental sample
  SIGNAL (1)...(28)
  misc_feature (1)..(654): Xaa is any amino acid
MKKALFLLVLLFLFPVFAILPQSAGTAAATPVQAAEDDKNPKEDAEEEKVSYIEMDIRTSTLLELAAWCRELGLSDGGSWGQLASRLRSHYNLRSQRSAYQPGQQIITIESAKTTEYFTLEVVDEEYARLKGDVIVSLKDGATVHRIKAWEILYNRTRNVMTATGNVEYTKEEGATVETFKGESITVNLDNWSAIFMDGSSQKSTVGRSAAFRFSGTVISKNDEGATVLSGADITNPANEEAYWSLHASKLWLLPGNDWAIFNAVLKVGNIPLLYLPFFFYPADEIIFHPVLGYRSREGTFLQTTTYILGRPKSSGMSENSITRIFGGESDSEGKVREGVFLRASKEKAVDTSATQFSVLFDAYVNLGAYLGTELALPAKGLFGNTSISVGLGLTRDIYVSGGNYTPFPNFYGESSWNSSRFFFMDVPLRYRFKLNSSFNVKNGSLSFEIPFYSDPYVDRDFMRRTEVLDWLAMLREGVSASGAVSDTSISSYEWKLGGSFNPSISSLAPYVSSFSISNLSSTLLFSQRNSRSYTDTTAPPNPGRAFFFPNRFTILSASAAVAGTPLKTGNTSQSQTVVKTEPPPGDALLPDLPISPWGVGQEDEANAAYTRVVSDVYDFSPPVLSQRFTMPATGGAQLSVDYRLALXRNLGXI

SEQ ID NO: 53723 - DNA, 1539 bp, Unknown
  Obtained from environmental sample
  misc_feature (1)..(1539): n is a, c, g, or t
ttgatagaacgtgaaaaaatggaagccgttaaagccctgtttacggaaaaaggttacgcggtttccggcggtattacaaccacggttaagcgcacgctgatgggcagcatgtgctttactgacccggaaaaccgcaaaaggttaggtgaaatcgccgcgtacacggcggggctattcgatgaggtaatactggacgatttttattttaccaactgccgctgtgaatcctgcattaaggcgaaaggcgaccgcgactgggcgacattccgcctcgcgcttatgaatgatatttccgaaaacgtgattatcaaaaacgctaaaactgcgaatcctaaggtgaattgcattatcaaataccccaactggtacgacagttttcaggccaacggctataaccttgaagacgaatcgaaaatgtttgacatgatctacgccggaaccgagacccgcgatccccattacacccatcagaatttgccgcggtacctgagttttttcctgccccgcctgtttgaacacatcaagccgggaaaaaacggcggcggctggtacgacctttttgactgttctctggaagactatgtgcaacaggcgtatttaaccttattcgccaaatgcagagaacagatgctgttctgtttccccttacttgccaataacccgccatataccgccgccgtgggcgcgttctacgacgatgcggatcttttcatcggccggcttggagagccggtgggcgtcgcctgttacaagccttaccattcttatggagagcggcttcttcatgaatttatcgggatgtgcggcgttcctctcgatccgtatccctattacccaaaagacgcgaagacggtatttcttaccgcggatgccgcatgggataaagaaatagtcggcaagataaaacaaagtcttttaaacggaagcaaggttttcattacaagcggactgtatgaaaaattggcagggaaggggatagagaatatactgccgcttgaagttacaaacagaaaaataaccacggacgtttttacaaacagtacttttggcagaggcaactgcggttatataaaagccgccgcttccataactcttccccatgtcgcttacaatgaaaacgatatatggccgctttccgccgcgctcactccccattcaagccacgccatgctgttatgcggagcgtatggtaagggcattctttatgtactgacaatacccgactcattcgccgatttgtacaatcttcccgctgagacgcttaatcttttacgcagggaatttaatttgcccataacgctggaatgcggcagtcgcgtgtccttgtttccctatgacaatgacacctttattttgcagtcgttccttgacaggccggaacgggtacgcgtccgcattaacagggtgggagtgtcgttagtaccgttaaaaatgccaaaaatgcgtccgtttgaaattgtccggtcaggggagaacgagagtatttttgatatttacataacgccggggcattatatggcgtttaggattgaagggtag

SEQ ID NO: 53724 - protein, 512 aa, Unknown
  Obtained from environmental sample
  misc_feature (1)..(512): Xaa is any amino acid
MIEREKMEAVKALFTEKGYAVSGGITTTVKRTLMGSMCFTDPENRKRLGEIAAYTAGLFDEVILDDFYFTNCRCESCIKAKGDRDWATFRLALMNDISENVIIKNAKTANPKVNCIIKYPNWYDSFQANGYNLEDESKMFDMIYAGTETRDPHYTHQNLPRYLSFFLPRLFEHIKPGKNGGGWYDLFDCSLEDYVQQAYLTLFAKCREQMLFCFPLLANNPPYTAAVGAFYDDADLFIGRLGEPVGVACYKPYHSYGERLLHEFIGMCGVPLDPYPYYPKDAKTVFLTADAAWDKEIVGKIKQSLLNGSKVFITSGLYEKLAGKGIENILPLEVTNRKITTDVFTNSTFGRGNCGYIKAAASITLPHVAYNENDIWPLSAALTPHSSHAMLLCGAYGKGILYVLTIPDSFADLYNLPAETLNLLRREFNLPITLECGSRVSLFPYDNDTFILQSFLDRPERVRVRINRVGVSLVPLKMPKMRPFEIVRSGENESIFDIYITPGHYMAFRIEG

SEQ ID NO: 53725 - DNA, 798 bp, Unknown
  Obtained from environmental sample
  misc_feature (1)..(798): n is a, c, g, or t
atggattttcaatactggcagcctgaaatagaaaaaatgcccagagcgcggcttgaagagttgcagttgacaaaattaaaaacagaggttagctatgctctgcgtacaactttttacaaagagcggcttgcgaaagttgggataaaaagtcctgatgatattaaatcgcttgccgatcttaaaaaaattccttttacttcaaaaaacgatctacgagacggcttcccctacggatttttaagtattccaaatgatgaagttgtgcgtcttcacgcttcaagcggcactacgggtattccaacgacaatttattttaataaagacgatataaaacaatgggcgaattatatggcgcgctgtatctacggaacaggctgtacaaaaagcgacgtattccaaaacatgataacctacggtcttttcaccggcgggctgggaatgcaccaaggcggcgaagaagtgggaatgcttgtcattccggcgggagcgggaaatacagcccgccagttcagaatgatgcaggattacggaactactgtattacacgcaacgccgagtttccttctgcaccttgaaacaaaaatgaaagaagcgggcgtttcgcgggaaagcctttccctaaaacgcgcgtttgccggagcggagccttactccgaggacacgcggcggcgcattgaagcgttattaaaaatcgatgtttttaattcttacgggctttcggaaatgaacggtcccggcgtcgcatttgaatgtcagtgcaaggacggacttcacatctggaagactcggccgatctga

SEQ ID NO: 53726 - protein, 265 aa, Unknown
  Obtained from environmental sample
  misc_feature (1)..(265): Xaa is any amino acid
MDFQYWQPEIEKMPRARLEELQLTKLKTEVSYALRTTFYKERLAKVGIKSPDDIKSLADLKKIPFTSKNDLRDGFPYGFLSIPNDEVVRLHASSGTTGIPTTIYFNKDDIKQWANYMARCIYGTGCTKSDVFQNMITYGLFTGGLGMHQGGEEVGMLVIPAGAGNTARQFRMMQDYGTTVLHATPSFLLHLETKMKEAGVSRESLSLKRAFAGAEPYSEDTRRRIEALLKIDVFNSYGLSEMNGPGVAFECQCKDGLHIWKTRPI

SEQ ID NO: 53727 - DNA, 1101 bp, Unknown
  Obtained from environmental sample
  misc_feature (1)..(1101): n is a, c, g, or t
ttggtttcctttcttggagacgaagaccccgccagccgcgctttaaaattaagaggccccgatgtaatatcgacaattttaatgcttggcttgcaaggatcgggaaaaaccacaagcgcggcaaaacttgccctgcgccttaaaaaagaggggcgcaaacccatgcttgtagcgtgcgatttaatccgtcccgccgcaatggaacagcttgccgttcttggcggacaaattggaatccccgtttataaagaagacggcgcaaaggacagcgttaaagtttatcaaaacgccatatcatgggcaaataaaaacatgatcgataccgtcatcatagacacgacaggccgaatgcaaattgacgaaccgatgatgcaggaactttcccgccttaaaaacgccgtggcccccgatgaaatgctccttgtagccgactcaatgacaggacaagccgccgctgacatcgcaaaaacatttgacgaaaaggtagggcttacgggagtaatcttaagcaagttcgactccgacacacgcggcggcgctgcgctctcgttgaaaacagtaacaggaaaacctttaaagttcacaggtaccggagaaaaacccgaagaccttgaacctttccaccctgaaagaatagcgggccgtatcctcggcatgggcgacgtggtaagtcttgtagaaaaagcccaagaagtgattgatcagaaagaagccttggaactccagaaaaaaatggagaaagagaacttcacccttgatgactggttgaatcaaatccgctctttaaagaaaatgggctcccttcaaaaaatgttggagatgattcccggtatgcagggacagataaacgaagatgacattaacaaagaggaattaaaatatcaggaagcgatactaagctccatgacccttaaagaacgtaacaaccacttgattatcgggccgccgcgaagaagcagaatcgccagaggttcgggcacgtctgtcgcggaagtggcgaggctgttaaaaaagtttgaaaaaatgcgcggcatgatgaagaagatggcgaagggcgcaaggggcggcgcgatgccgggaataccggggatgtttcagtag

SEQ ID NO: 53728 - protein, 366 aa, Unknown
  Obtained from environmental sample
  DOMAIN (249)...(346): Signal peptide binding domain
  misc_feature (1)..(366): Xaa is any amino acid
MVSFLGDEDPASRALKLRGPDVISTILMLGLQGSGKTTSAAKLALRLKKEGRKPMLVACDLIRPAAMEQLAVLGGQIGIPVYKEDGAKDSVKVYQNAISWANKNMIDTVIIDTTGRMQIDEPMMQELSRLKNAVAPDEMLLVADSMTGQAAADIAKTFDEKVGLTGVILSKFDSDTRGGAALSLKTVTGKPLKFTGTGEKPEDLEPFHPERIAGRILGMGDVVSLVEKAQEVIDQKEALELQKKMEKENFTLDDWLNQIRSLKKMGSLQKMLEMIPGMQGQINEDDINKEELKYQEAILSSMTLKERNNHLIIGPPRRSRIARGSGTSVAEVARLLKKFEKMRGMMKKMAKGARGGAMPGIPGMFQ

SEQ ID NO: 53729 - DNA, 375 bp, Unknown
  Obtained from environmental sample
  misc_feature (1)..(375): n is a, c, g, or t
atgccgaggatacggcccgctattctttcagggtggaaaggttcaaggtcttcgggtttttctccggtacctgtgaactttaaaggttttcctgttactgttttcaacgagagcgcagcgccgccgcgtgtgtcggagtcgaacttgcttaagattactcccgtaagccctaccttttcgtcaaatgtttttgcgatgtcagcggcggcttgtcctgtcattgagtcggctacaaggagcatttcatcgggggccacggcgtttttaaggcgggaaagttcctgcatcatcggttcgtcaatttgcattcggcctgtcgtgtctatgatgacggtatcgatcatgtttttatttgcccatgatatggcgttttga

SEQ ID NO: 53730 - protein, 124 aa, Unknown
  Obtained from environmental sample
  misc_feature (1)..(124): Xaa is any amino acid
MPRIRPAILSGWKGSRSSGFSPVPVNFKGFPVTVFNESAAPPRVSESNLLKITPVSPTFSSNVFAMSAAACPVIESATRSISSGATAFLRRESSCIIGSSICIRPVVSMMTVSIMFLFAHDMAF

SEQ ID NO: 53731 - DNA, 1101 bp, Unknown
  Obtained from environmental sample
  misc_feature (1)..(1101): n is a, c, g, or t
atgggattcagagatgattttgtttggggggtagcgtcagcatcctaccaggtggaaggagccgcttacgaagacggcaagggcttaagtatctgggatatgttctgcaaacagccggagcgtatcgttgacggttccagcggggatatagcctgcgatcattaccatcgctataaggaagacatagctatcatgaaagagctgggcgtcaaggcttaccgcttttccatctcctggcccagagtaattcccgacggtgacgggaaagtaaacgaaaagggcctggacttttacgagcggcttgttgatgcgattaccgaagcgggaattaccccgtgcgctaccctgtaccactgggatctcccctatgatttattccgcaagggtggctggatgaatcctgaaagccccaaatggtttcttaaatatacagaagcagtcgtcaaaaggcttaaaggcaaattacccattgtgtttacctttaacgaaccccagtgttttataggcatttcctgcgatattacctggcatgctccgggaatacatttccccatttgggataccctttcaatggttcataatgtgctgctggctcacggcctttccgttcaggctctgcgttcgctctcgcctgaaacaaaaatcggttacgcgccagcagtcggcgccaattatcccgcatcgaacagcccggaggacattgaagcggcccgtaagtccatctttgccataaataatgatgttcctagcctttgcgcgtccatttggagcgatccgatttttttggggaaataccccgatgaattatttcaaaactacggtcaatatatgccaaagataggcccggatgatatgaagattatcgcgcaacctcaggactttatagggcagaacatatacaatggcaaccagatcaaggcggacgggaaaggcggatatgaatctgcgcccagagaaaccggttacgcttttaccgcggccaaatggccggtaacccccgaatcactttactggggggcgcgtttcttcgcggaacgttacaagacgccgatttatatcaacgaaaacggccctctcctgtacccatgttgtttcgcttga

SEQ ID NO: 53732 - protein, 366 aa, Unknown
  Obtained from environmental sample
  DOMAIN (3)...(365): Glycosyl hydrolase family 1
  misc_feature (1)..(366): Xaa is any amino acid
MGFRDDFVWGVASASYQVEGAAYEDGKGLSIWDMFCKQPERIVDGSSGDIACDHYHRYKEDIAIMKELGVKAYRFSISWPRVIPDGDGKVNEKGLDFYERLVDAITEAGITPCATLYHWDLPYDLFRKGGWMNPESPKWFLKYTEAVVKRLKGKLPIVFTFNEPQCFIGISCDITWHAPGIHFPIWDTLSMVHNVLLAHGLSVQALRSLSPETKIGYAPAVGANYPASNSPEDIEAARKSIFAINNDVPSLCASIWSDPIFLGKYPDELFQNYGQYMPKIGPDDMKIIAQPQDFIGQNIYNGNQIKADGKGGYESAPRETGYAFTAAKWPVTPESLYWGARFFAERYKTPIYINENGPLLYPCCFA

SEQ ID NO: 53733 - DNA, 390 bp, Unknown
  Obtained from environmental sample
  misc_feature (1)..(390): n is a, c, g, or t
ttgggcattcatgaatcggcggaaatgtatttagagactattcatgttttaggcctgaaagggaatcaggttcgctccattgatattgtcaacgaacttgaatactcaaagccgagcgtaagcgtcgccatgaaaaacctgaaagcgcaaggctatatatctatagacgacgaaggttttattaccctgacaagcaaggggcggaaaatcgccgaaacaatgtatgaacgccatgtcgctatttccgactggctgatttttctgggcgttgataaaaaaacggcggttgacgacgcctgtaaaatggaacacgctatgagtgaaaaaagctttaccgcgattaaaaaacatatcgaaaattggaaaaaagacctgaccactaaaacgtaa

SEQ ID NO: 53734 - protein, 129 aa, Unknown
  Obtained from environmental sample
  DOMAIN (64)...(129): Iron dependent repressor, metal binding and dimerisation domain
  misc_feature (1)..(129): Xaa is any amino acid
MGIHESAEMYLETIHVLGLKGNQVRSIDIVNELEYSKPSVSVAMKNLKAQGYISIDDEGFITLTSKGRKIAETMYERHVAISDWLIFLGVDKKTAVDDACKMEHAMSEKSFTAIKKHIENWKKDLTTKT

SEQ ID NO: 53735 - DNA, 624 bp, Unknown
  Obtained from environmental sample
  misc_feature (1)..(624): n is a, c, g, or t
atgttaacaagatcaatttgttcagataaatcaaggaaagaaggtttacaacttataaccgcctcggataacggtgacattgaaaccgtaaaatccttactcaataaagatatttatatccatacgcaggacaaggaaggaaggtgcgcccttgtggccgccgcttacaggaacaatcttgaaattgtcgatttgctgattgccgccggagctgatgtcaatatgaaagacaacaccctgcaaagcgcctatttaatttcaacctccgaaggatatacggaattactgaaaaaaacactcgaagccggagcggacgttcactgtacggacagttacaacggaacaggtcttatccgcgccgccgaccgcggacatgttgaaatcattagggaacttttaaagacagatatccgggtcaatcatattaacaatataggctggaccgcgttacttgaagcaatcatattgggcgacggaggaaagcggcacactgaggttgtgcgccttttggttgacgcgggcgcggataaaaatttgccggataaaaacggagtcactccgttggcgcacgctaaaaacaggagatttaccgatataattaatatacttgaacctgaccactaa

SEQ ID NO: 53736 - protein, 207 aa, Unknown
  Obtained from environmental sample
  DOMAIN (145)...(182): Ankyrin repeat
  misc_feature (1)..(207): Xaa is any amino acid
MLTRSICSDKSRKEGLQLITASDNGDIETVKSLLNKDIYIHTQDKEGRCALVAAAYRNNLEIVDLLIAAGADVNMKDNTLQSAYLISTSEGYTELLKKTLEAGADVHCTDSYNGTGLIRAADRGHVEIIRELLKTDIRVNHINNIGWTALLEAIILGDGGKRHTEVVRLLVDAGADKNLPDKNGVTPLAHAKNRRFTDIINILEPDH

SEQ ID NO: 53737 - DNA, 564 bp, Unknown
  Obtained from environmental sample
  misc_feature (1)..(564): n is a, c, g, or t
atgcttgaagtaaaagcgttaaaaaaatcttacggagatttttccgtatcgcttgatctgtcggttgacgcgggagaaacgcttgcgctggtcggaccttcgggctgcgggaagacgacggcgcttaatcttatcgcgggtcttgttgagccggaatcagggagcgtagtcattgacggcgaggacattacgagtctgcccgcgtggaagcgaaatgtttcggtggtttttcaggacttggctttgttcccccaccttgatgtcggcggaaatatcgcctacgggctttttatcaaaggcgtgcccaaaaaagaacgccgtcttattgttgagcagacgctggaaattgtccgactgcaagggtatgcggcgcggcgcattgacaccctctcaggcggagagcgtcagcgggtagccattgcgcgctctcttgcgtccagtccgcgggcgcttttgctggacgaacctttttccagcttagacgcccccttgagaaaaagtctcccgcacgatttcttgagattcgctcccattcaaagcgccttgcatttttatcacccatga

SEQ ID NO: 53738 - protein, 187 aa, Unknown
  Obtained from environmental sample
  DOMAIN (25)...(187): ABC transporter
  misc_feature (1)..(187): Xaa is any amino acid
MLEVKALKKSYGDFSVSLDLSVDAGETLALVGPSGCGKTTALNLIAGLVEPESGSVVIDGEDITSLPAWKRNVSVVFQDLALFPHLDVGGNIAYGLFIKGVPKKERRLIVEQTLEIVRLQGYAARRIDTLSGGERQRVAIARSLASSPRALLLDEPFSSLDAPLRKSLPHDFLRFAPIQSALHFYHP

SEQ ID NO: 53739 - DNA, 771 bp, Unknown
  Obtained from environmental sample
  misc_feature (1)..(771): n is a, c, g, or t
ttgtcgaggttaactatgagtaacagatcatactacatagctggaaactggaagatgcacaaaacccgcgccgaagccgcggaacttgccaaggcgctggtcgcgcagttaaaggacgggaagcacaaataccttgtcgcgccgtcttttaccagccttgagaccgtgggcgccattgtcaaaggcaccaatataaggcttggggcgcaggactgcgcgtttgaggagcagggcgcccataccggcgaggtttctgtcctgcagttgaaagaccttggcgtacagaccatcatcctgggccacagcgaaaggcggcatgtctacaaagaagacgacgcgctgatcaacaaaaaagtaaaacttgccctgaaacacggttttgaagtgattctctgcatcggggaactgctggaagagcgcgaggccggcaaggttgagtcggtctgcgaatcccagaccgtgaaagggcttgagggtgtcagcgcaactgatttggcgaatgtcgtcattgcctacgagccggtctgggccattggcaccggaaagaccgccaccccggaagacgcggaggcggttcacgcctttgttcgtaaggtgattgcgaagctctacggacaggctgtcgcggataaaatcatcatacagtacggcggttcggttaaaccggacaatgccgcccaattgatggcaaaagagaacatcgacggcgccctggtcggcggcgcggctcttaagccggatacctttgtccctatagctaaatttaattag

SEQ ID NO: 53740 - protein, 256 aa, Unknown
  Obtained from environmental sample
  DOMAIN (11)...(253): Triosephosphate isomerase
  misc_feature (1)..(256): Xaa is any amino acid
MSRLTMSNRSYYIAGNWKMHKTRAEAAELAKALVAQLKDGKHKYLVAPSFTSLETVGAIVKGTNIRLGAQDCAFEEQGAHTGEVSVLQLKDLGVQTIILGHSERRHVYKEDDALINKKVKLALKHGFEVILCIGELLEEREAGKVESVCESQTVKGLEGVSATDLANVVIAYEPVWAIGTGKTATPEDAEAVHAFVRKVIAKLYGQAVADKIIIQYGGSVKPDNAAQLMAKENIDGALVGGAALKPDTFVPIAKFN

SEQ ID NO: 53741 - DNA, 333 bp, Unknown
  Obtained from environmental sample
  misc_feature (1)..(333): n is a, c, g, or t
atgccgggcagtttcttgccttccagcagttccagggacgcaccgccgcctgttgagacatggctcattttatcggcaaggtggaacttgttcaccgccgccacggagtcgccgccgcctaccacggtgatgacacctttgccggtggcttccgccacgagcttcgccaccgcctcagtgcctttggcaaacgcatcaaatttaaaaacgcctaccgggccgttccacacaatggtcctttgctcccgcaagcacttctttgtattggaggatagtcttcggccctacgtcaagcccgagcagatgttcgggaaggtcgagcctgtcaactga

SEQ ID NO: 53742 - protein, 110 aa, Unknown
  Obtained from environmental sample
  misc_feature (1)..(110): Xaa is any amino acid
MPGSFLPSSSSRDAPPPVETWLILSARWNLFTAATESPPPTTVMTPLPVASATSFATASVPLANASNLKTPTGPFHTMVLCSRKHFFVLEDSLRPYVKPEQMFGKVEPVN

SEQ ID NO: 53743 - DNA, 876 bp, Unknown
  Obtained from environmental sample
  misc_feature (1)..(876): n is a, c, g, or t
atgtcgcacttgggagatccttccaaagacgcgaagaaggcgcaggaaaaagccgagaaagacggcaagacatttgacaaggacgcgtacatcaaaggcaaacaccgcatggcccctgtagccgcctatctcgaaaagaaactgggcaagcccgtaattttcgcgggagaagacagttgttatggcaagaaagcgtttatcgaaagccagcctgacggctccgttatcatgcttgaaaatacccgtttccacaaagaagaaaccgccaaagaaccggcggaattggacaagctggcgaaagagcttgccacctacggcgaaatttttgtaaacgacgccttcggaacagcccaccgtgaccacgcttcaaccgcctcaatcgcgaaatttgttccagtatccgttgccggcttcctgatggaaaaagaagtcaactaccttgagcctattgttacaagcccgcaaaagcctttagtcgctattataggcggcgcgaaggtttcttcaaaaatcgcggtgctggaaagcctgcttaaaaactcggccgcgcttattatcggcggcggcatggcgtatacattctttaaggctcaggggcacaagatcggcaaatcgcttgtagaggacgatcaactggataccgcgaaaaaaatccttgacgccgcanagagcgcgaatgtgcagattgttctgcctcttgaccaggttgccgcgacaagctttgacgcgaactcttctcccatttcagttgacaggctcgaccttcccgaacatctgctcgggcttgacgtagggccgaagactatcctccaatacaaagaagtgcttgcgggagcaaaggaccattgtgtggaacggcccggtaggcgtttttaa

SEQ ID NO: 53744 - protein, 291 aa, Unknown
  Obtained from environmental sample
  DOMAIN (8)...(288): Phosphoglycerate kinase
  misc_feature (1)..(291): Xaa is any amino acid
MSHLGDPSKDAKKAQEKAEKDGKTFDKDAYIKGKHRMAPVAAYLEKKLGKPVIFAGEDSCYGKKAFIESQPDGSVIMLENTRFHKEETAKEPAELDKLAKELATYGEIFVNDAFGTAHRDHASTASIAKFVPVSVAGFLMEKEVNYLEPIVTSPQKPLVAIIGGAKVSSKIAVLESLLKNSAALIIGGGMAYTFFKAQGHKIGKSLVEDDQLDTAKKILDAAXSANVQIVLPLDQVAATSFDANSSPISVDRLDLPEHLLGLDVGPKTILQYKEVLAGAKDHCVERPGRRF

SEQ ID NO: 53745 - DNA, 639 bp, Unknown
  Obtained from environmental sample
  misc_feature (1)..(639): n is a, c, g, or t
atggctatagcattgttaaacagtaatattattgatagttcaaattgccatatatttatattaagcagcgtagatagagctgttattcctaatctaacttatattgattttgaaatgctatataaaataaatgataatcaaaataaaaataaaaagaatactaataattctttaaatgatttgttctcattcataagattaaaacttggttatgataatcctatattcaaacacaatttaaaaaaggaatgctttacacatagacgtttttcaaaaattttatttaattataaagaggatatgaattttttgaatactcaaaaaattaatgtggcaaaagccaaagaaaatctcattctattaaataaaaaattctcagaaaaaggaattaaattgatatttctaatcgctgccgataaatacgatgtttatcgaccatttatggcagataattctttgcccattgacacgacaactgatgagctatcaaatatttctgatgtttttgttataaatacaaagccaatgcttcaagaaatggtgcaaaatggcgaaaaagatgtgtatatggtaaacgatactcattggtcttataaagcgagtgaagctgtagcacgtgaacttgccaatgccatttga

SEQ ID NO: 53746 - protein, 212 aa, Unknown
  Obtained from environmental sample
  misc_feature (1)..(212): Xaa is any amino acid
MAIALLNSNIIDSSNCHIFILSSVDRAVIPNLTYIDFEMLYKINDNQNKNKKNTNNSLNDLFSFIRLKLGYDNPIFKHNLKKECFTHRRFSKILFNYKEDMNFLNTQKINVAKAKENLILLNKKFSEKGIKLIFLIAADKYDVYRPFMADNSLPIDTTTDELSNISDVFVINTKPMLQEMVQNGEKDVYMVNDTHWSYKASEAVARELANAI

SEQ ID NO: 53747 - DNA, 1470 bp, Unknown
  Obtained from environmental sample
  misc_feature (1)..(1470): n is a, c, g, or t
atgaactacttcaatacattgccactccgcatacaactggaggaactcggcaaatgccgttttatggatgcatcggaatttgctcgcggcgtagaggcgcttaaaggcaaaaaaattgtgattataggcgcaggcgcgcagggcttgcaccaagggttaaatttgagggatagcggtttggatgtttcctacgcactcaggcaagccgccattgacgaaaagcgggccagcttcacaaacgctagcgaaaatggattcaaggttggagtatataaagatttaatcccaacagcagatttggtttgcaacctcactccagacaagcagcattccaaagtcgtggcagaaattatgcccttgatgaaaaaaggctcggctcttctttacagccacggtttcaacattgtggaagagggaatgcaaataagagaagatataaccgttataatggttgctccaaaaggaccaggctccgaggttcgcgcagaatatgtacgcggttttggaatgccctctctagttgcagttaaaagagaaaacgaccctgaaggcaaaggtttagactatgcaaaggcttacgccgttgggcttggcagcgaccgtgccggagttttggaaagctcattcattgccgaagtgaaaagcgatttgatgggcgagcaaaccattctgtgcggaatgcttcaaacaggcaccctgctctgctttgaccgcatggttcagcttggcattgaaccagcntacgcctccaagcttntgcaatacggctgggaaacggtgtctgaggctcttaaacaaggcggcataaccaatatgatggacaggctttcaaatccagctaaaataaaggcttttgagctttccgaagaattaaaaaccataatgaaacctctttaccataagcaccaagacgatattatatctggcgaattctcttccacaatgatgaaagactgggcagatggcgataaaaaattgctggcgtggcgcgatgccactggcaaaaccgcttttgagaaaaccgccgctaccagcgcgcaaatcacggaacaggaatattttgacaggggtgttttgatagttgcaatggtaaaggctggcgttgaactagcttttgaaacaatggtgagcgcagggatgaaacccgcatctgcctactatgaatctctgcacgaaacaccgctaatagcaaatctcatatctcgcaaaaaactctacgaaatgaatagggttatttccgataccgcagaatatggttgctatttgtttgcaaatagctgcgttccgcttttggaaaactttatgcaggcacagggcaaagatgttataggcaccgtattcaacgaaggcaaatcgtgcagagtggataaccgccgtttgattgaggtgaatacggctataaggcatcatcctgtggaaaaagttggtgcatggctgcgcagcaaaatgcgcggaatgaaacagttataa

SEQ ID NO: 53748 - protein, 489 aa, Unknown
  Obtained from environmental sample
  DOMAIN (33)...(203): Acetohydroxy acid isomeroreductase, catalytic domain
  misc_feature (1)..(489): Xaa is any amino acid
MNYFNTLPLRIQLEELGKCRFMDASEFARGVEALKGKKIVIIGAGAQGLHQGLNLRDSGLDVSYALRQAAIDEKRASFTNASENGFKVGVYKDLIPTADLVCNLTPDKQHSKVVAEIMPLMKKGSALLYSHGFNIVEEGMQIREDITVIMVAPKGPGSEVRAEYVRGFGMPSLVAVKRENDPEGKGLDYAKAYAVGLGSDRAGVLESSFIAEVKSDLMGEQTILCGMLQTGTLLCFDRMVQLGIEPAYASKLXQYGWETVSEALKQGGITNMMDRLSNPAKIKAFELSEELKTIMKPLYHKHQDDIISGEFSSTMMKDWADGDKKLLAWRDATGKTAFEKTAATSAQITEQEYFDRGVLIVAMVKAGVELAFETMVSAGMKPASAYYESLHETPLIANLISRKKLYEMNRVISDTAEYGCYLFANSCVPLLENFMQAQGKDVIGTVFNEGKSCRVDNRRLIEVNTAIRHHPVEKVGAWLRSKMRGMKQL

SEQ ID NO: 53749 - DNA, 657 bp, Unknown
  Obtained from environmental sample
  misc_feature (1)..(657): n is a, c, g, or t
ttgattattaaaaaagcgctgccaataggagcggaaagttttctgtttacatttcttgtaatggctgcaacaagacgtgaagcttttttcggagctgacgcgattgcattaagccgtataggttcacaaatagaatcactgacatggttagtcggcggcgcttttggcactgcgttggtttcgttcataggacaaaattacggcgcaaaaaaatggaatcgcattagcgaaacattcaaaatagcttctttagttatgtttttttacggcgcttttgttacgtttgtattggcggtacccggcaagtttttatttggcttgtttttgcccgatcctgtgttaatagaacgcagtgttttataccttcgtataattgctatatgtcaaataccaatgtgtctggaagccgtatcaagcaattccttccgcggtataggtaatacgctttcacccgctattataaacacgatctgcaatattttacgagttccgtttgtttatatactatcaatggaaatatttgggtttggtttagcgggaatttgggttggaatttcattaagcgcttgcttgagaagtatttggtcatacacctggtatttaattactgaacgaaaaagaacaagcaagtattataataaaacaggaaaagaataa

SEQ ID NO: 53750 - protein, 218 aa, Unknown
  Obtained from environmental sample
  SIGNAL (1)...(22)
  DOMAIN (8)...(168): MatE
  misc_feature (1)..(218): Xaa is any amino acid
MIIKKALPIGAESFLFTFLVMAATRREAFFGADAIALSRIGSQIESLTWLVGGAFGTALVSFIGQNYGAKKWNRISETFKIASLVMFFYGAFVTFVLAVPGKFLFGLFLPDPVLIERSVLYLRIIAICQIPMCLEAVSSNSFRGIGNTLSPAIINTICNILRVPFVYILSMEIFGFGLAGIWVGISLSACLRSIWSYTWYLITERKRTSKYYNKTGKE

SEQ ID NO: 53751 - DNA, 750 bp, Unknown
  Obtained from environmental sample
  misc_feature (1)..(750): n is a, c, g, or t
atgaaaacaaaaaggtttcccaaaattgaaaattataatccttatgtaaaaggagcggttataatgagaatatcagagggtgaaaaaataaacggtatcccaattgtcaaaatacgggattattttaaagatatatggagaagaggaatttcaaaaaaatatttaggattccatttttgtctgagtgcaagaaacacaaattcattgataaaagaattattaaaagataattacattaaaacggctgtattcgataaaaaaaatattttttttgataaggattctgaatatcaattaaccgaaaaaggacacaggctctgcagcgcaagagcggtttcgccgattaatagggcaaaggccgataaaattttatctgaatttatgcagcgagttacagaaattaatacaaacgattattttttatataaagttgaaaaaataatactattcggcagttacctaaatccggaaaatattgattttggagatattgatattgctttcaaaataaaaagaaaaatagatgattatgacgagtatgacaaagttcgaaaagaacttattagtgaaatggaaaaaaaaggcaggcattttccgacttttgacgcggaactggactttcctgaaagggaagtattactaaaattaaaaaacagatgccaatacattagtttacatgagattgaagccgaaaaagaaatattagaaaaaacgaaatgcaggcaaattttcccatcttcggagatataa

SEQ ID NO: 53752 - protein, 249 aa, Unknown
  Obtained from environmental sample
  misc_feature (1)..(249): Xaa is any amino acid
MKTKRFPKIENYNPYVKGAVIMRISEGEKINGIPIVKIRDYFKDIWRRGISKKYLGFHFCLSARNTNSLIKELLKDNYIKTAVFDKKNIFFDKDSEYQLTEKGHRLCSARAVSPINRAKADKILSEFMQRVTEINTNDYFLYKVEKIILFGSYLNPENIDFGDIDIAFKIKRKIDDYDEYDKVRKELISEMEKKGRHFPTFDAELDFPEREVLLKLKNRCQYISLHEIEAEKEILEKTKCRQIFPSSEI

SEQ ID NO: 53753 - DNA, 642 bp, Unknown
  Obtained from environmental sample
  misc_feature (1)..(642): n is a, c, g, or t
atgacacatagctctcgcctccactgcctaacctgggataactctcccctaagccaccttgaacaggttcagcaattattggatgctggagcaaactggatacagcttcgccaaaaaaaggggttggagcaggaaaaacttaaaaccgcaaccaccgccgctaccctttgcaaaaaatataaagccaccctgataatcaatgactctccgcaaatagccctggaaagtggagctgatggcgttcatttggggttaaaggactgccctattccagaggctcgcaaattgctgggaaaatcagccataataggaggcacagcaaatatgcaacttcaggcattgcagctagttacggatgcctgcgattatattgggctgggtccttggaagcaaactcaaacaaaggaaaatttaagcgaaatactgggtgaagccggaataaaaaaggttttggatttgcatttaaaaattcccgtgatagcgataggtggcataattccagcagacattcctaaaatattatcgcttggggcttatggcatagctgttagctccggcattgttgctgccaaaaacataaaagaggcatttaaggaatattcagagcaaaccgtttttggctttgccaaaaatatcttctag

SEQ ID NO: 53754 - protein, 213 aa, Unknown
  Obtained from environmental sample
  DOMAIN (7)...(187): Thiamine monophosphate synthase/TENI
  misc_feature (1)..(213): Xaa is any amino acid
MTHSSRLHCLTWDNSPLSHLEQVQQLLDAGANWIQLRQKKGLEQEKLKTATTAATLCKKYKATLIINDSPQIALESGADGVHLGLKDCPIPEARKLLGKSAIIGGTANMQLQALQLVTDACDYIGLGPWKQTQTKENLSEILGEAGIKKVLDLHLKIPVIAIGGIIPADIPKILSLGAYGIAVSSGIVAAKNIKEAFKEYSEQTVFGFAKNIF

SEQ ID NO: 53755 - DNA, 852 bp, Unknown
  Obtained from environmental sample
  misc_feature (1)..(852): n is a, c, g, or t
atggtacgccgcaagcactttcaagggctaaaaaccgaagccatttccgaaatgaaagcacagggagttgaatttgaggaacgtcaagcaaggctagaagaaatgcgaccgccagagccggagaatgcggagtggctggaagcgagttttggcgagtttgcaaaaaaacacccctgggtatgcggcgagcgagttcatccgcaaaccattgttttggaaatgttcgctgaatgtttttctttttcgggttacataaagcaatacggattggagcgaatagaaggcttattgcttcgccacataaacagcgtgtataaagttttggcacacacagtccccgaaaaatacaagaacgaagaaattttggaaatgcaagattacctgcgtgaaatgctgcaaagggtcgattcctcgcttttggacgagtggcaacgtatgcaaaaccccgaatttattttgccagaagaaaaagaagaacccttgccaccctttgccgttagcgagcgaatggttaaagcccttgtgttgcaattcttggttgcctggggcaaaggcgattttgccgccgccaccgactgccttgaaccgagcgaggaattcagcgagaaaaaacttgccgctctccataaggaatatattgaaactcacaaggagctgcgtcttgatgcagaggggcgttccaacaagcacacatctattgaaaagaaaggcgatgtttgggaagtcaccagaatgttgcaagattatgatgagcaaaacgattggcaaattgtgtttgcggtggatttggcggagtctaagaggggggaaaggttgatgatgaaaattttctatactatcccaaacctatga

SEQ ID NO: 53756 - protein, 283 aa, Unknown
  Obtained from environmental sample
  misc_feature (1)..(283): Xaa is any amino acid
MVRRKHFQGLKTEAISEMKAQGVEFEERQARLEEMRPPEPENAEWLEASFGEFAKKHPWVCGERVHPQTIVLEMFAECFSFSGYIKQYGLERIEGLLLRHINSVYKVLAHTVPEKYKNEEILEMQDYLREMLQRVDSSLLDEWQRMQNPEFILPEEKEEPLPPFAVSERMVKALVLQFLVAWGKGDFAAATDCLEPSEEFSEKKLAALHKEYIETHKELRLDAEGRSNKHTSIEKKGDVWEVTRMLQDYDEQNDWQIVFAVDLAESKRGERLMMKIFYTIPNL

SEQ ID NO: 53757 - DNA, 702 bp, Unknown
  Obtained from environmental sample
  misc_feature (1)..(702): n is a, c, g, or t
gtgaactacctgaaaaaaagaaaaattacagacagtttctggtacgctcttatgaccgccgcttcaatagcggtaggggcggctcttgtcggcatcatcgcttatatcctgattcaagccctgggaatgtcagcggcggctgatcattccaacgccacaagtggcggcgccgcgggcgtggagtttttcaggatacggagcctcgttccaatgattgtgtctaccgcctggacagtggttgtgtctctggctattgccctgccggtgggagttatgaccgcggtttatttgcacgaatacgcggcaaaatcctccttgagccggtttctcgggcttgccattgataccctggcgggaatcccttccataatatatgggcttttcggtcttttgtttttttgccgtttcatggatctgggacagtccattatcgcaggcgggtttaccttaagcattatgattcttccggtaattatcagaaccacggaagaagcccttaagacagtgccggtatctttccgcgaaggctctctctccctaggggcgacaaaatttcagacaataattcatgtcatcctgccccctgccctgcccggcatccttaccgcggcgatcctggctgtaggccgtgtggtcggcgaatccgccccggttctccttaccgtagggcttgcccgcacaccttcccaaaacaatttttga

SEQ ID NO: 53758 - protein, 233 aa, Unknown
  Obtained from environmental sample
  SIGNAL (1)...(27)
  DOMAIN (68)...(232): Binding-protein-dependent transport system inner membrane component
  misc_feature (1)..(233): Xaa is any amino acid
MNYLKKRKITDSFWYALMTAASIAVGAALVGIIAYILIQALGMSAAADHSNATSGGAAGVEFFRIRSLVPMIVSTAWTVVVSLAIALPVGVMTAVYLHEYAAKSSLSRFLGLAIDTLAGIPSIIYGLFGLLFFCRFMDLGQSIIAGGFTLSIMILPVIIRTTEEALKTVPVSFREGSLSLGATKFQTIIHVILPPALPGILTAAILAVGRVVGESAPVLLTVGLARTPSQNNF

SEQ ID NO: 53759 - DNA, 795 bp, Unknown
  Obtained from environmental sample
  misc_feature (1)..(795): n is a, c, g, or t
atgagcggggaaaaactgctggttcgtaaccttgacctcttttacggcgaatttcaggcgcttaaaaatattaatttcgatttgggcaacaacgaggccgccgcccttataggcccgtccggctgcggaaaatcaacctttatccgcgtgattaacaggatgaatgaccttattccttcatgtcgcataacaggcgaagtgcttattgagggcgaggatatttacggcgacatggacgtgagcgcgttaaggacgcggatagggatggtgtttcaaaaaccgaatccctttaacatgagcgtctttgacaacgtggcttacggcaggcgcatgcagggcatgaaagataaaaagaaactttctgaactggtggaacagtctttaagaaaggcggcattatgggacgaagttaaggaccggcttaaaaaatccgcccatagcctttccggcggccagcagcagcggctgtgcatcgcgcgaagcatctccatggccccggagataatcctaatggacgagccgaccagcgcccttgacccgattgccaccggaagaattgaggaactaattggcgagctaaaaagggatttcagcattatcattgtcacccattccatgaaccaggcggcgcgtatcagcgaccgaaccgcctttttccttttaggggatcttatagaatatgctgaaacacaaaggtatttacacatccaaaagataaacgcaccgaagactatatttcaggccgcttcggttaaggggaggatatgcaaagggttttattatcggaagaaatga

SEQ ID NO: 53760 - protein, 264 aa, Unknown
  Obtained from environmental sample
  DOMAIN (31)...(222): ABC transporter
  misc_feature (1)..(264): Xaa is any amino acid
MSGEKLLVRNLDLFYGEFQALKNINFDLGNNEAAALIGPSGCGKSTFIRVINRMNDLIPSCRITGEVLIEGEDIYGDMDVSALRTRIGMVFQKPNPFNMSVFDNVAYGRRMQGMKDKKKLSELVEQSLRKAALWDEVKDRLKKSAHSLSGGQQQRLCIARSISMAPEIILMDEPTSALDPIATGRIEELIGELKRDFSIIIVTHSMNQAARISDRTAFFLLGDLIEYAETQRYLHIQKINAPKTIFQAASVKGRICKGFYYRKK

SEQ ID NO: 53761 - DNA, 390 bp, Unknown
  Obtained from environmental sample
  misc_feature (1)..(390): n is a, c, g, or t
atgtgtaaatacctttgtgtttcagcatattctataagatcccctaaaaggaaaaaggcggttcggtcgctgatacgcgccgcctggttcatggaatgggtgacaatgataatgctgaaatccctttttagctcgccaattagttcctcaattcttccggtggcaatcgggtcaagggcgctggtcggctcgtccattaggattatctccggggccatggagatgcttcgcgcgatgcacagccgctgctgctggccgccggaaaggctatgggcggattttttaagccggtccttaacttcgtcccataatgccgcctttcttaaagactgttccaccagttcagaaagtttctttttatctttcatgccctgcatgcgcctgccgtaa

SEQ ID NO: 53762 - protein, 129 aa, Unknown
  Obtained from environmental sample
  misc_feature (1)..(129): Xaa is any amino acid
MCKYLCVSAYSIRSPKRKKAVRSLIRAAWFMEWVTMIMLKSLFSSPISSSILPVAIGSRALVGSSIRIISGAMEMLRAMHSRCCWPPERLWADFLSRSLTSSHNAAFLKDCSTSSESFFLSFMPCMRLP

SEQ ID NO: 53763 - DNA, 657 bp, Unknown
  Obtained from environmental sample
  misc_feature (1)..(657): n is a, c, g, or t
atgcaaagggttttattatcggaagaaatgaatcaactcagaaaggaacttacgatcatggcggcaagggtagaagaagatttggggaaatcccttgccgtccttcgttcaggtgacgttgaacttgcgcaggaagtaaaggaaagcgacaagatagtcgatgccctccagcttaaaattgaagatatggctctggttctcattgctacccagcagcctgtcgccagtgatctacgcgagcttataactgttttgaaaattacatctaaccttgaacgtataggcgattatggggttcatcttgtaaaagcgggcttgagattgtcaaaatatcccccttttcgttccgttcaacgaattgaacggatggtcgaaaccgccgtgcttatgcttaaagatacggtttacgcttaccgtgagcgggatccggattccgcgagaaaagccgccgctcttgatgccgcgatagatcgggagcataaagcccttaccaatgaactgcttggttttattaaaaaacaaccaaattttgtaaaggccgccgcccggctgctgaggctttcaggtaatatggaacgcctgggagatcacattaccaatatctgcgaagggatcatttatatgatcgaaggcaatcgtgaggaattaaactattga

SEQ ID NO: 53764 - protein, 218 aa, Unknown
  Obtained from environmental sample
  DOMAIN (120)...(205): PhoU family
  misc_feature (1)..(218): Xaa is any amino acid
MQRVLLSEEMNQLRKELTIMAARVEEDLGKSLAVLRSGDVELAQEVKESDKIVDALQLKIEDMALVLIATQQPVASDLRELITVLKITSNLERIGDYGVHLVKAGLRLSKYPPFRSVQRIERMVETAVLMLKDTVYAYRERDPDSARKAAALDAAIDREHKALTNELLGFIKKQPNFVKAAARLLRLSGNMERLGDHITNICEGIIYMIEGNREELNY

SEQ ID NO: 53765 - DNA, 1362 bp, Unknown
  Obtained from environmental sample
  misc_feature (1)..(1362): n is a, c, g, or t
gtgttatacacgccattagaaataaaagaaaccgtagacatgtttctgcgctacaagctggatatacgcgccattacccttggggtgtcccttctggactgcgtttcgccttccggcgatgagtgccggagaaaaatccgcgacaaacttatgcggatagcgggcccgctggttaaaatcggaaaggacatcgagaacgaatacggcatacccattatcaacaaacgcatagcggttacgcctgtcgccctggtcgcggcttcctgtcaggaaaaagattttacccctttcgcccaaacgcttgacaaggccgccgtcgatcttggcgttgattttgtcgggggcttttccgctcttgtgcagaaaggcctgtccggcggcgatgacaccttgatcgcctctctgccgcgggcgctttcccaaaccgaaagggtatgcgcctctgtcaatgtcgccgccaccaaaagcggaatcaacatggacgcggtaaggcttatgggcggcgtgattaagcggatagcggaaaagacagcggacagggacggcataggctgcgcaaagctggtggtgttctgcaacgcccccgaggacaaccccttcatggcgggcgcttttcacggcgtcggcgagggggaaagctgccttaacgtgggggtgtcgggcccgggcgtggttaaggccgcgctggaaaacctgcggggggcgagttttgacgaacttgcggacgcgataaaaaaaaccgccttcaagattacccgcatgggacagcttgtgggaatggaagcggccaaacggttaaacgtgcctttcggcatattggatctttccctggcgccgactcccgaggtaggcgattcggtcgcccgcatacttgaggagatgggccttgaaaccgccggaacccacggaacaacggcggccctcgccatgttaaccgacatgataaaaaaaggcggcataatggcgtccacccatgtgggcggtttttccggggcctttatccccgtctccgaagacgaaggcatggttaacgcggtgaggaaaggcgcgatcagccttgacaagcttgaggcgatgacatcggtttgctccgttggcctggacatgatcgccctgcccggcgacacaagcgccgccaccatctcggcgatcatcgccgatgaaatggctatcggcatggtgaacaacaagaccaccgcggtaaggcttattcccgtgccaggcaaaaaagccggagactgggcggaattcggcggcctccttggcggcgctcccgtcatgccgataaactccgcaaaaagcgacgccttcatcaatcgcggcgggagaataccggctccggttcattcgttcaggaattag

SEQ ID NO: 53766 - protein, 453 aa, Unknown
  Obtained from environmental sample
  DOMAIN (1)...(453): Uncharacterized ACR (DUF711)
  misc_feature (1)..(453): Xaa is any amino acid
MLYTPLEIKETVDMFLRYKLDIRAITLGVSLLDCVSPSGDECRRKIRDKLMRIAGPLVKIGKDIENEYGIPIINKRIAVTPVALVAASCQEKDFTPFAQTLDKAAVDLGVDFVGGFSALVQKGLSGGDDTLIASLPRALSQTERVCASVNVAATKSGINMDAVRLMGGVIKRIAEKTADRDGIGCAKLVVFCNAPEDNPFMAGAFHGVGEGESCLNVGVSGPGVVKAALENLRGASFDELADAIKKTAFKITRMGQLVGMEAAKRLNVPFGILDLSLAPTPEVGDSVARILEEMGLETAGTHGTTAALAMLTDMIKKGGIMASTHVGGFSGAFIPVSEDEGMVNAVRKGAISLDKLEAMTSVCSVGLDMIALPGDTSAATISAIIADEMAIGMVNNKTTAVRLIPVPGKKAGDWAEFGGLLGGAPVMPINSAKSDAFINRGGRIPAPVHSFRN

SEQ ID NO: 53767 - DNA, 702 bp, Unknown
  Obtained from environmental sample
  misc_feature (1)..(702): n is a, c, g, or t
ttgatgaaggcgtcgctttttgcggagtttatcggcatgacgggagcgccgccaaggaggccgccgaattccgcccagtctccggcttttttgcctggcacgggaataagccttaccgcggtggtcttgttgttcaccatgccgatagccatttcatcggcgatgatcgccgagatggtggcggcgcttgtgtcgccgggcagggcgatcatgtccaggccaacggagcaaaccgatgtcatcgcctcaagcttgtcaaggctgatcgcgcctttcctcaccgcgttaaccatgccttcgtcttcggagacggggataaaggccccggaaaaaccgcccacatgggtggacgccattatgccgcctttttttatcatgtcggttaacatggcgagggccgccgttgttccgtgggttccggcggtttcaaggcccatctcctcaagtatgcgggcgaccgaatcgcctacctcgggagtcggcgccagggaaagatccaatatgccgaaaggcacgtttaaccgtttggccgcttccattcccacaagctgtcccatgcgggtaatcttgaaggcggttttttttatcgcgtccgcaagttcgtcaaaactcgccccccgcaggttttccagcgcggccttaaccacgcccgggcccgacacccccacgttaaggcagctttccccctcgccgacgccgtga

SEQ ID NO: 53768 - protein, 233 aa, Unknown
  Obtained from environmental sample
  misc_feature (1)..(233): Xaa is any amino acid
MMKASLFAEFIGMTGAPPRRPPNSAQSPAFLPGTGISLTAVVLLFTMPIAISSAMIAEMVAALVSPGRAIMSRPTEQTDVIASSLSRLIAPFLTALTMPSSSETGIKAPEKPPTWVDAIMPPFFIMSVNMARAAVVPWVPAVSRPISSSMRATESPTSGVGARERSNMPKGTFNRLAASIPTSCPMRVILKAVFFIASASSSKLAPRRFSSAALTTPGPDTPTLRQLSPSPTP

SEQ ID NO: 53769 - DNA, 1326 bp, Unknown
  Obtained from environmental sample
  misc_feature (1)..(1326): n is a, c, g, or t
atgaatacaaaagcgtttcagaagatttacactcacatcgaaaacgtgaccaaggccacgtgtactgtgcacgccgacggtgtgaccaacgatgaaatggcaatggtggccgggcgtccggcgcaggtcgtgaagattgtcggcgaccgcgtgacgctccagatattccccggcacgcagggcatcgccacgaacgccgaggtggtgttcctcggcaggccgcccgtcatcaaggtgtcggacgagctgaaagggcgcttcttcaacccctacggccagcctatcgacggcggcccggaggtcgaaggcaaggagatagagatcggcggcccgtcggttaaccccgttcggcgcaaacagccgtccgagcttatcgccaccggtatcgccggcatcgacctgaacaatacgctcgttacaggccagaagatcccgttcttcgccgactccgaccagccgtacaacgcggtcatggccgacgtggcgctaagggcgaaagccgacctcatcattcttggcggcatgggcatgtccaacgacgactacctgtactataggaaactgttcgaaaacgccggcgcgctcgaccgcatcaccgcgttcgtcaacacgaccgacaacccgccggtggagcgtctgctcgttcccgatatgtgcctgaccacggcggagcacttcgccgtagagcagaagatgaaggtgctggtgctgctcaccgacatgacgctgtacgccgacgcgctctccatcgtgtctaaccgtatggaccagattccctctaaagacagtatgcccggttcgctgtacagcgacttggcgaagatatacgaaaaggccgcccagttcccggacggcggctcgatcacgatcatcgcggtaacgaccctctccggcggcgacatcacgcacgccatccccgacaatacggggtacatcaccgaggggcagttgtatttgcgccgcgataccgacgtgtcgaaggtcatcatcgacccgttccgcagcttgtcgcgtctgaaacagctcgttatcggcaagaagacgagaaaggatcacccgcaggttatgaactgcgccatccgactgttcgccgacgccgcgagcgctaagacgaagttggaaaacgggttcgacctcacggactacgacacgcggtcgttgcaattcgcgaaggagtattcgcgtgaattgttggcgatcgacatcaacattgaaatcgagcacatgcttgatacggcttggaagctgttcggcaagtactttacgcaggacgaggtgggtatcaagaaggagctgatggatcagttctggaaggcttcggcgtaa

SEQ ID NO: 53770 - protein, 441 aa, Unknown
  Obtained from environmental sample
  DOMAIN (127)...(337): ATP synthase alpha/beta family, nucleotide-binding domain
  misc_feature (1)..(441): Xaa is any amino acid
MNTKAFQKIYTHIENVTKATCTVHADGVTNDEMAMVAGRPAQVVKIVGDRVTLQIFPGTQGIATNAEVVFLGRPPVIKVSDELKGRFFNPYGQPIDGGPEVEGKEIEIGGPSVNPVRRKQPSELIATGIAGIDLNNTLVTGQKIPFFADSDQPYNAVMADVALRAKADLIILGGMGMSNDDYLYYRKLFENAGALDRITAFVNTTDNPPVERLLVPDMCLTTAEHFAVEQKMKVLVLLTDMTLYADALSIVSNRMDQIPSKDSMPGSLYSDLAKIYEKAAQFPDGGSITIIAVTTLSGGDITHAIPDNTGYITEGQLYLRRDTDVSKVIIDPFRSLSRLKQLVIGKKTRKDHPQVMNCAIRLFADAASAKTKLENGFDLTDYDTRSLQFAKEYSRELLAIDINIEIEHMLDTAWKLFGKYFTQDEVGIKKELMDQFWKASA

SEQ ID NO: 53771 - DNA, 1683 bp, Unknown
  Obtained from environmental sample
  misc_feature (1)..(1683): n is a, c, g, or t
atgggaacgctcccctcggtaagttacacgaacagtgacgacggtttatacgcgtttacggtttccgcgattgaccgcgcgggcaacataggcccgcagtcaaatatttttttcagaacaaacaaatttattccttctaccggcgtaagttttgtagacgcgaaacaggacgtgcagggaaacctctcaataaaaataatcgggcgcggcttttctaccggcggacggataacttccgttgttttggaaaacagcgccggccggaacattcccggcgtattctcggttttatcggacagggaaataggcgggattaattttgaaaatctggaagaaggccattatgcgctaaaactgcttcattcggaaaggggctggtataacgcgccttcagagatttcggtatcaagaagcgtaaccgtaaaaatcggggattattcgcagagttggaatccttcatggaaaataggaacaaataaaataacgcttaaccccgccgtaattcttgccgcggtacttatgattttctgcgtactcggaacaatcgccgcgatacggggaatttgtagcgtcgccgctgaaagcgccgtgataaaacaggaagcgtttgccataattacaggagaattaatgcctatggagaaaaaacataaaatcgcccggataaataaaaaaggtaccgggcttcgttttaaacttgcgtcatttacgatagcgctggttctttcggtaattataatgatctctacgcctatgtatatattgatgacaacatcacagcgcgaaacgcggcttgacgggttatattcccgctcaagggtactgctggaaggccttgcttcaagcgccagggcgtatcttccgatgggagatcaaggcgccgtggaaatgggattccttcccgcgcagtccgccgcgcttccggaggcgaaatacattaccattaccggctacagacccggctcgacccataacgatcatgtttgggcgacaaacgatcccgatatcctttccaaaattgacacgacggaattccgtcccggcatatcgcggattaccgacgcgcttacgccgtcctacgatcaatttaacacggagctgaacaacaaggcgcgaagcgaagtgggagaactttcccgaagcatagtagaactcctgcaggaaggccagtctctggcgatccgccttgacgccgcgagcatacagcgcgtcgcggacattcaggtaacgatacgatctttggaagtaaacctgaccgagaggcttacaaaaatcggcggagaaatacattcatatcccgaattttcaaatgaaagcattctgaaagacaaaaacagaacttttattttttacaaacccgtaatgttcaggcagggagctgatgacaactacttccgcggactaataaggcttgaagtatctctagattcgatcatggacgccattttccgcgaacagttactgctgctgcgtacgatagtaattgtagccctcgccgcgacgctcatgggaaccataggcgcgtttattctctccacactgatcataaggcccattcaaaaactggtaagccacattgaaataatccgcgacacggaaaacaaggcgaaacttgaaggggtggacataaaaattacgactaaagacgagcttgctattttaggcaacacaataacgacatga

SEQ ID NO: 53772 - protein, 560 aa, Unknown
  Obtained from environmental sample
  misc_feature (1)..(560): Xaa is any amino acid
MGTLPSVSYTNSDDGLYAFTVSAIDRAGNIGPQSNIFFRTNKFIPSTGVSFVDAKQDVQGNLSIKIIGRGFSTGGRITSVVLENSAGRNIPGVFSVLSDREIGGINFENLEEGHYALKLLHSERGWYNAPSEISVSRSVTVKIGDYSQSWNPSWKIGTNKITLNPAVILAAVLMIFCVLGTIAAIRGICSVAAESAVIKQEAFAIITGELMPMEKKHKIARINKKGTGLRFKLASFTIALVLSVIIMISTPMYILMTTSQRETRLDGLYSRSRVLLEGLASSARAYLPMGDQGAVEMGFLPAQSAALPEAKYITITGYRPGSTHNDHVWATNDPDILSKIDTTEFRPGISRITDALTPSYDQFNTELNNKARSEVGELSRSIVELLQEGQSLAIRLDAASIQRVADIQVTIRSLEVNLTERLTKIGGEIHSYPEFSNESILKDKNRTFIFYKPVMFRQGADDNYFRGLIRLEVSLDSIMDAIFREQLLLLRTIVIVALAATLMGTIGAFILSTLIIRPIQKLVSHIEIIRDTENKAKLEGVDIKITTKDELAILGNTITT

SEQ ID NO: 53773 - DNA, 540 bp, Unknown
  Obtained from environmental sample
  misc_feature (1)..(540): n is a, c, g, or t
gtggggggggatttttcaattaacaacaatcaaggagtgtggtgtatgctggacaaagtcacaaagggtcagctgtacaagttacagaagacgcacaaaacggacacgcggataggcgaggcgctgggcgtttcgcgtcaggctgtccaccagctacgtaagaagctgggtctcgccacggtctcgaacgagaagccggagagggacgccgagatagcggcggcctacattgcgggtgaaacggggattgccattgcgaaaaggttcggcatgtcaatctctcagacctaccgcataatcaacgcggcgaacggcaaagccaagcgtaaggcggccgcgaggcgggcgggattgccggttccgaaagtgctcggaagaagggcgtcggtcaagaaaaagtcggccgcgaaaccctttggcaaaaagtcgtcgaaaaagaagtcgtcgatgaagaagaggtcgacgaagaaaaagatcacaagcaaaaaggcggcgccggctaagaaaagagccggcaagaagagaagtaagaaaaggtag

SEQ ID NO: 53774 - protein, 179 aa, Unknown
  Obtained from environmental sample
  misc_feature (1)..(179): Xaa is any amino acid
MGGDFSINNNQGVWCMLDKVTKGQLYKLQKTHKTDTRIGEALGVSRQAVHQLRKKLGLATVSNEKPERDAEIAAAYIAGETGIAIAKRFGMSISQTYRIINAANGKAKRKAAARRAGLPVPKVLGRRASVKKKSAAKPFGKKSSKKKSSMKKRSTKKKITSKKAAPAKKRAGKKRSKKR

SEQ ID NO: 53775 - DNA, 1599 bp, Unknown
  Obtained from environmental sample
  misc_feature (1)..(1599): n is a, c, g, or t
atgatatcccaaccagatacacagcgtcaaagcataaaccgctccgtatccatagccgccgtcataatgatgggctccgtccttttgagccgcgtcgccggaatgttgcgcgagatgaccctcgcaaacttaggcggcaccggcagcgaaatggacgcctacgtcgcggctttcctcatccctgagctccctcaccattttctcgccggcggattcctatccgtcactttcataccgatattccaaaagtacatagccgcaaacgacaaggccggcgcttggaagactttctcaaacatggtcaccgtcggcaccgccgcgttcgccgtcgttctacccgcggccgtgattttcgctccgaacctcctctctctcacggggttcgccaatcaaaatccggagaccttcgccctgaccgtgcgcctgacccgcatcatacttcccgcgcaaatattcttctactggggcgccttcctgatggcggtccagtacgcgcaacaaaaattctttctacccgcaatggccccgctcctctacaacttggggataatcgccggaggaatttttctaagccccgtcatgggcatagagggattcgcctggggcgtaatcgccggcgcctttctcggcaacgtcgccgtgcaactgccgggggctctaaagatgggaatgcgctaccgtttcagattctcgccggcagatccggagtttatacattatataaaactgaccgtccccttagtcgcaggtctcgggatgagtttctcaaacgagatattcttccgttacttcgcctcattcttagagagcggcgccgtcgccggagcgaactacgcgttgcggacgatgatgatcttagtgggcgtcttcggccaagcatccggcgtcgcgttctatccatacctggtaaaactcgccgccgaaaaagcctacgggcagatgagcgaactactcaacgacaccgtaaacaaggtcgccctatacctgctgccgcttacaggggtaatgatggcgctcgcgccgcagattataatggtattatacgaacacggtaagttctcaagagaatcgacgttagagaccgctccgattttgatgatgtacctgaccggcgccttcgcgacatccgtatcgatactcgccgccaggccgttctacgctatgcagaagacaatccttccaatggttgtaagtacgacggtatcgatacttagcatcccgctgtattacattttcagcaaagagatgggccctaaggggcttgggctggcatcaggcgtggccgggacgacgcagttccttatattatacgcggtttgggggaaacggtacggcggattcggcgcggcggccggggaggcggcaaaactggggaagattgtcgccgtatcggcggtcggggcggttgtttgttacgtagttaacggaatgattaacggcttcggcatagacatagagagtcaattaggaagagggcggacaataatagtctgcgcggcggcgtccatgaccgcgttaataacggtcttcgggttgtacgaggtattggggctacaacggtttaaagagtctataaaaggattggtcagaaagcgttaa

SEQ ID NO: 53776 - protein, 532 aa, Unknown
  Obtained from environmental sample
  DOMAIN (246)...(411): MatE
  misc_feature (1)..(532): Xaa is any amino acid
MISQPDTQRQSINRSVSIAAVIMMGSVLLSRVAGMLREMTLANLGGTGSEMDAYVAAFLIPELPHHFLAGGFLSVTFIPIFQKYIAANDKAGAWKTFSNMVTVGTAAFAVVLPAAVIFAPNLLSLTGFANQNPETFALTVRLTRIILPAQIFFYWGAFLMAVQYAQQKFFLPAMAPLLYNLGIIAGGIFLSPVMGIEGFAWGVIAGAFLGNVAVQLPGALKMGMRYRFRFSPADPEFIHYIKLTVPLVAGLGMSFSNEIFFRYFASFLESGAVAGANYALRTMMILVGVFGQASGVAFYPYLVKLAAEKAYGQMSELLNDTVNKVALYLLPLTGVMMALAPQIIMVLYEHGKFSRESTLETAPILMMYLTGAFATSVSILAARPFYAMQKTILPMVVSTTVSILSIPLYYIFSKEMGPKGLGLASGVAGTTQFLILYAVWGKRYGGFGAAAGEAAKLGKIVAVSAVGAVVCYVVNGMINGFGIDIESQLGRGRTIIVCAAASMTALITVFGLYEVLGLQRFKESIKGLVRKR

SEQ ID NO: 53777 - DNA, 306 bp, Unknown
  Obtained from environmental sample
  misc_feature (1)..(306): n is a, c, g, or t
atgggccgcattccccagcttatggaaatcggccttgatgctctaaatcctattgagataaaagccggcaacgatatcaaagcccttaaaagggattacggggaaaaattagttttgcatggcggtgccgacgctctgctcctggataagactgaaaagatactgccctatattgaagagacgcttccagaattaaaacaaaaaggcggttatatcttttcttcggatcactcaattcccaatacggtttccctggaaaattacaagaccattgtggaagcagtgaaaagaatcggggcttattaa

SEQ ID NO: 53778 - protein, 101 aa, Unknown
  Obtained from environmental sample
  misc_feature (1)..(101): Xaa is any amino acid
MGRIPQLMEIGLDALNPIEIKAGNDIKALKRDYGEKLVLHGGADALLLDKTEKILPYIEETLPELKQKGGYIFSSDHSIPNTVSLENYKTIVEAVKRIGAY

SEQ ID NO: 53779 - DNA, 1761 bp, Unknown
  Obtained from environmental sample
  misc_feature (1)..(1761): n is a, c, g, or t
atgcttaccacaaaggcaaaggatcatatttccattgcggttatccaatacgcgaaaaatgaaaaagtaaaaaagctcctgtcctgcataaccgggttagtttcggctttcatcgccgcaattttgttttgggattctatcacatttttgacgcatgccttttcaggaaggccgacaggcataattcccgattggatttttgccctggcaatgccaatcgcttacggcgtaatcgccgttcgcttcgcaatttatgcggtgtccttcggaccgaagacaggcgcggacagcgaaaactcggcacctgcccggagacgctgggcgcttccggttttgatacttcttttgggaaccgccgctgcccttcccgccatcgcaaaacttttctgggaagtcggccaggagcctgagattttaaaggcccccatggatttcctttacgagacggcatattacgcaagaacgcctcttatccttctgctcatcctggcggcttttttggggactccaattttcgttgttatcggcggaattgccctggtgatgttccaggccgcattaggtgagcctgaagccgcgccaactgacatttattcggccatgacaaatgctgaaatgattgccattcctctctttactttgaccggcttcttcctttctgaaagcaaggccggggaaaggcttgttgccgcattccgcagtttgtttagctggatgccgggtggaatgattatcgccaccgtggtgatctgcgctttcttcgcgtcctttaccggcgcgtccggagttaccatcctggccctcggcggcatactctacacgatccttaaagaaaagcttggataccctgaaaaattttccgtcgggcttctgacatctgtcggttgtatcggccttttgtttccgccaagcctccccataattctggtgggctccaccacaaatatgattcttttcttcatgggcgaaacagtcagttacagaatcatagatttttttctgggcgcgataatccccggcctcatccttgtagtggttatggtagcctttgggattactacctcgatcaaagtaaaaattccggtggagaagttcaacctgaaagaagcgggaaaagccgttaaggggagtttcttcgagatttttcttccgtttatcttaataggggggtatttttccggcattctttctttggtagaggtaagcgcggtatcggcggtttacgttttcattatcgaagtatttgtcaataaggacataaaattacaggatataacaaaagtctttgcgaaagcggttcccataatcggaggggttctctcaataatcgccatggcaaaagctctttcctatgccatcgtcgattccggagtgccggaaaacttcgcatcatggatgagtgcaaccattgaatcgaagtacgtcttcctccttcttttaaatctggccctgctcgtggtcggctgtctgatggatatcttttctgccattctggttgttcttcccctgattattccgctggggcagatttacggaatcgatcctgtccatttgggcattatttttattgtcaaccttgaagtcggtttccttaccccgcctgtggggatgaatctttttctggccagttaccgcttcaaaaggcctttcacagagatttgcaggtttgtcctgcctttccttgtggtgcaattggcagtggtgctgctggttacttatgtgccggcgctctcaacggcgcttacaggactgtttaagtaa

SEQ ID NO: 53780 - protein, 586 aa, Unknown
  Obtained from environmental sample
  DOMAIN (155)...(578): DctM-like transporters
  misc_feature (1)..(586): Xaa is any amino acid
MLTTKAKDHISIAVIQYAKNEKVKKLLSCITGLVSAFIAAILFWDSITFLTHAFSGRPTGIIPDWIFALAMPIAYGVIAVRFAIYAVSFGPKTGADSENSAPARRRWALPVLILLLGTAAALPAIAKLFWEVGQEPEILKAPMDFLYETAYYARTPLILLLILAAFLGTPIFVVIGGIALVMFQAALGEPEAAPTDIYSAMTNAEMIAIPLFTLTGFFLSESKAGERLVAAFRSLFSWMPGGMIIATVVICAFFASFTGASGVTILALGGILYTILKEKLGYPEKFSVGLLTSVGCIGLLFPPSLPIILVGSTTNMILFFMGETVSYRIIDFFLGAIIPGLILVVVMVAFGITTSIKVKIPVEKFNLKEAGKAVKGSFFEIFLPFILIGGYFSGILSLVEVSAVSAVYVFIIEVFVNKDIKLQDITKVFAKAVPIIGGVLSIIAMAKALSYAIVDSGVPENFASWMSATIESKYVFLLLLNLALLVVGCLMDIFSAILVVLPLIIPLGQIYGIDPVHLGIIFIVNLEVGFLTPPVGMNLFLASYRFKRPFTEICRFVLPFLVVQLAVVLLVTYVPALSTALTGLFK

SEQ ID NO: 53781 - DNA, 651 bp, Unknown
  Obtained from environmental sample
  misc_feature (1)..(651): n is a, c, g, or t
ttgaaaatccgttcctacatttcccgcgggcctgtttttgacatcgctcagagaattctttatatggttaccctgacgctggttgatatagacaaagaagataacggggagccgagggtacactttcttataaaaagagcggtgggagcggccggcgaccgttttgttctggaaaacggcaatatgcggattcttttttccggggagaaagactgggtaaccgaacatgattatataaccgcccgcggttggactcacaatattacaagaataatgaaagcgcttgactatccggttatagccgcctcggggcaggcttccgcccttattgatatggaaatgaatatccctgaaaatctccttgaggcggcggagcaggcaagaagtttaaccgcccctgattttatcgcccacgaaaaagcaaggctggaaacattaagaaaatttattccaaatgaaaaacgttattcaatgctcctggcgaggcacaggcttggctggtatataggcgagggaagaatattccctcttggcgacaaccgcgataattcccgcgacggacggtacttcggccctgtcaggatgacaagagtccttggcggcggaatgattgttttctggcccttatggcggatgagaaatattaaataa

SEQ ID NO: 53782 - protein, 216 aa, Unknown
  Obtained from environmental sample
  misc_feature (1)..(216): Xaa is any amino acid
MKIRSYISRGPVFDIAQRILYMVTLTLVDIDKEDNGEPRVHFLIKRAVGAAGDRFVLENGNMRILFSGEKDWVTEHDYITARGWTHNITRIMKALDYPVIAASGQASALIDMEMNIPENLLEAAEQARSLTAPDFIAHEKARLETLRKFIPNEKRYSMLLARHRLGWYIGEGRIFPLGDNRDNSRDGRYFGPVRMTRVLGGGMIVFWPLWRMRNIK

SEQ ID NO: 53783 - DNA, 387 bp, Unknown
  Obtained from environmental sample
  misc_feature (1)..(387): n is a, c, g, or t
atgcctgtaaatgtgaaaaatgttgatttttttgacaaaattcaaataattacggaaaaatatttatcacaccgaaaaatgaagcgccggataaagaaagaggaacagaaggcaaaacaccctcttttggactgggccggcgcttttatatgggccgcctgcatggttttacttgcaaaccagtatctggttcaggcgtacaggataccttcaggttcaatgattaatacgcttaatataggcgatcatatttttgttaataaaattaaatacgggcctgagcttttgccgggaattttaaaattgcccagtccttttaagcctaaacgaaacgatataataatttttgaaaatccgttcctacatttcccgcgggcctgtttttga

SEQ ID NO: 53784 - protein, 128 aa, Unknown
  Obtained from environmental sample
  misc_feature (1)..(128): Xaa is any amino acid
MPVNVKNVDFFDKIQIITEKYLSHRKMKRRIKKEEQKAKHPLLDWAGAFIWAACMVLLANQYLVQAYRIPSGSMINTLNIGDHIFVNKIKYGPELLPGILKLPSPFKPKRNDIIIFENPFLHFPRACF

SEQ ID NO: 53785 - DNA, 432 bp, Unknown
  Obtained from environmental sample
  misc_feature (1)..(432): n is a, c, g, or t
atggaactggaatattccggtttatttcccgattcctacattgattccctgcagcgtaagatggaaatttacaaaatgattgccgccgtaagggaaaaagacgaacttgaccgcgtttactcggaacttgccgaccgtttcggcccgctgcccgacgaagccgcctccctgctcgcgctcgcggagatacggatcatctgcagggaactggcggtcaattcaataaaggagaagggcggcattgtccgcgtcgaatttgcgaaagtggcccgtattaaagtggatgctcttgtgcgtatgatgcaggaatcgcagggcaggataaagatcgacgccaaaaaaccaaacgtgcttctgctcgcggcaggcaatatcggcttaaaggaaaagagcgagttcttgcgcgaaaaactgtccatattaaaagcttaa

SEQ ID NO: 53786 - protein, 143 aa, Unknown
  Obtained from environmental sample
  DOMAIN (2)...(110): TRCF domain
  misc_feature (1)..(143): Xaa is any amino acid
MELEYSGLFPDSYIDSLQRKMEIYKMIAAVREKDELDRVYSELADRFGPLPDEAASLLALAEIRIICRELAVNSIKEKGGIVRVEFAKVARIKVDALVRMMQESQGRIKIDAKKPNVLLLAAGNIGLKEKSEFLREKLSILKA

SEQ ID NO: 53787 - DNA, 447 bp, Unknown
  Obtained from environmental sample
  misc_feature (1)..(447): n is a, c, g, or t
atgaggatttacctagacaattgttgttattatcgcccttttgatgaccaaaagcaaattgtggtttatttggaaactcagtcgaagttgcatatacaaaagctggtaaaagagggtaagttggaacttgtttattcatatatctctaaatttgagaacggaaatagtccaaataaggagaatagggtttctgtggaaaggttttttgaatttgcgagggcttttgttgatgtagataaagcggacgaagtggagaaattggcaaatgatattgttaagcagggagtaaagtcaaaggatgctttgcatattgcgtgtgctataattgagaaatgcgattattttttgacgacagataaagaggttttgaataaatataagtcggagaaaattctagtttgttctccaataacatttttagggataagtgaggtttccaatgtataa

SEQ ID NO: 53788 - protein, 148 aa, Unknown
  Obtained from environmental sample
  misc_feature (1)..(148): Xaa is any amino acid
MRIYLDNCCYYRPFDDQKQIVVYLETQSKLHIQKLVKEGKLELVYSYISKFENGNSPNKENRVSVERFFEFARAFVDVDKADEVEKLANDIVKQGVKSKDALHIACAIIEKCDYFLTTDKEVLNKYKSEKILVCSPITFLGISEVSNV

SEQ ID NO: 53789 - DNA, 549 bp, Unknown
  Obtained from environmental sample
  misc_feature (1)..(549): n is a, c, g, or t
atgaaaccatttttcgcacttatttttatggtaacacttgtaaacgcacaaactcatggattcggggctagaataaaccaaattggctatggagaacaggctaaaaaaattttggttttgaaagacgcgggagccacctctgttgaatttaaagatttagcgaacggcaaaactgtattgaatgtgcccttatctgctccagcaacttgggaatatagcggagagtcggtgcgcaaggcagatttttctggaattgcgaaaaaaggggtttatgccgcttatgtaaacggagccagagtttctgacaatataattgtgcaaaacaatgtttacgaaaatgtattcaaagccgctttgaaatggttttattatcaaagagctagtactgccctaccctttgaatttgctggtaaatggatgcgagcagccggacacccagacaccagcgttagtttttacccagaagccgacaagccagcaggctggaaaatcagtagcccaaaaggttggtatgatgccggggattacgggcaaatacattgtgaatag

SEQ ID NO: 53790 - protein, 182 aa, Unknown
  Obtained from environmental sample
  SIGNAL (1)...(16)
  DOMAIN (15)...(101): N-terminal ig-like domain of cellulase
  misc_feature (1)..(182): Xaa is any amino acid
MKPFFALIFMVTLVNAQTHGFGARINQIGYGEQAKKILVLKDAGATSVEFKDLANGKTVLNVPLSAPATWEYSGESVRKADFSGIAKKGVYAAYVNGARVSDNIIVQNNVYENVFKAALKWFYYQRASTALPFEFAGKWMRAAGHPDTSVSFYPEADKPAGWKISSPKGWYDAGDYGQIHCE

SEQ ID NO: 53791 - DNA, 1320 bp, Unknown
  Obtained from environmental sample
  misc_feature (1)..(1320): n is a, c, g, or t
ttgaatttgctggtaaatggatgcgagcagccggacacccagacaccagcgttagtttttacccagaagccgacaagccagcaggctggaaaatcagtagcccaaaaggttggtatgatgccggggattacgggcaaatacattgtgaatagcggaatttccgtcttcacccttttggagttttacgaacattttgaaaacgagcttaaaaatatctcctcaaacattccagagagtgggagtgcagtcccggatattttggaggaggttcgctggaacttggattggatgctcacaatgcaggacgcagacggcggagtttaccacaaactgacaacagcgcggttctgcggacatataatgcccaatttggacaccgcgagaagatatgtggttatgaaaacgaccaccgccaccttgaattttgccgctgtaatggctcaagcctcaagaatttacaaacactttgacgagcaattctcaaaaacagcattggcagcagcggaaaaagcctttgagtgggctagcaaaaaccccggcatcttatacaaacagccggacggaatgaacaccgggcaatatcaccatcccagagaaactgcgatggacgagcgtttgtgggcagcaacggagctttatataagtacccgaaaggagctttactcaaaatccatagattttgagtatccatcaaacctcaattcctctccttggtggggagatgcgaactttttggcggtttacaggctggcgaacggcaaaaacggctttgaggaaaatttaaccaaaacggcgcaaagcgctttattgtccttagcggataaacttagggacgttgcggaaaactctgcttacgggttgcccatattcaaagaaaactttgtttggggctcaaattccgtggttgcgaataatggcattgtgcttttgcacgcatattacctcacaggcgacaagcgttatctgagtgctgctcaaagagctttggattaccttttgggagccaaccctcttgacctgagttttgtgaccggatatggctacagaacgcctatgcatccgcatcaccgccagtccataggcgataccattttggagcctgtgcccggtatgctggtgggcggcccgcacgagggcgggcaggatattagacccggccaaaactgcgatgattatctacaaaaaggcaagcccgctctttcttacctagacaacgattgcagctacgcgaccaacgaggttgctataaactggaacgccccgctagtatatttgtcgggcgctttgcatttcttgaacaacggagcgaagaggccgtaa

SEQ ID NO: 53792 - protein, 439 aa, Unknown
  Obtained from environmental sample
  DOMAIN (27)...(429): Glycosyl hydrolase family 9
  misc_feature (1)..(439): Xaa is any amino acid
MNLLVNGCEQPDTQTPALVFTQKPTSQQAGKSVAQKVGMMPGITGKYIVNSGISVFTLLEFYEHFENELKNISSNIPESGSAVPDILEEVRWNLDWMLTMQDADGGVYHKLTTARFCGHIMPNLDTARRYVVMKTTTATLNFAAVMAQASRIYKHFDEQFSKTALAAAEKAFEWASKNPGILYKQPDGMNTGQYHHPRETAMDERLWAATELYISTRKELYSKSIDFEYPSNLNSSPWWGDANFLAVYRLANGKNGFEENLTKTAQSALLSLADKLRDVAENSAYGLPIFKENFVWGSNSVVANNGIVLLHAYYLTGDKRYLSAAQRALDYLLGANPLDLSFVTGYGYRTPMHPHHRQSIGDTILEPVPGMLVGGPHEGGQDIRPGQNCDDYLQKGKPALSYLDNDCSYATNEVAINWNAPLVYLSGALHFLNNGAKRP

SEQ ID NO: 53793 - DNA, 549 bp, Unknown
  Obtained from environmental sample
  misc_feature (1)..(549): n is a, c, g, or t
atgaataaagacccgtcacagattcccggcagaatcaaggaattgagggaaatcatggaaatcagcgcgatggatatagcagccgatattcatgttcctcttgcgacttatgaaggatacgaaagcggcgggcaggacatccccattagcgtattgtacaacatagccaaccggctcggtactgatgtaacggtgctgatgaccggggaagacccacgcatggacagcgccgccgtgtgccgcagggggaagggcgttcaggttgaacgctacccgggttatgaattttccagccttgcgtataacttcaagggcaggactatggaaccgcttttggtgttgctggattcgtcccggcctcaggcagcgcaggtgtcacattccggacaggaatttaactatgtagtggaaggccaggtaaaagtgacggtaggccggggcgagcatatcctagcagccggcgattctatttattttgacgcgaccctgccccacagccagagcgcggtgaatggcagcgctcagtttatcaccatcatacagatataa

SEQ ID NO: 53794 - protein, 182 aa, Unknown
  Obtained from environmental sample
  DOMAIN (12)...(66): Helix-turn-helix
  misc_feature (1)..(182): Xaa is any amino acid
MNKDPSQIPGRIKELREIMEISAMDIAADIHVPLATYEGYESGGQDIPISVLYNIANRLGTDVTVLMTGEDPRMDSAAVCRRGKGVQVERYPGYEFSSLAYNFKGRTMEPLLVLLDSSRPQAAQVSHSGQEFNYVVEGQVKVTVGRGEHILAAGDSIYFDATLPHSQSAVNGSAQFITIIQI

SEQ ID NO: 53795 - DNA, 948 bp, Unknown
  Obtained from environmental sample
  misc_feature (1)..(948): n is a, c, g, or t
gtgcctgacaccagaaaacaccgagtcccccgaaacactgaaggcattgaatttaaacgccacgccttttcacgcatcaatgttgatgcaatcagaatcgtgaatgtttccggcaatgcccggccccaggatataatgataaaagatcgttatgccaggctttatatttacgatcaaaacctgaactttaaatggaaattcagccgcaacaatacaggacattttccatacgctaatgatttttacaacaaaggcaaagactgtattttcagttgttacaacatgattgattcggacggaaaactaatctggaaactgcccattgataccgaccatacggatgaaattattttcggccccatcgatccggatcatcccgagggtattctcgcgatagtctcaggctgggaaggctttatgctggtggatcttaagggcaatatcctcttcagagacataaacggccacggacaacgtatttcaagcgggaattactgccccgacagacaaggcctcgaaatctgtactaccacttattgggagaatcaaggcatcatttacctttacgacagcaagggtaatgaaatatggcacagagaagccttgtgcaacggcaatgtgatctgtcctgtaaactgggacggaacaggcaccgaccttattttgctaaacggtaatgtaaatcacggcgggctgattgacggcgatggagacgttgtggcgcctttcccggatgacggtcacccggatctttgcgcagaggttattgatataaccggggattgccgtgatgaaattgttttatgggatcggacacagctttgggtttatacgcaggacaggccttccggttcagggtataagccgttaaaatatcctcactacaattcatcaaactaccgcggggaatttaattttccgcagataaggagatacaggcatgaataa

SEQ ID NO: 53796 - protein, 315 aa, Unknown
  Obtained from environmental sample
  misc_feature (1)..(315): Xaa is any amino acid
MPDTRKHRVPRNTEGIEFKRHAFSRINVDAIRIVNVSGNARPQDIMIKDRYARLYIYDQNLNFKWKFSRNNTGHFPYANDFYNKGKDCIFSCYNMIDSDGKLIWKLPIDTDHTDEIIFGPIDPDHPEGILAIVSGWEGFMLVDLKGNILFRDINGHGQRISSGNYCPDRQGLEICTTTYWENQGIIYLYDSKGNEIWHREALCNGNVICPVNWDGTGTDLILLNGNVNHGGLIDGDGDVVAPFPDDGHPDLCAEVIDITGDCRDEIVLWDRTQLWVYTQDRPSGSGYKPLKYPHYNSSNYRGEFNFPQIRRYRHE

SEQ ID NO: 53797 - DNA, 894 bp, Unknown
  Obtained from environmental sample
  misc_feature (1)..(894): n is a, c, g, or t
atggccgagggacgattaccgatttcagcaagattgagggtgcttaccgcggaagaaccctgcggaattctatttcgttatcaaacaagcctccagcattatgccttgttcatggttccaggcggtcttgaaatacagagaataaataaactagaacgcatggttttggcttcggtgaattataactggaattgtgatgatttttacgaactatccgtaaacgcagcaggcacgcaaattaaagctgctattaatggcaaacaggttcttgaatgtagcgactcattttacaaaaaaggctgtattgccctgtgcgcgtatatgcctacccagtatgaatgggtaaaagtgagcgccgaagaaaaatatttccaggcaattatttctttggcagcggatagacaaaagaagatactccaaaagcgggaagaacatccgtctttaaaggtatggaaaaaatacgatctgaaaaattttggggcggggcggcaaattcgcttcggtcaccttaccggtacggcggagcttttctttgtgatctgccagcaccagcgaagaatatttaaggatcgctatcccttcattagctgcatgacagcggtgagttttgaaaccggaaaggtgttgtggcaaaaaggaaaccccagggatgatcctgatacagtatttctgacgacagatcttccctttcagatatatgacattgataatgacggtattgaagaggtgatctgttcgtgggactttagattgatgatccttgacggacgtacaggcgatacaaaaaaagagtgcctgacaccagaaaacaccgagtcccccgaaacactgaaggcattgaatttaaacgccacgccttttcacgcatcaatgttgatgcaatcagaatcgtga

SEQ ID NO: 53798 - protein, 297 aa, Unknown
  Obtained from environmental sample
  misc_feature (1)..(297): Xaa is any amino acid
MAEGRLPISARLRVLTAEEPCGILFRYQTSLQHYALFMVPGGLEIQRINKLERMVLASVNYNWNCDDFYELSVNAAGTQIKAAINGKQVLECSDSFYKKGCIALCAYMPTQYEWVKVSAEEKYFQAIISLAADRQKKILQKREEHPSLKVWKKYDLKNFGAGRQIRFGHLTGTAELFFVICQHQRRIFKDRYPFISCMTAVSFETGKVLWQKGNPRDDPDTVFLTTDLPFQIYDIDNDGIEEVICSWDFRLMILDGRTGDTKKECLTPENTESPETLKALNLNATPFHASMLMQSES

SEQ ID NO: 53799 - DNA, 585 bp, Unknown
  Obtained from environmental sample
  misc_feature (1)..(585): n is a, c, g, or t
atggggaatataattatgcaactgctaaaagacagaatcttagccgagggcaaggtaatgcccggcaatatacttaatgtatccagcttccttaaccagcaggtagacattaatctttacaatgaaatcggcagagaatttttccgcctttttttaagcagcccaattaataagattatgactattgaagcgtccggtataggaattgcctgcatcaccgcgcagtatttcaaagtgccggtagtgtttgccaggaaattcagggcaaaaaacattgaagaagatctttttttcactgaggtcacttcctatacccacggaatagactatacaatctccgtacccaaacaatttctgaaagaaagcgacacggttttgcttattgatgattttcttgccaacggctgcgccctggaagggctgatacaaattgttaaggtgtccggggcaaaactcgcaggggccggggctgtcattgaaaaagggtttcagggcggcggcaagcgcataagggaacaaaatatacgcctggaatctcttgcgatcatagaaagcatggacgagaacaaaatcatattcaaatag

SEQ ID NO: 53800 - protein, 194 aa, Unknown
  Obtained from environmental sample
  DOMAIN (36)...(170): Phosphoribosyl transferase domain
  misc_feature (1)..(194): Xaa is any amino acid
MGNIIMQLLKDRILAEGKVMPGNILNVSSFLNQQVDINLYNEIGREFFRLFLSSPINKIMTIEASGIGIACITAQYFKVPVVFARKFRAKNIEEDLFFTEVTSYTHGIDYTISVPKQFLKESDTVLLIDDFLANGCALEGLIQIVKVSGAKLAGAGAVIEKGFQGGGKRIREQNIRLESLAIIESMDENKIIFK

SEQ ID NO: 53801 - DNA, 459 bp, Unknown
  Obtained from environmental sample
  misc_feature (1)..(459): n is a, c, g, or t
atggccgccctgaataccaggcaccaggtcattataggggcactttttaatcaattttatacttatttacggggaaagccttgccaggtatttatcgcgccttatgatgtcaggcttttttatgaggaagatgaaagcgacgacacggtggtacagccggatattatggttgtctgcgataaagataaaataggaccggaaggctgccgcggcgtgcctgatctggtaatagaaattttgtctccgtcaaacaccgctatcgaaatggaaaggaaattttcactgtaccgggaagccggcgtgcgagaatactggatagttgatacaaaaaacaacacccttaaagtacattgttttcaggattctgatattctgacaaatacatacaaaagcgccgataccgtcctggttgccgttcttcctggtttccgtatagcgttggaacaggtattcgaatga

SEQ ID NO: 53802 - protein, 152 aa, Unknown
  Obtained from environmental sample
  DOMAIN (8)...(118): Protein of unknown function (DUF820)
  misc_feature (1)..(152): Xaa is any amino acid
MAALNTRHQVIIGALFNQFYTYLRGKPCQVFIAPYDVRLFYEEDESDDTVVQPDIMVVCDKDKIGPEGCRGVPDLVIEILSPSNTAIEMERKFSLYREAGVREYWIVDTKNNTLKVHCFQDSDILTNTYKSADTVLVAVLPGFRIALEQVFE

SEQ ID NO: 53803 - DNA, 348 bp, Unknown
  Obtained from environmental sample
  misc_feature (1)..(348): n is a, c, g, or t
ttgtgggggacggggtgccgtccggtggctgataacggcggcttcgactccgctcaaccggcggccgcttcgagcaaacagcggccgttgagcggagccgaaacgaccgccggcaaaccgtacgtcgtgatgggaatcgtcaacgttaccgacgactcattttacgacggcggcagttacgttactaaggatgccgccgttgaacacgcgttgcggcttgttgaggatggggccgacgttatcgacataggcggctgctcctcccgtcccggggcgaagtttctgccgccggaggatgaagcggagcgcgtcgtgccggtcgtctccgaactggtgaaacgcggttag

SEQ ID NO: 53804 - protein, 115 aa, Unknown
  Obtained from environmental sample
  misc_feature (1)..(115): Xaa is any amino acid
MWGTGCRPVADNGGFDSAQPAAASSKQRPLSGAETTAGKPYVVMGIVNVTDDSFYDGGSYVTKDAAVEHALRLVEDGADVIDIGGCSSRPGAKFLPPEDEAERVVPVVSELVKRG

SEQ ID NO: 53805 - DNA, 1893 bp, Unknown
  Obtained from environmental sample
  misc_feature (1)..(1893): n is a, c, g, or t
ttgcgttccatggaggctttcgggtcacagcgggaggttaggcttacctacacgcagttcttggaacttttggactccgccggcggcggggccggtgtcgttgaggctgttgtgatgcagcggggggacgggcgggcgatactgcgcgggcgcgtaggcaatccggcgacgcttgcggcggtcgcttccggttcgcactccacggccgcgacggcgtcggggagttcgcacttcgtcgtgaacctgccgttcttagattccggaatgttgcgcctttgggacgaagccgggtttccgtactcctttgagcaagagaagatttgggggaacgttctcgttcagatagcgattatcgtcgcggtatcggtattcttctacttcctcttcatacgcaatatgcagtcggcgcaacgcgggatgttctcgttcggcaagagccgcgccaagttgcacaacatcgacagaccgcaggtgaccttcaacgacgccgccggggtggaggaggcaaaggcggagctggccgaggttatagactttttgaaagatccgaagaagtttaaaaaactgggcgggaagatacccaaaggcgtgctgcttctcgggccgccgggtacaggaaagacgctgttggcgcgttgcgtggccggggaggcgggggtgccgtttttgtccatgagcgggtcggacttcgtggagatgttcgtgggcgtgggcgcctcgcgtgtacgcgacttgtttgagaacgcgaagaagaactcgccctgcatcgtcttcatagacgagatagacgccgtcgggaggcagcgcggcgccggcctcggcggcgggcacgacgagcgtgagcagacgctaaaccagatgctcgtggagatggacggttttgagccgaactccggcgttatactcatcgccgcgaccaacaggcccgacgtgcttgatccggcgctgttgcgtcccggacgcttcgaccggcaagtggtggtggacgtgccggacgtgagggggcgcgaggggattttgaaggttcacacgaaggagataccgctggcgccggacgttgacttgaacgtgatagcgaaggggacgcccgggtttgtaggggcggacctggcgaacttggtaaacgaggcggcgcttatggcggcaaggttcgatcaggagaacgtctccatgatagactttgaggaggcgaaggacaaggtgctgatgggcgccgagcggaagagcatagcgctatcggagaagcagaagcggatcacggcctaccacgaagcggggcacgccgtttgcaacatgcactgcgccgaggccgacccgttgcacaaggtgactatcataccgcgaggcagggcgctgggcgtcacgttctcgctgccggatgaagacaagtacatgcaaacgaagcaattcattctggatcaaatatgcatattcatgggcggcaggaccgcggaggagctggtattcggccaccagaccacaggcgcgtccaatgacataaagcgagcgacgtcgctggtcaggaagatggtctgcgactacggtatgacggacgagcttgggccggtctcctacggcgacaaggacgattcgatatttttaggccgcgagatgaaccgccaccgcgactactcggaatcaacggcggagtctatagacaagcacgtaaggagaataatagacgaacagtccgctagggctaaggatatactgacggagcataaggacgagttggagaggctggcgaaggcgctgcttgagcacgagctgctggaccgcgaggagataataaaagtggtgggtggcgcgactcttgagagcgccaagaaaaacagggtgctgccgcagaagatagaggtggttgtgggggacggggtgccgtccggtggctga

SEQ ID NO: 53806 - protein, 630 aa, Unknown
  Obtained from environmental sample
  DOMAIN (196)...(330): ATPase family associated with various cellular activities (AAA)
  misc_feature (1)..(630): Xaa is any amino acid
MRSMEAFGSQREVRLTYTQFLELLDSAGGGAGVVEAVVMQRGDGRAILRGRVGNPATLAAVASGSHSTAATASGSSHFVVNLPFLDSGMLRLWDEAGFPYSFEQEKIWGNVLVQIAIIVAVSVFFYFLFIRNMQSAQRGMFSFGKSRAKLHNIDRPQVTFNDAAGVEEAKAELAEVIDFLKDPKKFKKLGGKIPKGVLLLGPPGTGKTLLARCVAGEAGVPFLSMSGSDFVEMFVGVGASRVRDLFENAKKNSPCIVFIDEIDAVGRQRGAGLGGGHDEREQTLNQMLVEMDGFEPNSGVILIAATNRPDVLDPALLRPGRFDRQVVVDVPDVRGREGILKVHTKEIPLAPDVDLNVIAKGTPGFVGADLANLVNEAALMAARFDQENVSMIDFEEAKDKVLMGAERKSIALSEKQKRITAYHEAGHAVCNMHCAEADPLHKVTIIPRGRALGVTFSLPDEDKYMQTKQFILDQICIFMGGRTAEELVFGHQTTGASNDIKRATSLVRKMVCDYGMTDELGPVSYGDKDDSIFLGREMNRHRDYSESTAESIDKHVRRIIDEQSARAKDILTEHKDELERLAKALLEHELLDREEIIKVVGGATLESAKKNRVLPQKIEVVVGDGVPSGG

SEQ ID NO: 53807 - DNA, 546 bp, Unknown
  Obtained from environmental sample
  misc_feature (1)..(546): n is a, c, g, or t
ttggtcgcggcgatgagtataacgccggagttcggctcaaaaccgtccatctccacgagcatctggtttagcgtctgctcacgctcgtcgtgcccgccgccgaggccggcgccgcgctgcctcccgacggcgtctatctcgtctatgaagacgatgcagggcgagttcttcttcgcgttctcaaacaagtcgcgtacacgcgaggcgcccacgcccacgaacatctccacgaagtccgacccgctcatggacaaaaacggcacccccgcctccccggccacgcaacgcgccaacagcgtctttcctgtacccggcggcccgagaagcagcacgcctttgggtatcttcccgcccagttttttaaacttcttcggatctttcaaaaagtctataacctcggccagctccgcctttgcctcctccaccccggcggcgtcgttgaaggtcacctgcggtctgtcgatgttgtgcaacttggcgcggctcttgccgaacgagaacatcccgcgttgcgccgactgcatattgcgtatgaagaggaagtag

SEQ ID NO: 53808 - protein, 181 aa, Unknown
  Obtained from environmental sample
  misc_feature (1)..(181): Xaa is any amino acid
MVAAMSITPEFGSKPSISTSIWFSVCSRSSCPPPRPAPRCLPTASISSMKTMQGEFFFAFSNKSRTREAPTPTNISTKSDPLMDKNGTPASPATQRANSVFPVPGGPRSSTPLGIFPPSFLNFFGSFKKSITSASSAFASSTPAASLKVTCGLSMLCNLARLLPNENIPRCADCILRMKRK

SEQ ID NO: 53809 - DNA, 579 bp, Unknown
  Obtained from environmental sample
  misc_feature (1)..(579): n is a, c, g, or t
gtgcccgccgccgaggccggcgccgcgctgcctcccgacggcgtctatctcgtctatgaagacgatgcagggcgagttcttcttcgcgttctcaaacaagtcgcgtacacgcgaggcgcccacgcccacgaacatctccacgaagtccgacccgctcatggacaaaaacggcacccccgcctccccggccacgcaacgcgccaacagcgtctttcctgtacccggcggcccgagaagcagcacgcctttgggtatcttcccgcccagttttttaaacttcttcggatctttcaaaaagtctataacctcggccagctccgcctttgcctcctccaccccggcggcgtcgttgaaggtcacctgcggtctgtcgatgttgtgcaacttggcgcggctcttgccgaacgagaacatcccgcgttgcgccgactgcatattgcgtatgaagaggaagtagaagaataccgataccgcgacgataatcgctatctgaacgagaacgttcccccaaatcttctcttgctcaaaggagtacggaaacccggcttcgtcccaaaggcgcaacattccggaatctaa

SEQ ID NO: 53810 - protein, 192 aa, Unknown
  Obtained from environmental sample
  misc_feature (1)..(192): Xaa is any amino acid
MPAAEAGAALPPDGVYLVYEDDAGRVLLRVLKQVAYTRGAHAHEHLHEVRPAHGQKRHPRLPGHATRQQRLSCTRRPEKQHAFGYLPAQFFKLLRIFQKVYNLGQLRLCLLHPGGVVEGHLRSVDVVQLGAALAEREHPALRRLHIAYEEEVEEYRYRDDNRYLNENVPPNLLLLKGVRKPGFVPKAQHSGI

SEQ ID NO: 53811 - DNA, 780 bp, Unknown
  Obtained from environmental sample
  misc_feature (1)..(780): n is a, c, g, or t
atgatcagatcggcacgaggaagaaaaggcgatgaggttaaggtaaaaatcgaagttgtagacagcggtatcgggatttcgccggaacagcagaaaaaggttttctcggcttacaaccaggccgaccacacaatcacgaaacaatccaacggctcgggaatggggcttgccatttccaaacggaatatagagcttatgcaaggcaatatttggattgagtcggaactcggcaagggcgcgaaatttacatttaccataaaagtgaaaaaggggaaacatagcgcggtttcggctacagccgatggcacagccaacggcactgccgacggcaaggccgacggcaaggccgcagacactcccgcgcctacccccataataaaggattccgatttacagttgcagggctataccatacttgccgcagaagacatgaattaccacagggaagtcctgtccatgtatctgaaaaaaaccggggttaacatcgattatgcagtaaacggcaaagaggctgtcgaaaagttcaaagcgaatcccgaaaaatacaaactgatcctaatggacattaggatgccggaaatgaacggagatgaggcgacaaagataatacggtcgcttgatctgaaaaatgcaaagaagatacccattatcgcaatgactgcggacgtttttaaggaagacgtccaaaaatgcctgtcggcaggcatgaacgatcatatctcanaacctgttgtcccgaanattatatacgccaaactaaagcaatatctgggagtataa

SEQ ID NO: 53812 - protein, 259 aa, Unknown
  Obtained from environmental sample
  DOMAIN (10)...(89): Histidine kinase-, DNA gyrase B-, and HSP90-like ATPase
  misc_feature (1)..(259): Xaa is any amino acid
MIRSARGRKGDEVKVKIEVVDSGIGISPEQQKKVFSAYNQADHTITKQSNGSGMGLAISKRNIELMQGNIWIESELGKGAKFTFTIKVKKGKHSAVSATADGTANGTADGKADGKAADTPAPTPIIKDSDLQLQGYTILAAEDMNYHREVLSMYLKKTGVNIDYAVNGKEAVEKFKANPEKYKLILMDIRMPEMNGDEATKIIRSLDLKNAKKIPIIAMTADVFKEDVQKCLSAGMNDHISXPVVPXIIYAKLKQYLGV

SEQ ID NO: 53813 - DNA, 555 bp, Unknown
  Obtained from environmental sample
  misc_feature (1)..(555): n is a, c, g, or t
atgtctgacggtgatgatcttaatcttgatggcgaggactctgcgggagcaagcgcaccgaaaaaaccatccggtttagcggctttattgccgaacttgctgaaatttgtcgctattggtctaggcgcgttgattttcattgttacggtttcggtaattacatacaacatcctgaacaagggcgggcaatcccagactgtgctaccttcggcttctccctttgtcggcgccaggccgcagtaccagattttctcctcaattggacagatcagaacaagcaccaaggatcccctgccttattcggttgttgtggatatgattatcggatacgatcttaacgacaatacgacccaggccgaattaacaaaccgcctttacgaattgcgggattttgtgcgtgtatatttcaaaggcaaaatggccgatgatctcaggcccgaaaacgaaccccgcataaaacaggaaattctcgaacagctcaacaccaaaattcttagttccgcaagggcaaggatcattctttttaatcagcttgacgtaatgtcgatgcagtaa

SEQ ID NO: 53814 - protein, 184 aa, Unknown
  Obtained from environmental sample
  DOMAIN (30)...(181): Flagellar basal body-associated protein FliL
  misc_feature (1)..(184): Xaa is any amino acid
MSDGDDLNLDGEDSAGASAPKKPSGLAALLPNLLKFVAIGLGALIFIVTVSVITYNILNKGGQSQTVLPSASPFVGARPQYQIFSSIGQIRTSTKDPLPYSVVVDMIIGYDLNDNTTQAELTNRLYELRDFVRVYFKGKMADDLRPENEPRIKQEILEQLNTKILSSARARIILFNQLDVMSMQ

SEQ ID NO: 53815 - DNA, 483 bp, Unknown
  Obtained from environmental sample
  misc_feature (1)..(483): n is a, c, g, or t
atggatcgcggaaggtcgctgggtacgtccttgcgaaaggcggtaagtttatttcagcccgaggttagatccaacaaggtaaaggttaccagcgaagaacgcggccttgtaataaccctcgcgtcagacgccttttttaatcccgccagtgcgcgggtcaacattgaagaaacaagggaaatcctgcttcgtctggcttcgcttcttaattcaaacgaagtcggtttaaggaaagtacgcatagagggtcataccgattcggtagacgttgatccggccggaccctggcaagacaactggcagctttcttcggaaagggcaagggctgtgttaagatatttaaccgattttggagtagcggaaaaccgttttcagatcgccggttttgcagatacaatgcctgtaagcagtaatttaaccccggaaggaagggcttataacaggcgcgtggatattgttattattgatgaaggacacttgtaa

SEQ ID NO: 53816 - protein, 160 aa, Unknown
  Obtained from environmental sample
  DOMAIN (45)...(148): OmpA family
  misc_feature (1)..(160): Xaa is any amino acid
MDRGRSLGTSLRKAVSLFQPEVRSNKVKVTSEERGLVITLASDAFFNPASARVNIEETREILLRLASLLNSNEVGLRKVRIEGHTDSVDVDPAGPWQDNWQLSSERARAVLRYLTDFGVAENRFQIAGFADTMPVSSNLTPEGRAYNRRVDIVIIDEGHL

SEQ ID NO: 53817 - DNA, 402 bp, Unknown
  Obtained from environmental sample
  misc_feature (1)..(402): n is a, c, g, or t
atggaaaacgagttaagccagatgcaggatcgccatggtgataaaatccaaatggttatcggctgggccggccttgcccccggactgggtatgctgggtacggttatcggccttatcggtatgttgaaacaactggaagacaaaagcgccctgggcccgaatatggcggtcgctcttatcaccactctttacggttccatggtagcgaacctgcttttaatcccaatctttgggaaactaaaaagcctcgacgcgaccgaagccaagataaaggaaatggagatagaaggggtactttcaatccaggccggggacaatcccagaatcctggctactaagcttctttcctaccttgacccccttgcgcgcaaggcagtagaagccgaagtgatcaaagattaa

SEQ ID NO: 53818 - protein, 133 aa, Unknown
  Obtained from environmental sample
  misc_feature (1)..(133): Xaa is any amino acid
MENELSQMQDRHGDKIQMVIGWAGLAPGLGMLGTVIGLIGMLKQLEDKSALGPNMAVALITTLYGSMVANLLLIPIFGKLKSLDATEAKIKEMEIEGVLSIQAGDNPRILATKLLSYLDPLARKAVEAEVIKD

SEQ ID NO: 53819 - DNA, 1338 bp, Unknown
  Obtained from environmental sample
  misc_feature (1)..(1338): n is a, c, g, or t
gtgaaaaaaaacatcatgctgagggcaaaagtaataagcttcctgcggacgaaaatggaaagcctcgggtttacggagattcaaacgccgatattaacttcctcctcgcctgagggagcgcgggattaccttgttccgagccgcaaacaccacgggaaattttacgctcttccgcaggccccgcagattttcaaacagctattgatggtttccggttttgaccgttatttccagatagccccctgtttcagggacgaagacgcccgcgccgaccgttcgcccggcgagttttatcagcttgatttcgaaatgtcctttgcggagcaggaggacgttcttcgcacggcggaaacggtgctttacgatgtatttaaaaccttttccggtaaagctgtcagccccgctcccttccgccgcattccctatgcgcaggcgatgcttaaatacggaaccgacaagcccgaccttcgcaaccctcttgtcatcgaagacctgacgcagttttttgctgacgtagattttcagccgttcaagaatattcctgtccggggcattgttgcgcctaacgcggcgaaacaaccgaagtctttctttgaaaaaatgctcgcctttgcgacagaaatcggcatgaaggggcttgggtatatttccgttctggaagacggttcgttgaaaggcccgattgttaagttcctttccgaagaaaagcaaacaacgctgcgaaaagacttatcactgaaagaaaacgacactttgttttttatcgccgatgtgcccgcagcggtaaacggccttgccggacagatacgcacagcgcttggcagccagttaaatcttgttaacaagaacagctttgaactttgtttcattgtggatttcccgatgtacggtagaagcgaagaaacaggcgcaattgagtttacccacaatcctttctctatgccgcagggcggtcttgaagcgcttgtatcgaaagacccgctcgacattcttgcatggcagtacgacattgtgtgcaacggcgtggagctttcctccggcgctgtccgtaatcatctgcccgaagttatggtgaaggcgtttgaaatcgccggatacacgcaggccgaccttgaaaataagttttcttcactgtacaacgcgttccattacggagcgccgcctcacgcgggcatggctcctggtatagatcgaattgtgatgctgctggcggaagaagaaaacatccgcgaagttaccgttttcccgatgaacagcaatgcccaggatttgttgatggaagctccgtgcgaagtgtcggaacagcagctccgtgaggtgcatatccgcatacgctga

SEQ ID NO: 53820 - protein, 445 aa, Unknown
  Obtained from environmental sample
  DOMAIN (177)...(266): GAD domain
  misc_feature (1)..(445): Xaa is any amino acid
MKKNIMLRAKVISFLRTKMESLGFTEIQTPILTSSSPEGARDYLVPSRKHHGKFYALPQAPQIFKQLLMVSGFDRYFQIAPCFRDEDARADRSPGEFYQLDFEMSFAEQEDVLRTAETVLYDVFKTFSGKAVSPAPFRRIPYAQAMLKYGTDKPDLRNPLVIEDLTQFFADVDFQPFKNIPVRGIVAPNAAKQPKSFFEKMLAFATEIGMKGLGYISVLEDGSLKGPIVKFLSEEKQTTLRKDLSLKENDTLFFIADVPAAVNGLAGQIRTALGSQLNLVNKNSFELCFIVDFPMYGRSEETGAIEFTHNPFSMPQGGLEALVSKDPLDILAWQYDIVCNGVELSSGAVRNHLPEVMVKAFEIAGYTQADLENKFSSLYNAFHYGAPPHAGMAPGIDRIVMLLAEEENIREVTVFPMNSNAQDLLMEAPCEVSEQQLREVHIRIR

SEQ ID NO: 53821 - DNA, 1413 bp, Unknown
  Obtained from environmental sample
  misc_feature (1)..(1413): n is a, c, g, or t
atgaagaaggtttttttattgctcataatggttattccggcggcgcttattgtgtcttgttccggatcgctgaaacctaaaaatgtttccgttccggcagataacaatgcgagtatcttcgttgaggctatacccaatctgcccgatggttttatgtacggcgtggacatatccaccatcatagctcaggaaaacagcggcgtgaagttttacggttttgacggcaaagagcaggatatttttaagacgctgtccgaggcaggcgtcaattacataagagtgcgtgtctggaacgatccttatgattctaaaggcaggagttacggcggcggcaattgcgatgttaaaaacgccgccgtgattgccgagcgcgcaaaaaaatatgggatgaaattatttgtcgatttccattattccgatttttgggctgatcctggtaaacagatggttcctaagacatggaccggcatggaagtcgaacaaaaagccattgcgctggaacagtttactgccgatgcgctgaaggaaatagggaaaagcgggaatatcggtatggtgcagttgggtaatgagaccaacggcgccatgagcggcgaaactaaatggatgaacatttccgtactgatgaacgcgggagcgagagccgtccgtaaatacaataaaaacatcaaaatcgcaattcattttgccaaccccgaacaagggcgatatgtaaataacgcccagtatttaaagaactttaatgtggactatgatgtattcgccagttcatattacccctattggcatggaacactggaaaatctgacagcccaactcctagcggtcaaagaacgatatggcaaagaggtactaatcgccgaaacagcctacccctacactgaggaagacggtgatgggtttggtaataccatgtccgactcgcgcggtcaggcatacccgttttcggtttacggacaggcgcgagccatgaggaatgttatcgcggttgcggcggatgtcggcgcaatcggcgtgttttactgggaacctgcgtggatacccgtaggaacggattataactccaacctcgtgaaatgggaacaattcggcagcggctgggcatccagttacgcttcagaatacgaccctgtggatgccggtaagtggtacggcggcagcggcgtagataatcaggcgctgtttgatttcaacggtaatcctttgccgtctttgaacgtgtttaagtacgcaaaaaacggagcgtccatgaaggagaattttatagacgcgatacccgatatcgaattcacgcaattacttaccgaaccgcgagtcctgccggaaacggtcagcgtagtatacgcggacagcagtaaaaaagctgtaccggtaacatggaatcaggcgcaattagatgcggtgaaaagatag

SEQ ID NO: 53822 - protein, 470 aa, Unknown
  Obtained from environmental sample
  SIGNAL (1)...(22)
  DOMAIN (52)...(408): Glycosyl hydrolase family 53
  misc_feature (1)..(470): Xaa is any amino acid
MKKVFLLLIMVIPAALIVSCSGSLKPKNVSVPADNNASIFVEAIPNLPDGFMYGVDISTIIAQENSGVKFYGFDGKEQDIFKTLSEAGVNYIRVRVWNDPYDSKGRSYGGGNCDVKNAAVIAERAKKYGMKLFVDFHYSDFWADPGKQMVPKTWTGMEVEQKAIALEQFTADALKEIGKSGNIGMVQLGNETNGAMSGETKWMNISVLMNAGARAVRKYNKNIKIAIHFANPEQGRYVNNAQYLKNFNVDYDVFASSYYPYWHGTLENLTAQLLAVKERYGKEVLIAETAYPYTEEDGDGFGNTMSDSRGQAYPFSVYGQARAMRNVIAVAADVGAIGVFYWEPAWIPVGTDYNSNLVKWEQFGSGWASSYASEYDPVDAGKWYGGSGVDNQALFDFNGNPLPSLNVFKYAKNGASMKENFIDAIPDIEFTQLLTEPRVLPETVSVVYADSSKKAVPVTWNQAQLDAVKR

SEQ ID NO: 53823 - DNA, 879 bp, Unknown
  Obtained from environmental sample
  misc_feature (1)..(879): n is a, c, g, or t
atgggtattaaaacatacaagccgattacacctggtatgcgacaatgggcaagccttgattattcagatttgaccaagggcgccaagccggaaaaatctctgactaatggtaaaaaagacagagcggggcgtgattcgtttgggcggataagcgtccgccataagggcggcggtcataaacgtctttacagggatattgactttaaaagagataaaatcggtattcaaggaaaagtttcttcaattgagtacgatcccaaccgcagtgcgaatattgcgcttatttattataaagacggtgaaaaacggtatattatcgctcccaaaggattaaaaaaaggcgctgttgttataagcagtcccaacgctccgattgaaccgggtaatgcgctgcctttggaaaatattccgcttggttttaatgtttataatattgagcttacactcggcaagggcggacaaatggcgcgttctgcgggtacgggcgctcttgtagccgccaaggaaggcgactatgttacgcttaaacttccttccggtgagatgcggatggtatttaaaaagtgttatgcgacaatcggtactgtcggcaatgaagaccacatgaatgtagttttgggcaaagcaggccgcaagcgctggatgggggtgcgcccgacagttcgcggtatggcaatgaaccctgtagatcacccgcatggcggcggtgaaggaaggagtaaaggtattcatcctgttaccccctggggtcagccgacaaagggatacaaaacccgtaaaaacataaaccttcttcacggtttattgtcagccggggtaaaaagaagtagcatgaaacgcatttctataataataaagtgtacggctatgctgccgtaa

SEQ ID NO: 53824 - protein, 292 aa, Unknown
  Obtained from environmental sample
  DOMAIN (43)...(119): Ribosomal Proteins L2, RNA binding domain
  misc_feature (1)..(292): Xaa is any amino acid
MGIKTYKPITPGMRQWASLDYSDLTKGAKPEKSLTNGKKDRAGRDSFGRISVRHKGGGHKRLYRDIDFKRDKIGIQGKVSSIEYDPNRSANIALIYYKDGEKRYIIAPKGLKKGAVVISSPNAPIEPGNALPLENIPLGFNVYNIELTLGKGGQMARSAGTGALVAAKEGDYVTLKLPSGEMRMVFKKCYATIGTVGNEDHMNVVLGKAGRKRWMGVRPTVRGMAMNPVDHPHGGGEGRSKGIHPVTPWGQPTKGYKTRKNINLLHGLLSAGVKRSSMKRISIIIKCTAMLP

SEQ ID NO: 53825 - DNA, 468 bp, Unknown
  Obtained from environmental sample
  misc_feature (1)..(468): n is a, c, g, or t
gtgaagaaggtttatgtttttacgggttttgtatccctttgtcggctgaccccagggggtaacaggatgaatacctttactccttccttcaccgccgccatgcgggtgatctacagggttcattgccataccgcgaactgtcgggcgcacccccatccagcgcttgcggcctgctttgcccaaaactacattcatgtggtcttcattgccgacagtaccgattgtcgcataacactttttaaataccatccgcatctcaccggaaggaagtttaagcgtaacatagtcgccttccttggcggctacaagagcgcccgtacccgcagaacgcgccatttgtccgcccttgccgagtgtaagctcaatattataaacattaaaaccaagcggaatattttccaaaggcagcgcattacccggttcaatcggagcgttgggactgcttataacaacagcgcctttttttaa

SEQ ID NO: 53826 - protein, 155 aa, Unknown
  Obtained from environmental sample
  misc_feature (1)..(155): Xaa is any amino acid
MKKVYVFTGFVSLCRLTPGGNRMNTFTPSFTAAMRVIYRVHCHTANCRAHPHPALAACFAQNYIHVVFIADSTDCRITLFKYHPHLTGRKFKRNIVAFLGGYKSARTRRTRHLSALAECKLNIINIKTKRNIFQRQRITRFNRSVGTAYNNSAFF

SEQ ID NO: 53827 - DNA, 399 bp, Unknown
  Obtained from environmental sample
  misc_feature (1)..(399): n is a, c, g, or t
atgaaagatacgaaaacaggttacagtgcaaagagcagataccttatcggttcgccttttaaaatcaggccggttgccgaccttatacgccgcaggccgtatacggaagctgtttcaattctggaaaatatgccgcataagggagcgcagcttatcggcaagacggttaaatcagccgcgtcaaacgcgcttgcagataacaagaaacttgatgaggatatgctctatgtacgggaaatttatattgacgaaggtcccagacttaaaagaatttggcatcgaggcaggggacgcgcggatatgcagttaaaacgaatgtgccacataactgtagtagttgatgaaacaggaagctcggcatcgcttaacggtacgtcttccaaaaaggcggcaaaataa

SEQ ID NO: 53828 - protein, 132 aa, Unknown
  Obtained from environmental sample
  DOMAIN (10)...(115): Ribosomal protein L22p/L17e
  misc_feature (1)..(132): Xaa is any amino acid
MKDTKTGYSAKSRYLIGSPFKIRPVADLIRRRPYTEAVSILENMPHKGAQLIGKTVKSAASNALADNKKLDEDMLYVREIYIDEGPRLKRIWHRGRGRADMQLKRMCHITVVVDETGSSASLNGTSSKKAAK

SEQ ID NO: 53829 - DNA, 705 bp, Unknown
  Obtained from environmental sample
  misc_feature (1)..(705): n is a, c, g, or t
atgggacaaaaagtaaatccgacagggcttaggattggaattaacaaaacttggggttcgcgctggtatgttgacccaaaagaatatgttgaagccctgcatgaagacttaaaattacgcaagctcattatggatatgccggagacaaagggagccgatattgcggaactggaaattattcgtcatccgcagcggataaccattacaattcatacagcccgtcccggcgtaatcatcggcgtaaagggcgcaaatatcgaaaaaatcggcaatgatctgcagaagaaagtaagcaaaaaagtacagataaaaatcaaagaagtcagaaacgcggataataacgcacagataatcgcgcaaaatatcgcccgtcagcttttagcccgttcttccttcagacggacaatgaagcaggcaatttcaaacgcaattaaaaaaggcaacgcccagggtgtaaaggtaaggctttcaggccgtctcggcggcgcggaaatgtcacgtaccgaagaagcaaaagaagggcgtattcctcttcatactcttagagcggatatagattatggttttgccgaagctcacactccgtttggttctatcggggtaaaagtctgggtttataacggtatgaaatacggaaaagaacagaaagaagacgcaggcgctcttgtccgcaaacggcgggaacgtgctcctgccaggagttaa

SEQ ID NO: 53830 - protein, 234 aa, Unknown
  Obtained from environmental sample
  DOMAIN (65)...(119): KH domain
  misc_feature (1)..(234): Xaa is any amino acid
MGQKVNPTGLRIGINKTWGSRWYVDPKEYVEALHEDLKLRKLIMDMPETKGADIAELEIIRHPQRITITIHTARPGVIIGVKGANIEKIGNDLQKKVSKKVQIKIKEVRNADNNAQIIAQNIARQLLARSSFRRTMKQAISNAIKKGNAQGVKVRLSGRLGGAEMSRTEEAKEGRIPLHTLRADIDYGFAEAHTPFGSIGVKVWVYNGMKYGKEQKEDAGALVRKRRERAPARS

SEQ ID NO: 53831 - DNA, 393 bp, Unknown
  Obtained from environmental sample
  misc_feature (1)..(393): n is a, c, g, or t
atgatggaaacgaattccggttacagggcggttagcaaataccttatgggttcgccctataaaatcaggccagtggccgaccttatccgccgcagatcctatcctgaggctgtttctctgctggaaaacatgccccacaagggcgcgcggcttatccgcaaaacggtaaaatcagccgcttccaacgcccttgccggcaacaaaaagctggacgaggatatgctctatgttcgggagattttaatagacgaaggccccaggctcaagaggatatggttccgcgccaggggacgggcggatatgcagctcaggagaatgtgccgcatcaccgtggttattgacgaggccgctggcagcggcagggccaaagactccaaaaaggcggcgaaataa

SEQ ID NO: 53832 - protein, 130 aa, Unknown
  Obtained from environmental sample
  DOMAIN (10)...(115): Ribosomal protein L22p/L17e
  misc_feature (1)..(130): Xaa is any amino acid
MMETNSGYRAVSKYLMGSPYKIRPVADLIRRRSYPEAVSLLENMPHKGARLIRKTVKSAASNALAGNKKLDEDMLYVREILIDEGPRLKRIWFRARGRADMQLRRMCRITVVIDEAAGSGRAKDSKKAAK

SEQ ID NO: 53833 - DNA, 381 bp, Unknown
  Obtained from environmental sample
  misc_feature (1)..(381): n is a, c, g, or t
atggatttttcaatggaaaacataaaaagaagcgacataaatgagcaatgggcgcattcaggtattgttgaagctggagatttcgcttttataagttattgtgtcggtaatataggtcagactattgaaaacaaaataaatggcgcaataaaccatttaaaaaaaaggcttgaatcaattggcttaacattggaatcagttgtaaagctggattgtttgtttagggacatatggaacataccagtaatggaaaaggtaattaaggaaaggtttaatgggaaatatcccgcaaggaagtcaatacagacggaatttgcccatgtaggcggacaagaagggcttttgtttcaacttgacgcaattgcttataaagatcattag

SEQ ID NO: 53834 - protein, 126 aa, Unknown
  Obtained from environmental sample
  DOMAIN (15)...(124): Endoribonuclease L-PSP
  misc_feature (1)..(126): Xaa is any amino acid
MDFSMENIKRSDINEQWAHSGIVEAGDFAFISYCVGNIGQTIENKINGAINHLKKRLESIGLTLESVVKLDCLFRDIWNIPVMEKVIKERFNGKYPARKSIQTEFAHVGGQEGLLFQLDAIAYKDH

SEQ ID NO: 53835 - DNA, 783 bp, Unknown
  Obtained from environmental sample
  misc_feature (1)..(783): n is a, c, g, or t
gtggaagagtttattgatgttaatggaaaaaatatatttataaaatcatctggaaatggtgatcccattatatttttacacagtagtttattgacatcggaaatgtggaacagtcaaatagattatttctcaaataaaaataaagtgattaccttcgatttctgtggtcatggaaaaagtgatttgccaaaaggaatatattcggattatgaagatttaaaaaccatacttgataagaataatatcagaaaaacaataattgtagggtgttcgtatggaggaagtgtcgctttagattttgtatcaaaatatcctgaatatgtaaagaaattggttcttataacacctgcaataaacggttataagtatccgattaaattaacactcgaaagtattaaaaattttaagaatgtgcataaagttggaatagaaaaagcagttgaaatgtttataaataacaaatattggaattattttgttccaaaagaaaatatttttaaggaagaattcaagaatatatttatagggaataaaatattttattttggtaattatacaaaaaaacagatagtaaaacctgttgcaattaaacgattatcagaaataaataataatgtactattgataggaagtgaaaatgattcaaaatttaatagggaagtaattggaatattatctaaaaatataaaaggaattaaaatatatgaaataaaaaatagcggacatttgccaaatatagaaaaaagcggagaaataaatagattaattaaggaatttatatga

SEQ ID NO: 53836 - protein, 260 aa, Unknown
  Obtained from environmental sample
  DOMAIN (47)...(258): alpha/beta hydrolase fold
  misc_feature (1)..(260): Xaa is any amino acid
MEEFIDVNGKNIFIKSSGNGDPIIFLHSSLLTSEMWNSQIDYFSNKNKVITFDFCGHGKSDLPKGIYSDYEDLKTILDKNNIRKTIIVGCSYGGSVALDFVSKYPEYVKKLVLITPAINGYKYPIKLTLESIKNFKNVHKVGIEKAVEMFINNKYWNYFVPKENIFKEEFKNIFIGNKIFYFGNYTKKQIVKPVAIKRLSEINNNVLLIGSENDSKFNREVIGILSKNIKGIKIYEIKNSGHLPNIEKSGEINRLIKEFI

SEQ ID NO: 53837 - DNA, 369 bp, Unknown
  Obtained from environmental sample
  misc_feature (1)..(369): n is a, c, g, or t
atgagtgaaaacagtaaaatcaagcaaaaagagactttcacggtttgtcccaataatcaaagtttattggttagcagggaaggaacaataaaagatattaacaccaacgaagtgttggatcaatttttatctgataatggctatttgcagataaaaaatcctatgagacacgataaaaatccaagaaaatttgaatttgtacatcggattgttgccttgacttttgtacccggatattcccatattcgctggatttgccatcataaagacaatgaccgacgtaataattcaccggaaaacctcttatggacttcttctgaaacgcataggaaattacacgggtattattcctttaagatgtcggcgtaa

SEQ ID NO: 53838 - protein, 122 aa, Unknown
  Obtained from environmental sample
  DOMAIN (66)...(116): HNH endonuclease
  misc_feature (1)..(122): Xaa is any amino acid
MSENSKIKQKETFTVCPNNQSLLVSREGTIKDINTNEVLDQFLSDNGYLQIKNPMRHDKNPRKFEFVHRIVALTFVPGYSHIRWICHHKDNDRRNNSPENLLWTSSETHRKLHGYYSFKMSA

SEQ ID NO: 53839 - DNA, 1740 bp, Unknown
  Obtained from environmental sample
  misc_feature (1)..(1740): n is a, c, g, or t
atggcgtatctaaacggtcccaacgcgcgcaacgacaggtatgaacatcccgtcgcaagaaacatagacgggaaagatacctggtatttcaggattatggttcccatcgttaataggcgcaacaacgaagtagtgggaggcgtgggctgtctttgcgttatagacgcaatacagccgacggtggagaataccataaaaaccagggaagatattgccgcggcggtaatttactcaagcaacgggtttattatggggaactatatgccagagcgcgtagggaagcagctgatcgatgtggatactatctacggcgattatatcagggatgccaaccaggccgttgctgacggcaaggagtttacctgctcaagctattcttcggttttgaaatcaaacgtagaaattaccgtggtgcccttcccaatgggcaattccggcaagtcatggagcgtaatgatcgcggctacacagtcgtacattttaagggaagtaaatgagatgaccaagtttacgatcattatcgcggcgatagccattgtaatagcggtggtaattgtatactttgccctcaacagcactaccaagccaatcgtcagggtagcggaaacgctcaaggatatttccgaaggcgaaggcgacttgacgaagacagtcaacgtcaattccaaagacgaggtaggcgacctggccaagtacttcaaccaaacgcttgaaaaaatcaaaaacctggtaattgtcatcaagaaccagggggtaagcctgcagggcataggaagcgcgcttgccagcaacatgaccgaaacagcggcggctataaaccaaatcaccgcgaacatccaaagcataaaaggccgggttattaatcaaagcgccagcgttaccgaaactaacgccaccatggaacaggttattaacaacatcaacaaactcaatggtcatgttgaaaaccaaagtagaaatgtttcccaggcttcgtccgctattgaagaaatggtagccaatatcagctcagttaccaatacgctgatcaacaactccgccaatgttaaaacattacgggaagcgtccgatgtacgaaagaatggattgcaggcagtggcgacggatattcaggaaatatcccgcgaatccgaagggcttttggaaattaactcactaatggaaaacatagccagccagaccaatttgctttcgatgaacgcggcgatagaagcggcgcatgcgggagaatcgcgcaaaggttttgccgtagttgccgatgagatacgcaaactggcggaaagttccaccgcacagtccaaaaccatcggtacggtactgaaaaaaatatcgcaatcaataaagaaaattacagtctccaccgagaacgtgcttaaaaagttcgacgcgatagactcaagtgtcaggacggtgtcagatcaagaagaaaacatccgcaacgctatggaggaacagggagagggaagcaaacaagtactaaacgctcacagcagtttaaaggaaatcaaccagcaggtaaagagcggttccgaggaaatgcttgagggcagcagggaagtgatgaatgaaagccataacctggaaagcgtaacgcaggagatcacgggcggcatgaacgagatggcgaccggagcggagcaggtgaacatagcggtaaaccacgttaatgagataagcgccaaaaatcgcgagagtattgagactttaatgcgggaggtgtcgcggttcaaggtagagtga

SEQ ID NO: 53840 - protein, 579 aa, Unknown
  Obtained from environmental sample
  DOMAIN (170)...(260): Bacterial protein of unknown function (DUF948)
  misc_feature (1)..(579): Xaa is any amino acid
MAYLNGPNARNDRYEHPVARNIDGKDTWYFRIMVPIVNRRNNEVVGGVGCLCVIDAIQPTVENTIKTREDIAAAVIYSSNGFIMGNYMPERVGKQLIDVDTIYGDYIRDANQAVADGKEFTCSSYSSVLKSNVEITVVPFPMGNSGKSWSVMIAATQSYILREVNEMTKFTIIIAAIAIVIAVVIVYFALNSTTKPIVRVAETLKDISEGEGDLTKTVNVNSKDEVGDLAKYFNQTLEKIKNLVIVIKNQGVSLQGIGSALASNMTETAAAINQITANIQSIKGRVINQSASVTETNATMEQVINNINKLNGHVENQSRNVSQASSAIEEMVANISSVTNTLINNSANVKTLREASDVRKNGLQAVATDIQEISRESEGLLEINSLMENIASQTNLLSMNAAIEAAHAGESRKGFAVVADEIRKLAESSTAQSKTIGTVLKKISQSIKKITVSTENVLKKFDAIDSSVRTVSDQEENIRNAMEEQGEGSKQVLNAHSSLKEINQQVKSGSEEMLEGSREVMNESHNLESVTQEITGGMNEMATGAEQVNIAVNHVNEISAKNRESIETLMREVSRFKVE

SEQ ID NO: 53841 - DNA, 1050 bp, Unknown
  Obtained from environmental sample
  misc_feature (1)..(1050): n is a, c, g, or t
atggccgagatagctcatcgaccttgcctttcgctggatatactcagccgggaagactaccagtggattccgttttttacacgagctgttaattccgtaggtctgccgggaatggattacgccgaagtatccagcctgcttgcccgtaccgtgggcggctttaatgtcataacccacacaggttccgcggctggcagcggcagccccattattaaaacacccgcgggaaaattcgacattatcggccgcgactggatcatctaccgccttaaatgcctggacgaaaaaaccgcggcgtctttggatctggctctgcgcctgataagcgaagcggatttttccgatttaaagcgaatccatgaccttgttatggaaatgaaaaacggggcccgctccagccttgcgcctaacggtcatcattatgcgtcatccagggcaaaccgttttgcgtcggcctccttgcagacagatgaaacatggaacggaataacacagtttttatttgttcaccgccttgccgagatggacactgccgaaatagccgccaggttaaataatctgcgcgacgcaatagcctcaggcggccttatcgccaaccttgccggttcagccgatgccctaaaatccaacggcggcttgatcgcccagcggttcaaaaacttcggccctcccaaaaaacgggcggcggttaaaacggcggctgtcaccgtctccggccccgaagtgtttgcctcgccgtcactgcaagtcggatttgccgccatggctctgcaagccgcgaaatttgacacccttgaacaggttgccgaaacagtgcttgcccaccagctttccacaggcgcattgtgggaaaacatccgcatgaaaggcggcgcttacggcgcctccgccgccataacggtcttgatcgctgcttcactttttcaacttaccgcgatcccaatccgctgcgttcgctggatacattttcctcaatactcaaagacagcgccgctaatgccgggggtgtatccaaaggcgatgacgcggcggatgccctggagaagatga

SEQ ID NO: 53842 - protein, 349 aa, Unknown
  Obtained from environmental sample
  DOMAIN (2)...(172): Peptidase M16C associated
  misc_feature (1)..(349): Xaa is any amino acid
MAEIAHRPCLSLDILSREDYQWIPFFTRAVNSVGLPGMDYAEVSSLLARTVGGFNVITHTGSAAGSGSPIIKTPAGKFDIIGRDWIIYRLKCLDEKTAASLDLALRLISEADFSDLKRIHDLVMEMKNGARSSLAPNGHHYASSRANRFASASLQTDETWNGITQFLFVHRLAEMDTAEIAARLNNLRDAIASGGLIANLAGSADALKSNGGLIAQRFKNFGPPKKRAAVKTAAVTVSGPEVFASPSLQVGFAAMALQAAKFDTLEQVAETVLAHQLSTGALWENIRMKGGAYGASAAITVLIAASLFQLTAIPIRCVRWIHFPQYSKTAPLMPGVYPKAMTRRMPWRR

SEQ ID NO: 53843 - DNA, 486 bp, Unknown
  Obtained from environmental sample
  misc_feature (1)..(486): n is a, c, g, or t
gtgggaaaacatccgcatgaaaggcggcgcttacggcgcctccgccgccataacggtcttgatcgctgcttcactttttcaacttaccgcgatcccaatccgctgcgttcgctggatacattttcctcaatactcaaagacagcgccgctaatgccgggggtgtatccaaaggcgatgacgcggcggatgccctggagaagatgatcattggctgttacggaaaagaaacctacccccgcacaccttcggaaaaatccgtcaatgattttctccgtttcctctcccgcattgacgacggctgccgcaggcgaaaattggaaaggctcatcaacatttctgaaaatgatatttccgccgctcttggaggcatcgcatcacagcttgcctcgcaacccgccccaactcgtgttgttattgccggaacaaacagcgcggagcaggcggctaaagcgttgggtgtggaagtgcaactgctgcctgtgtag

SEQ ID NO: 53844 - protein, 161 aa, Unknown
  Obtained from environmental sample
  misc_feature (1)..(161): Xaa is any amino acid
MGKHPHERRRLRRLRRHNGLDRCFTFSTYRDPNPLRSLDTFSSILKDSAANAGGVSKGDDAADALEKMIIGCYGKETYPRTPSEKSVNDFLRFLSRIDDGCRRRKLERLINISENDISAALGGIASQLASQPAPTRVVIAGTNSAEQAAKALGVEVQLLPV

SEQ ID NO: 53845 - DNA, 369 bp, Unknown
  Obtained from environmental sample
  misc_feature (1)..(369): n is a, c, g, or t
ttgcggcgcattcttgcccataaggaggctggaaggaacgaattgaagggcagcgatgtaatcgtcacgggtgtttccaagttttttgacagttttagagcgctcaataatgtgagccttgaaataaaaaaaggagagtttttttccctgctggggccttcaggctgcggcaagacaactcttctgcggattttagccgggtttgaacagcccgacaacggggttgttacttttgacggggaagacgtgcttcccctgccgcccgacaggcggcatgcgaatacggtgtttcagaattacgccctgntcccccatctttccgtctttgagaatgtcgcttttttcatgcgcctggaaaaacgcgcctaa

SEQ ID NO: 53846 - protein, 122 aa, Unknown
  Obtained from environmental sample
  misc_feature (1)..(122): Xaa is any amino acid
MRRILAHKEAGRNELKGSDVIVTGVSKFFDSFRALNNVSLEIKKGEFFSLLGPSGCGKTTLLRILAGFEQPDNGVVTFDGEDVLPLPPDRRHANTVFQNYALXPHLSVFENVAFFMRLEKRA

SEQ ID NO: 53847 - DNA, 942 bp, Unknown
  Obtained from environmental sample
  misc_feature (1)..(942): n is a, c, g, or t
ttgaccaagcatcagatcggccgaggaatgggttttgacggctttgtagtttccgactgggcggccattacgcaattatccggcggcaattacaaggcgcagatcgcaaacgcaattaacgcgggcattgacatggttatggcaactaacgggcgcaacagctggattaattttattaaacatttgatggaactggccgaagaaggaactgttccgatggcgcgtattgatgacgcggtactgcgcatcctccggttcaagcagcgtataggtttgtttgacgcgccattgacaaaagaagccagcgcaatcggcactgacgcaaaccggacggcggcgcgggatcttgttgcacagtcgctggtgttgttacagaacaggaataatgttatcgcgcaattgcctttatataaacgtattctggtagcgggacaaggcgcaaacgacattggtatgcaatgcggcggctggacaattacctggcagggagaccacggtcatatcaccaatggtacaacgattctggaaggcatacaaaacgcggcaaaagacaaagcatccattacctacgccgaagacggaaaaactgatggggcatttgaagcggtaatcgccataatcggagaggacccttatgcggaaacagatggcgaccgtacacaaatcaatattcgtcagagggatatggatatgttgcgggaagtttacggtaaagattgcccggttatcgttatcatgttgtcaggccgccccatgacaataggcgatgaatataaaaagtgggacgcttttatcgcggcatggctgccgggcagcgaaggcggcggcattgcggatgtgctgtttggcagccgcgacttcaccggacggactccctacacctggcgcaaaaccataaacggcgaaattttatttccattcggctatggcctcaccaaatga

SEQ ID NO: 53848 - protein, 313 aa, Unknown
  Obtained from environmental sample
  DOMAIN (121)...(313): Glycosyl hydrolase family 3 C terminal domain
  misc_feature (1)..(313): Xaa is any amino acid
MTKHQIGRGMGFDGFVVSDWAAITQLSGGNYKAQIANAINAGIDMVMATNGRNSWINFIKHLMELAEEGTVPMARIDDAVLRILRFKQRIGLFDAPLTKEASAIGTDANRTAARDLVAQSLVLLQNRNNVIAQLPLYKRILVAGQGANDIGMQCGGWTITWQGDHGHITNGTTILEGIQNAAKDKASITYAEDGKTDGAFEAVIAIIGEDPYAETDGDRTQINIRQRDMDMLREVYGKDCPVIVIMLSGRPMTIGDEYKKWDAFIAAWLPGSEGGGIADVLFGSRDFTGRTPYTWRKTINGEILFPFGYGLTK

SEQ ID NO: 53849 - DNA, 1197 bp, Unknown
  Obtained from environmental sample
  misc_feature (1)..(1197): n is a, c, g, or t
atgccttccggtatttttgcaatattacctgaaaattttttctcccctctggcaaatgtaaaccgggaacattatgcggcgctattggtgttatactaccggctttttcaggaaaatacccgcggacttgagcgagaactggtggttcgggaatttatgaactatctggcccttcaccaagacagtttgaaagaagaagacgaggaacccgccagagaaacagcttttaatcaaaatgaaccgggcgtccaggagttgaattttggcgctgacgaggaaccggatcatttaaacactgacagaaaccacgctattgatgaacgatctttggcaggcaaattcttgcggcggttcatacataccggctggcttgccgaagaaatgcttgcggactttaccaaggtgattaatatcacggcatggggcaagccgtttatgaaagcccttgccgacattgaaggcggccttaaaacagaatacgaaagccatgtcgttacggtctattccatgctctgcggagaaacgataaaaaaagacggccaccacgcggtactcaaggcccatgaggaatgccgctcgctgattgattcgctcaaggttttgtcacaaagcatcaagggctattacgataatctcaacgcggaagcggtacgttccctggcctcatcggtgttacatgagcattacgatctctatatgggggaagtgctggacaaggcgtacaaacggcttaaaacttccgacaatgtttcccgctaccgtcagggcattttcaaacaggtggcggccttgttgaaagacgacaaatggctcgatgaaagcgcgggaaagtatatgcggatacttcaaaccagccgggaggaatgcagaaaaaaacttgcgtccatgctggaagagattcgtgacgatcttaaatctgttgaccctcttgaagatgaaatcgacaggcggaacgcggcctattcccgttccagcacggaaattatcaaagcctacattgagccggatagcaccgtagccggaaagattgggcagctcataaaatcgatttataacggcaatgaaacagttcaatcaagtatcgcccacggcctgtaccgcgtcagattcctttcgccttccagcctgactcttttcaaaagcgggatgagggtaatttttataccgtcgtttcaaaagccgatattgaagcgttag

SEQ ID NO: 53850 - protein, 398 aa, Unknown
  Obtained from environmental sample
  misc_feature (1)..(398): Xaa is any amino acid
MPSGIFAILPENFFSPLANVNREHYAALLVLYYRLFQENTRGLERELVVREFMNYLALHQDSLKEEDEEPARETAFNQNEPGVQELNFGADEEPDHLNTDRNHAIDERSLAGKFLRRFIHTGWLAEEMLADFTKVINITAWGKPFMKALADIEGGLKTEYESHVVTVYSMLCGETIKKDGHHAVLKAHEECRSLIDSLKVLSQSIKGYYDNLNAEAVRSLASSVLHEHYDLYMGEVLDKAYKRLKTSDNVSRYRQGIFKQVAALLKDDKWLDESAGKYMRILQTSREECRKKLASMLEEIRDDLKSVDPLEDEIDRRNAAYSRSSTEIIKAYIEPDSTVAGKIGQLIKSIYNGNETVQSSIAHGLYRVRFLSPSSLTLFKSGMRVIFIPSFQKPILKR

SEQ ID NO: 53851 - DNA, 1428 bp, Unknown
  Obtained from environmental sample
  misc_feature (1)..(1428): n is a, c, g, or t
gtgtatgtggaaatcagcgaagatgagatgagcgctcttgtcaagacaaccgccccgggagaaggcggctgcgatgtttcttatgaggtctatatcgctacgctgaaacaaaacaggatagtccacggaataaaagaagatttcctgaggcattttgtggatcagcccgtatacaacgaaaatgttgtgatcgcggaaggaaccgcttctgaagacggcaaggatgcctatatacagtataattttgaaactgatgagcgcaaggtaaggctaagggaaggaagcgacggaaagatagatttcaaagaacttaacattatccagaatgtggtagaaaaccagcccgtggcgataaagaagcctccgacaaaaggcactccgggatggacggtaaccggaaaaatgcttgacgcgaaggatggcagggaaatcagcctgcctgtcggaaccaatgtccatgtatcggaagacggcgccactatccttgcgaccataaacgggcaggttgtgatgagcaacggccttatcaatgtcgagcctgtttatacggttgacaacggagtgaatctgaaatcggggaatatcgatttccgcggaaccgtaatggttaacggcgatgtcgaagacgggttcttcattaaagctgacggcaatatcgaggttaacggaagcgttggcaaggcggatctggacgcgcagggcgacattatcatccaccagggtataaacggaaaaggggaaggccgcatacatgcagggaaatccctttgggcgcgttttatacagaatgccaatatccagtcgggatgcatggtggttgcttcagacggaattatcaactcaaatattgttgccgatgaacggataatatgccaggggaaacgggcggctataatgggaggaaagctgcgagccggcgaggagataaacgccaaaacacttgggaaccccacaagcggcacggaaacagtctgcgaagtcggttttgatccaaagagcaaagaagaaatggacagactccagatggagaaggataacgaggttaagatacttgatgatattaagcgggatatacagacccttacaaatctcaagcagcagaagaaaacccttcctgaggacaaagaaaccctcttgcaggatttgcttaccaaacgaaaccagctgacaatcgacctgaagaaacttgatgaagcgatgaggaagcttcaggaatatctcaacagtctgaaagcccgcggcagggtatcggcttcacaaaaggtatacccgggagtaaaaataattatccgcgatgccaaggaagagctgcatgccgaacataaagccgcaacctttatcctggaggctgggattatcagggcgataaaatacgaagagccggatgctcgatcgaagaaggggccggatggctatacaaccaattga

SEQ ID NO: 53852 - protein, 475 aa, Unknown
  Obtained from environmental sample
  DOMAIN (1)...(458): Protein of unknown function (DUF342)
  misc_feature (1)..(475): Xaa is any amino acid
MYVEISEDEMSALVKTTAPGEGGCDVSYEVYIATLKQNRIVHGIKEDFLRHFVDQPVYNENVVIAEGTASEDGKDAYIQYNFETDERKVRLREGSDGKIDFKELNIIQNVVENQPVAIKKPPTKGTPGWTVTGKMLDAKDGREISLPVGTNVHVSEDGATILATINGQVVMSNGLINVEPVYTVDNGVNLKSGNIDFRGTVMVNGDVEDGFFIKADGNIEVNGSVGKADLDAQGDIIIHQGINGKGEGRIHAGKSLWARFIQNANIQSGCMVVASDGIINSNIVADERIICQGKRAAIMGGKLRAGEEINAKTLGNPTSGTETVCEVGFDPKSKEEMDRLQMEKDNEVKILDDIKRDIQTLTNLKQQKKTLPEDKETLLQDLLTKRNQLTIDLKKLDEAMRKLQEYLNSLKARGRVSASQKVYPGVKIIIRDAKEELHAEHKAATFILEAGIIRAIKYEEPDARSKKGPDGYTTN

SEQ ID NO: 53853 - DNA, 357 bp, Unknown
  Obtained from environmental sample
  misc_feature (1)..(357): n is a, c, g, or t
atgctcgatcgaagaaggggccggatggctatacaaccaattgatctccaaaccctgtttacccagcttgacaaggtagcaaaaacacagagcagccagcgcgaaggcgcggcaatgcacgaggctattcagggcgtgcagcttcagcgcaggacggatgatcaaataaaagcggtaaaccaggcgcagaatatgggcgaagacggcgccgagaaagttaaagacaggggagcgcaggcgcacaacggcaatggcaaaggcaagaaacaagaagacgagaaacctcagcaggaggaagcaaaggcggcagttattcatgacccaagcttgggcaggaatatcgacataagcctgtag

SEQ ID NO: 53854 - protein, 118 aa, Unknown
  Obtained from environmental sample
  misc_feature (1)..(118): Xaa is any amino acid
MLDRRRGRMAIQPIDLQTLFTQLDKVAKTQSSQREGAAMHEAIQGVQLQRRTDDQIKAVNQAQNMGEDGAEKVKDRGAQAHNGNGKGKKQEDEKPQQEEAKAAVIHDPSLGRNIDISL

SEQ ID NO: 53855 - DNA, 363 bp, Unknown
  Obtained from environmental sample
  misc_feature (1)..(363): n is a, c, g, or t
atgaacgggttgaaactgccgtcttattggcggcaaaaaaaaggagtgaagtatatggtacagcctaagcaccacatttttgtctgcacaagctgccgcattaacggcgtgcaaaaaggattctgtttccagaaaggaagcgtggatttggtacagaaatttatggaagagattgaggacaaggatctttcctcagactgcctggtaacaaacaccggctgtttcggcgtctgcgacaaagggcctatcgccgttgtataccccgaaggagtgtggtacggcaatctggatgctgacgcggtagaagaaatctgcgaaaaacatcttgagggcggaacacccgtagataagtacaagatataa

SEQ ID NO: 53856 - protein, 120 aa, Unknown
  Obtained from environmental sample
  misc_feature (1)..(120): Xaa is any amino acid
MNGLKLPSYWRQKKGVKYMVQPKHHIFVCTSCRINGVQKGFCFQKGSVDLVQKFMEEIEDKDLSSDCLVTNTGCFGVCDKGPIAVVYPEGVWYGNLDADAVEEICEKHLEGGTPVDKYKI

SEQ ID NO: 53857 - DNA, 2013 bp, Unknown
  Obtained from environmental sample
  misc_feature (1)..(2013): n is a, c, g, or t
ttggacggcgtaacagagaacccgtacaacagattgaaaatgggcggaacgccgctgtccgatgtttcaaaaacggcgggcgcaaaattgacaatcgaattttcagaatacacaaacgccgataattcccccgccgaatatntgcgtaaagaatacggcgtgccttttgtgaaactgcctctgcctgtcggtgtccgagcggtggatacgcttataaatactctgaaaactttaggcggcgttgttacccaaaatattttgaaagaacgagggcggtatttggacgcaatggttgattctcataaatactgcagtgaagcgagggcggttgtattcggcgagcctgattttgttacggctgttgtgcgcctgtgctgtgaaaacggaattttacccgtggttgccgcaacagcgtcggtttcggataaattaaaagaaacgcttatcgccgaaacaaaggacacccgtgaatttaattttgggcaggagatttccatagtagacgacagcgactttttggaaattgaaaaactttgtgcggacagaaacgctaatctgcttatcggctcgtcagacgcaaggcgtatcagccacaaattgcatattccgcttataagatgcgcttttcccatacatgactttgtcggcggtcagcgtgtgcgtgtgttgggctttgaaggctcgcttaatctgcttgaccaagccgcaaacgccatgattaataaaaccgaaacaagtttccgaggcgatttgtatcagcagtttttcaaaaataaagatgagcgttcgcaaatatccgttgccgatcaaacggcggcgcatccttgcttcggcaaacacgcttgcagtaacgcccgtgttcatttgcctgtcgctcccgaatgtaacatacagtgcaactattgtctgcgcagtttcgactgcatgaatgaaagcagaccgggtgtgtcgtcaaagatacttgcgccgcatgaagcgtttgatcgatataaaatattaaaacaaaccttgaccaatttaacggtggcgggaatagcgggaccgggcgacgctttggcgaattttgaggaaacctgcgagactctccgccttattcgagagtacgatccaaacgttacattttgcatcgctacaaacggacttatgctgccgcagtatgtcggcgaattaaaggcgctcggcgtaagccatgttacggtaacggtaaacgccgttgatcccaaaatcggcgcaaagatttacaagcatattcattttatgggcgaaacttttacgggaatagaaggggcgtcaatcttgatcgccaaccagcttgccggaattaaaatgctgaaagacaacggtattgtctgcaaggtgaattgcgtaacattgaaaggtattaacgacagccacatttatgatgttacaaaaaaggcggcggagcttggagcgtttataacaaatattatgccgcatatccccgttaaaggttccgctttcgaggaacttgagcgaatgaccaacaaagaaattgaagctttgcgtacacagtgcggagcgaatattaaacagatgactcattgcaaacaatgccggtccgatgccgccggaacgctgacagaagatatatcgcttgattttagggagacagcgcctatggctacagaaaaaacagaaacacgcagatttgccgtggcaagtaaaaccggcgcgattgtagatctgcatttcggtcatgcgcaggaattttatatttacgagagcgacggcgagcaggttaaatttatcgaaaagcgcggcgtgcttaattattgtaatggtcccggccgtgaagacgacaaagaggacagatgggaatcggttataaacgctctaggcgattgcgcggcggtgctggcgctcagaaccggcatgacgccggaaaaaagactgaaagaaaacggaattgacgtaataacaacctatgaacgggttgaaactgccgtcttattggcggcaaaaaaaaggagtgaagtatatggtacagcctaa

SEQ ID NO: 53858 - protein, 670 aa, Unknown
  Obtained from environmental sample
  DOMAIN (289)...(473): Radical SAM superfamily
  misc_feature (1)..(670): Xaa is any amino acid
MDGVTENPYNRLKMGGTPLSDVSKTAGAKLTIEFSEYTNADNSPAEYXRKEYGVPFVKLPLPVGVRAVDTLINTLKTLGGVVTQNILKERGRYLDAMVDSHKYCSEARAVVFGEPDFVTAVVRLCCENGILPVVAATASVSDKLKETLIAETKDTREFNFGQEISIVDDSDFLEIEKLCADRNANLLIGSSDARRISHKLHIPLIRCAFPIHDFVGGQRVRVLGFEGSLNLLDQAANAMINKTETSFRGDLYQQFFKNKDERSQISVADQTAAHPCFGKHACSNARVHLPVAPECNIQCNYCLRSFDCMNESRPGVSSKILAPHEAFDRYKILKQTLTNLTVAGIAGPGDALANFEETCETLRLIREYDPNVTFCIATNGLMLPQYVGELKALGVSHVTVTVNAVDPKIGAKIYKHIHFMGETFTGIEGASILIANQLAGIKMLKDNGIVCKVNCVTLKGINDSHIYDVTKKAAELGAFITNIMPHIPVKGSAFEELERMTNKEIEALRTQCGANIKQMTHCKQCRSDAAGTLTEDISLDFRETAPMATEKTETRRFAVASKTGAIVDLHFGHAQEFYIYESDGEQVKFIEKRGVLNYCNGPGREDDKEDRWESVINALGDCAAVLALRTGMTPEKRLKENGIDVITTYERVETAVLLAAKKRSEVYGTA

SEQ ID NO: 53859 - DNA, 336 bp, Unknown
  Obtained from environmental sample
  misc_feature (1)..(336): n is a, c, g, or t
gtgccggaaaaagcgccgctggagcaaagaaggccgcgtgtttttacgattgatctgcaggctccgttcggcggagaagattccgccctttttcagattataagcgactcctttataaaccgtgattgggaaaaagcgcgtacggatttactgcattatctttcattgccgcgttcaaaagacgtagaagcgcgcgcccgtttctatcttggacaaactctttacttttccggttattacaggggagcgttatttgaatttttggctataaagtcgtttcaccctgtagaagcgaatatgtggatagactctacgttatcggctatggtgcattag

SEQ ID NO: 53860 - protein, 111 aa, Unknown
  Obtained from environmental sample
  misc_feature (1)..(111): Xaa is any amino acid
MPEKAPLEQRRPRVFTIDLQAPFGGEDSALFQIISDSFINRDWEKARTDLLHYLSLPRSKDVEARARFYLGQTLYFSGYYRGALFEFLAIKSFHPVEANMWIDSTLSAMVH

SEQ ID NO: 53861 - DNA, 570 bp, Unknown
  Obtained from environmental sample
  misc_feature (1)..(570): n is a, c, g, or t
gtgttgataaataccatattcaggagaaaatgtgaaaggaatgatattatgaataaagagattaataatatacaaaaaatgatttacgagattcgaggacaaaaagtcatgtttgacaatgatctttccgcattgtatcatgtggaaaccaagtaccttaacagaacagtaaaaaggcatattaagcgtttcccgccggatttcatgtttcaacttaccgataaagaatgggaaatcttgaggtgccattttggcacctcaagttggggtggttcaagatatttaccctatgtgtttactgaacaaggtatagcaatgctttcagggcttctgaacagcgatattgccattaatgttaacatacagataatgcgggcatttgttcaattaaggcattatgttattactagaacagatataaatgggcaaatcgatgaacttcgtaaattattattgctctacatggaaaataacgataatcgcgtgaacgaaataatcgccgctctgaataaccttataacaaaaccgccggaaacaaaaagaataggttttaccgctaatgcaccatag

SEQ ID NO: 53862 - protein, 189 aa, Unknown
  Obtained from environmental sample
  misc_feature (1)..(189): Xaa is any amino acid
MLINTIFRRKCERNDIMNKEINNIQKMIYEIRGQKVMFDNDLSALYHVETKYLNRTVKRHIKRFPPDFMFQLTDKEWEILRCHFGTSSWGGSRYLPYVFTEQGIAMLSGLLNSDIAINVNIQIMRAFVQLRHYVITRTDINGQIDELRKLLLLYMENNDNRVNEIIAALNNLITKPPETKRIGFTANAP

SEQ ID NO: 53863 - DNA, 1044 bp, Unknown
  Obtained from environmental sample
  misc_feature (1)..(1044): n is a, c, g, or t
ttgtaccaaaaaaatattcccatttccgaatatgtgattctctcgtacataaaagacgcgtttttccgcaatgaaaaaacaattgaggaagtaattaaccgcatcattccccctgtagtgcctgttgaggaaatagagtgggattattttgccgattatctttccgacagaatggatgattttcaaaaaagttattcgctgtttttggatcgcgcgatagggcccataagacagcgcgtcgcggaattgcacacggcggttattgatctttcaacaaggcttcaaaaaggcgaaattgaggctgcatggctgccgcggcacacgtttatcgtgctttcgcagattcaggggcatgccgccgccctgcttgaagatcttgtttttgacgactcgccccttgaatcggacattgtcgcgatggacaattcattggacaacatggtggaaacttacggcgatataaaggaactaatcaataacgcgatggataacttcagaaggagcaaccttacggttattcacggcggcagtaagaccggccccttgttcaggatgatacagatcagtataagcgggcttgatgtctggcggcgggcgataattacccatgaatacacaatggcgcagcttcacaatttaattcaagtcagcatgggctggaaaagacagcttgattatcatttttactgcgaaacatcggaaggcggcaaagattatctgcgcgatacgataaagttaggtgacattgattttcacggtaaaaaggaaattatttatgagtacgggacaaagtggcttatcaggataatgatcatgtcctcgtatcagccggcaaacaacgaagccgcccgttttgtcgccggagacggcgccgccccccctgagcatttggacggcccccgccactttaacaaactggtttactaccttgaaacgggcggccatgccgaaaagcaagacgctcaagaagagttgggtcctgattttgtccccggtcaatttgatttggatcagttgaaccggaatttgcaagccgcgttataa

SEQ ID NO: 53864 - protein, 347 aa, Unknown
  Obtained from environmental sample
  DOMAIN (179)...(340): Plasmid pRiA4b ORF-3-like protein
  misc_feature (1)..(347): Xaa is any amino acid
MYQKNIPISEYVILSYIKDAFFRNEKTIEEVINRIIPPVVPVEEIEWDYFADYLSDRMDDFQKSYSLFLDRAIGPIRQRVAELHTAVIDLSTRLQKGEIEAAWLPRHTFIVLSQIQGHAAALLEDLVFDDSPLESDIVAMDNSLDNMVETYGDIKELINNAMDNFRRSNLTVIHGGSKTGPLFRMIQISISGLDVWRRAIITHEYTMAQLHNLIQVSMGWKRQLDYHFYCETSEGGKDYLRDTIKLGDIDFHGKKEIIYEYGTKWLIRIMIMSSYQPANNEAARFVAGDGAAPPEHLDGPRHFNKLVYYLETGGHAEKQDAQEELGPDFVPGQFDLDQLNRNLQAAL

SEQ ID NO: 53865 - DNA, 1464 bp, Unknown
  Obtained from environmental sample
  misc_feature (1)..(1464): n is a, c, g, or t
atgatcagatcngccgagatgcgcgttgcggtattgcagccgtcaggcagtaaaattcctgagcaggaacaatggcttttgcggcttgtacaaagcacaatcacgggagactttaataaatacaccgccatgacagttattgaccgtcaaaatctggatacgattctgggagagcagaaatcgtcgctttcaggtaattattcggaaaaggattatatcagcataggaaaactgacaaacgcccgctatattctcgcgggaactctaaccaaaacaggcggcggctttatgcttgaattgtccgtctcagatacagaaacaggagtgcgcaaggcgtcgttttctcccaaaaactgtacccttgacgaattacaaagcacttcaattataaaacaagccgaagaagaactgcttagtcagatgggcataactcttactgccgccgggaaacagtcgttaagggacagcgtttccgccgtgccgcaggcggcgtccggcgccgatacatccgcggcggttactacggaaaagggagaacgcctttcctttattgattatctttcaaaaaccgccgacagtttgtatgcgttaggtgatattcaggacgcgctttggtattacagatgccttacctactattaccccggctattacaaaggctggctgggcatagtccgctgtttttccaaaaactataccaattttgattttgtagacagtgaaatatatatggaaagagcttccataaccgcggcgggaaacgccgaanagcaggaagtgcagaaagtccgcgcggcgttcgacaagcaatggccgtccatagccgttaagcgcgaacagcgcgcggttgaagaagcaaagcggcggcaggataatttttaccgcatgactttcaaacagcagaacggcgtgtntaacgagtataccggctncagcgaaagagttattatcccgccggaaattaccgttatcggtcaggccgctttccggcaaaacggcagggtaaaacgggtggtgcttcacaataaagttaccgccatagaaaaggaagctttcgcaaattgcacaggccttgttgaagtcataatccccgcaagcgttaaaagtataggcgcaaacgcgttttataattgtttcgcccttacagacattattattcccgctaacattacgattattccggataacgccttttcgggctgcaagaacctgaaaaacgtaactatagcgaacggcgtacagcggattgataaagcgtttgtaagctgtgaaagccttaccgcgataatcattccccgcaccgtaacagccatcggcgactttgcgttctcccaatgcaaaaacctgaaaaccgttactttgctgaatgacaaggtgaccataggcaaacgcgcgtttatggcatgtccgcttaccaacaaggatgagatgatcaagcgctttggggcggcgatttttaattga

SEQ ID NO: 53866 - protein, 487 aa, Unknown
  Obtained from environmental sample
  misc_feature (1)..(487): Xaa is any amino acid
MIRSAEMRVAVLQPSGSKIPEQEQWLLRLVQSTITGDFNKYTAMTVIDRQNLDTILGEQKSSLSGNYSEKDYISIGKLTNARYILAGTLTKTGGGFMLELSVSDTETGVRKASFSPKNCTLDELQSTSIIKQAEEELLSQMGITLTAAGKQSLRDSVSAVPQAASGADTSAAVTTEKGERLSFIDYLSKTADSLYALGDIQDALWYYRCLTYYYPGYYKGWLGIVRCFSKNYTNFDFVDSEIYMERASITAAGNAEXQEVQKVRAAFDKQWPSIAVKREQRAVEEAKRRQDNFYRMTFKQQNGVXNEYTGXSERVIIPPEITVIGQAAFRQNGRVKRVVLHNKVTAIEKEAFANCTGLVEVIIPASVKSIGANAFYNCFALTDIIIPANITIIPDNAFSGCKNLKNVTIANGVQRIDKAFVSCESLTAIIIPRTVTAIGDFAFSQCKNLKTVTLLNDKVTIGKRAFMACPLTNKDEMIKRFGAAIFN

SEQ ID NO: 53867 - DNA, 1116 bp, Unknown
  Obtained from environmental sample
  misc_feature (1)..(1116): n is a, c, g, or t
atgaactttcaatactgggagccggaaattgagaagatgccacgcgctgagcttgccgcgttgcagttgcaaaaactgaaagaggaaatcggctttagtttgcgcacgccgatttataagaaacgccttgccacagtgagcattcaaagtccggacgacatcaagaccctggatgacctaaagcgcgttccttttatcacaaaaaatgatctcagggatggcttcccctatggctttttaagcataccgagagaggaagtgataaggctgcacgcttctagcggcactacgggcatccccacgacgatttattttacaagagatgacattaaacaatggtcgaattatatggccagatgcatttatgggacgggctgtaccgaaaacgacgtattccaaaacatgataacctacggccttttcacggggggactcggcctgcatcagggcggtgaagaagtagggatgcttgttataccggccggagcgggaaacaccgcccgacagtttagaatgatgcaggattatgggacgaccgtggttcacgcgacgccaagttttcttctgcaccttgaaacaaagatgaaagaagcgggagtttcacgggaaagcctcttcttaaaacgcgcttttgcgggagccgagccttattccgaagacacgcggcggcgcattgaagccttattaaaaattgacgtttataattcttacggactttcagaaatgaacggaccgggagtcgcttttgaatgtcagtgcaaggacgggcttcatatctgggaagacggatacatcactgaaattgtaaatcctgatactcttgaacctgtcaaagaaggtgagattggagagcttgtccttacaatcctatgccgtgaagccactcccattctgcgttaccgcacaagagaccttacttctttttatactgagccgtgcaagtgcggaagaacacaccgcagactccaccgcataactgggcgtagtgacgatatgcttatcattaacggagtaaacgtcttcccaagccagattgaggaagtgattatgggcatgaaggaagtgggcaacaattaccttatcgtcgtgaaaaagaaggcgcccttgaccgcctga

SEQ ID NO: 53868 - protein, 371 aa, Unknown
  Obtained from environmental sample
  DOMAIN (15)...(360): AMP-binding enzyme
  misc_feature (1)..(371): Xaa is any amino acid
MNFQYWEPEIEKMPRAELAALQLQKLKEEIGFSLRTPIYKKRLATVSIQSPDDIKTLDDLKRVPFITKNDLRDGFPYGFLSIPREEVIRLHASSGTTGIPTTIYFTRDDIKQWSNYMARCIYGTGCTENDVFQNMITYGLFTGGLGLHQGGEEVGMLVIPAGAGNTARQFRMMQDYGTTVVHATPSFLLHLETKMKEAGVSRESLFLKRAFAGAEPYSEDTRRRIEALLKIDVYNSYGLSEMNGPGVAFECQCKDGLHIWEDGYITEIVNPDTLEPVKEGEIGELVLTILCREATPILRYRTRDLTSFYTEPCKCGRTHRRLHRITGRSDDMLIINGVNVFPSQIEEVIMGMKEVGNNYLIVVKKKAPLTA

SEQ ID NO: 53869 - DNA, 420 bp, Unknown
  Obtained from environmental sample
  misc_feature (1)..(420): n is a, c, g, or t
atggccggcggccgagaccttgcgtcccgcattgaaggggcgaacaaacattaccaaaccggcggcatattgataagcgaatacaccaagtcaagaatcggcgatgaatttttgctgcgccgtattgaccgtgtacgggtggtgggaataaacacgcctctgcgcctttatgaactgttatcggcaaataacgaacagacagcgacagataacgagcgcagagccgtggaaatttgggagaaggcgattgatttgtatgaacaaagcaagtttaaggaggctttagccctgtttacttccctgatagaaaatcacccgaatgacaacgtagccaaattttacgcgcttaggtgtgaggtgtttatgaaaactcccccgccgcaggattgggacgcggtgaaaaatatgacggagaagtga

SEQ ID NO: 53870 - protein, 139 aa, Unknown
  Obtained from environmental sample
  misc_feature (1)..(139): Xaa is any amino acid
MAGGRDLASRIEGANKHYQTGGILISEYTKSRIGDEFLLRRIDRVRVVGINTPLRLYELLSANNEQTATDNERRAVEIWEKAIDLYEQSKFKEALALFTSLIENHPNDNVAKFYALRCEVFMKTPPPQDWDAVKNMTEK

SEQ ID NO: 53871 - DNA, 1257 bp, Unknown
  Obtained from environmental sample
  misc_feature (1)..(1257): n is a, c, g, or t
gtgaccctgcggcctgtcccgaacagaaaccccttgatggaggcgaccacatgcacatcctccggctccctgctgtccaaaagattggggaattacatacttgaggcagtttcaaaacccccagggcagagggcgcgggatcgaacaaagaggccggagggcgcaccattctttagggttggacgacccgaaaagaaaggagcggtcatgcaagcgcccttcagcctctgggacagtataaggcagtggctgatcccccacatagagggggcgctcgaccccctcagcgagaaggaggccgagttcgtccgcgccgccgagctcgcggggatcgagcggttcgtgaagtgccacatgtggcggggcaacgggcgcaggccgcaccacaggaagtccatcgcgccggcgttcatcgccaaggcggtgtggaacctgccgacgacgcgggccctgctggacttcctccgggcgtccaggaccgtcaggaccctgtgcggccgggggcgggcggaggacgcgccgtcgaaggtcacgttctcgcgggcgttcgccgcgttcgcagccgacaggctccccgggcgcgtccacggggcgatggtggaggccgccatggggggcggcgtggtcgggcacatgggcgtggactcgaccgcagtcgaggcgagggagcggccggcgaagggcaaaggaaagggaaagggcaaagacaaggccccgaagcgcctggaagtgcagcccgcgcggtctccggaggagagcctcgctgacctgcccaggcgctgcgacaggggcgccaagcgcaacagcagggggaacgtggcgacgtgggcgggccacangctgcacctcgccgtggcggacggcggcgtgccgatgtgcgcggcgctcacgtccgcgtccacgcacgactcgcaggccgccataccgctcgtgaagatgggcgcggaaagggcggcggtcctgtacgtcctggccgactcggcatacgacgcggaggcgatcagggggtacgtccgctccatgggccaggtcccgataatagagccgaacaggcgcaacggcggcacacgccggcttgacccggcggagagggcccgctacggggagcgcaccacggtggagagggtcaacgcgtggctcaaggacacctacgggggcaggttcgtgagggtgcgcggcgcggcgaaggtgatggcgcacctgatgttcggggtcgtcgcgctgacggcggcgcggctgttcgccctgacggggtga

SEQ ID NO: 53872 - protein, 418 aa, Unknown
  Obtained from environmental sample
  DOMAIN (211)...(410): Transposase DDE domain
  misc_feature (1)..(418): Xaa is any amino acid
MTLRPVPNRNPLMEATTCTSSGSLLSKRLGNYILEAVSKPPGQRARDRTKRPEGAPFFRVGRPEKKGAVMQAPFSLWDSIRQWLIPHIEGALDPLSEKEAEFVRAAELAGIERFVKCHMWRGNGRRPHHRKSIAPAFIAKAVWNLPTTRALLDFLRASRTVRTLCGRGRAEDAPSKVTFSRAFAAFAADRLPGRVHGAMVEAAMGGGVVGHMGVDSTAVEARERPAKGKGKGKGKDKAPKRLEVQPARSPEESLADLPRRCDRGAKRNSRGNVATWAGHXLHLAVADGGVPMCAALTSASTHDSQAAIPLVKMGAERAAVLYVLADSAYDAEAIRGYVRSMGQVPIIEPNRRNGGTRRLDPAERARYGERTTVERVNAWLKDTYGGRFVRVRGAAKVMAHLMFGVVALTAARLFALTG

SEQ ID NO: 53873 - DNA, 522 bp, Unknown
  Obtained from environmental sample
  misc_feature (1)..(522): n is a, c, g, or t
gtggctgatcccccacatagagggggcgctcgaccccctcagcgagaaggaggccgagttcgtccgcgccgccgagctcgcggggatcgagcggttcgtgaagtgccacatgtggcggggcaacgggcgcaggccgcaccacaggaagtccatcgcgccggcgttcatcgccaaggcggtgtggaacctgccgacgacgcgggccctgctggacttcctccgggcgtccaggaccgtcaggaccctgtgcggccgggggcgggcggaggacgcgccgtcgaaggtcacgttctcgcgggcgttcgccgcgttcgcagccgacaggctccccgggcgcgtccacggggcgatggtggaggccgccatggggggcggcgtggtcgggcacatgggcgtggactcgaccgcagtcgaggcgagggagcggccggcgaagggcaaaggaaagggaaagggcaaagacaaggccccgaagcgcctggaagtgcagcccgcgcggtctccggaggagagcctcgctga

SEQ ID NO: 53874 - protein, 173 aa, Unknown
  Obtained from environmental sample
  misc_feature (1)..(173): Xaa is any amino acid
MADPPHRGGARPPQREGGRVRPRRRARGDRAVREVPHVAGQRAQAAPQEVHRAGVHRQGGVEPADDAGPAGLPPGVQDRQDPVRPGAGGGRAVEGHVLAGVRRVRSRQAPRARPRGDGGGRHGGRRGRAHGRGLDRSRGEGAAGEGQRKGKGQRQGPEAPGSAARAVSGGEPR

SEQ ID NO: 53875 - DNA, 687 bp, Unknown
  Obtained from environmental sample
  misc_feature (1)..(687): n is a, c, g, or t
atggccgagtgtttttcatccgggggcagggatgtttctttaaaattcaggagaaatcggcaagataattttgagcttttttctgcggttatagacacaagaccttatactctccattcggataccgaacttgtgttattggcgattagttcaaatataatcgcgggacagaatgaagtacaggcatacgcgcaagccggcagaagcggatttgtagagggaaggggttctttgggtaaaaaccagataatagcgtatataaaaaggcaaaatacttcggtaaataacaatctcttaaataaacttattgatacatacattgaagaagcggcttttgaaaatattaaccatgacattgctattgcgcaaatgttatacgccactaattttttaaaaaatcagcgcgtatcgtcgcataactacggaggattaatagagcttccaagctggaacggcaaattcgcgaatatgacagagggagtaagggcgcacatacagcacataaaaggttacgcaagtacaaccatgaacaacagacaaatagttgatcctcgctattatttactggttaatttaaaatacttgggaacggtaaagacatttgatcagctatatgtaagatgggcggcgaaccccgctggttacaaacaaaacattgaaaaaatccttgacgggctttatagatag

SEQ ID NO: 53876 - protein, 228 aa, Unknown
  Obtained from environmental sample
  misc_feature (1)..(228): Xaa is any amino acid
MAECFSSGGRDVSLKFRRNRQDNFELFSAVIDTRPYTLHSDTELVLLAISSNIIAGQNEVQAYAQAGRSGFVEGRGSLGKNQIIAYIKRQNTSVNNNLLNKLIDTYIEEAAFENINHDIAIAQMLYATNFLKNQRVSSHNYGGLIELPSWNGKFANMTEGVRAHIQHIKGYASTTMNNRQIVDPRYYLLVNLKYLGTVKTFDQLYVRWAANPAGYKQNIEKILDGLYR

SEQ ID NO: 53877 - DNA, 468 bp, Unknown
  Obtained from environmental sample
  misc_feature (1)..(468): n is a, c, g, or t
atgaacacttccgaaattgaatcagccgcaatgtctgagcttcgccgtatatttacccctgaatttttaaacagaattgatgaaatcgtagtctttaatccgcttacgcaaaaacaaattaattcaatttttgacattgaatttaaagagctttcctcccgccttgccgagcagaattacagcatagagataacacccgccgcaaaacgcgttcttgtagaaaaaggctgggaccccaaattcggcggaagaccgttacgccgcacaattcaaaaagaacttgaagcgccgttgtctcagcttatgttggaagaaaactgggaagccgggacagtcttcattgcgggcgtgaaaaacgggaagattaagataaccgcgaaccacacgaagagagaagagatcaaccacgaaccacacgaacactcacgaaccaagagagatttgagcttaccactgataaatgcgtag

SEQ ID NO: 53878 - protein, 155 aa, Unknown
  Obtained from environmental sample
  misc_feature (1)..(155): Xaa is any amino acid
MNTSEIESAAMSELRRIFTPEFLNRIDEIVVFNPLTQKQINSIFDIEFKELSSRLAEQNYSIEITPAAKRVLVEKGWDPKFGGRPLRRTIQKELEAPLSQLMLEENWEAGTVFIAGVKNGKIKITANHTKREEINHEPHEHSRTKRDLSLPLINA

SEQ ID NO: 53879 - DNA, 1041 bp, Unknown
  Obtained from environmental sample
  misc_feature (1)..(1041): n is a, c, g, or t
gtgaatcggaaaaatgccccggactatcgtccgctaatgcttgttctgctcgttttttgcggtgcttcattgctccctgcggcagaggcggggattgatttcagcatccgttattttgacaagcgggtatattaccttgaacaagatccgatttttattcaggttacgataacaaacaacagccctttcacatacaggttcaaattggcggatgagcgggctttttcagtggattttgacgtcaggacaaacagcaaccgcattgtggaagcggcggatattctggttcgcaagcggagccagagccagcaggtttatttcagagaagtatccatagagccgggggaatctttttcatttgtcgaggatctgaagaattacgccaccctgacccaaagcggcagttatgtggttcaggcgaagatatacccggagctttaccatactgtcaggtctgaggccttcggcttatggtcttacggggccggcggtataaatccgggcgtaaccctggcgggcattggcatcccactggaatccaaccgccttgcgcttaacataaggccggctcttatcccaggcccggacggtatcccccttgaactggacgtggaaaccaacgcgattttagtccgcgagaaactccctcccgacgaggttattcgttatatgctgacagccaggcagaaaagccagtgggaaaaattcttcctttaccttgacctggaagccatgctttcccgcgacgcgtaccgcaggcggcagtacattgccgaatccgaagaaggccgccaaaggatgatcgcccgttaccggcaggatttgcaaaattccgtgatagacggtgatatttcgcttattccaatgaatttcatcattgagcgcactacccacaacgggcagacagggacggtaaccgtgctggaatatttcaggattggagattatacggagaaaaagcgctacacctggtacctggaaaaaagagatgatatatggacgattgtcgattattcggttgttaatttaggaaccgaatag

SEQ ID NO: 53880 - protein, 346 aa, Unknown
  Obtained from environmental sample
  SIGNAL (1)...(27)
  misc_feature (1)..(346): Xaa is any amino acid
MNRKNAPDYRPLMLVLLVFCGASLLPAAEAGIDFSIRYFDKRVYYLEQDPIFIQVTITNNSPFTYRFKLADERAFSVDFDVRTNSNRIVEAADILVRKRSQSQQVYFREVSIEPGESFSFVEDLKNYATLTQSGSYVVQAKIYPELYHTVRSEAFGLWSYGAGGINPGVTLAGIGIPLESNRLALNIRPALIPGPDGIPLELDVETNAILVREKLPPDEVIRYMLTARQKSQWEKFFLYLDLEAMLSRDAYRRRQYIAESEEGRQRMIARYRQDLQNSVIDGDISLIPMNFIIERTTHNGQTGTVTVLEYFRIGDYTEKKRYTWYLEKRDDIWTIVDYSVVNLGTE

SEQ ID NO: 53881 - DNA, 723 bp, Unknown
  Obtained from environmental sample
  misc_feature (1)..(723): n is a, c, g, or t
atggcaaaagaagccacagcagccacgggtatgactgtaaagcaggagcaaacagctatccctgtcgaagtggaattcagaaatgtaaaagcgttgcggctaacggtttacccgccggacggcagggtcaggattatagctcctttcggagcgaaccgcgaagaaataagaaagtttgctgcttccaaaattgcctggatccaaaaacagcgggcaaaatttataaatcattcaaaactgacagcttcactaaaaaaccatgccaccgtgtatgtttggggagatccgtgggaactggaaataattgaacgtaggggaaatcccaaaattgttttggaaggcgtaatcatgaaaatgtatgtccgcccgggttccacaaaggcaaaaaggcaggagcttcttgacaaatggtatagcaaaatactgaaagacacagctcttctgctcattgaagaatgggaagggcgaataggagtagaagtaaaaaaactttttgtaagaaaaatgaaaacgtgctgggggagctgtaacagcacaaggcagacattaaggcttaattccgaactggcaaaaataaagcgcgaatgtcttgaatacgtgattgttcacgaaatgctccacattattgaaaaaagccacaaccgcaaattttacagccttctgaacaagtatttgcccgcatggaaaataattcgcaagaagatgaataccggggagttataa

SEQ ID NO: 53882 - protein, 240 aa, Unknown
  Obtained from environmental sample
  DOMAIN (32)...(238): Protein of unknown function DUF45
  misc_feature (1)..(240): Xaa is any amino acid
MAKEATAATGMTVKQEQTAIPVEVEFRNVKALRLTVYPPDGRVRIIAPFGANREEIRKFAASKIAWIQKQRAKFINHSKLTASLKNHATVYVWGDPWELEIIERRGNPKIVLEGVIMKMYVRPGSTKAKRQELLDKWYSKILKDTALLLIEEWEGRIGVEVKKLFVRKMKTCWGSCNSTRQTLRLNSELAKIKRECLEYVIVHEMLHIIEKSHNRKFYSLLNKYLPAWKIIRKKMNTGEL

SEQ ID NO: 53883 - DNA, 1308 bp, Unknown
  Obtained from environmental sample
  misc_feature (1)..(1308): n is a, c, g, or t
atgaggattcgggatttttgggaaatagattttttcctgctctttgccgcattggttctggtcgtattcggcatactttttatttattcatcggggattaccagcgaagggctccttatttccagcgagtaccaaaaacagatcgtttgggcctcgataggcctggtttctgcattggttatctccatgcttaattacaagaaaacttacgatttagctgtttatttctacatcggcacgcttgttttgcttgttattactttcatatttggcagggtaattcacggaagcagatggctcaggattggttttttaggcttccaggcatctgaatttgccaaaatagcgaccatactttttttggcctggtatctggatagcaccaaacgaaacgaaaatgattttcttcgttttatcgtttgcagcgttatcgcgatgatccccatgatgctggttttagttcagccggatttggggactgccctggtttttattcccatacttttgggaatggcctatgtcgccggaatttccgtcaggtacattgccttttttggattttcaatagtctttgcggggctgcttttagtgcttccgttttggcagtcttacataatgaacaacgccataccggccctaatgatgcttgccaattcccgctttgtggcggcaggatgcctgaccttgttgcttatagccgctatcgcgtggatagggtacgcccgttaccaaaagcgctatttttactggatacgctactgtgccggtatctttatcgtctcgctgggcggctcatacctggcccagaaggtgctcaagcagtaccaggttatgcgtcttattgtttttatggatcccaatgtagaccccaggggctttggctggcaaatcattcagtccatcaccgcgattggttccggaggcccgttcggcaaaggctatttgcagggaacccagagccattaccgctatcttcccgagcagagcacggatttcattttttcaatcctttcggaagaatggggatttctcggcggggttttggtgtttgcgttatttctgattatctttttaaggctcgtaaggatcatgcaaaatacttcggattattttggttcttacatagttgccgggctggtttatatgttcgcctttcactttgtagttaatgtgggaatgactatgggaattatgcccattaccggcatcccccttatgtttgtttcctacgggggatcggcggttttatcctcgatgattggaatcggattggctatgagcattcgtgtaagaaggtatacccattaa

SEQ ID NO: 53884 - protein, 435 aa, Unknown
  Obtained from environmental sample
  DOMAIN (11)...(434): Cell cycle protein
  misc_feature (1)..(435): Xaa is any amino acid
MRIRDFWEIDFFLLFAALVLVVFGILFIYSSGITSEGLLISSEYQKQIVWASIGLVSALVISMLNYKKTYDLAVYFYIGTLVLLVITFIFGRVIHGSRWLRIGFLGFQASEFAKIATILFLAWYLDSTKRNENDFLRFIVCSVIAMIPMMLVLVQPDLGTALVFIPILLGMAYVAGISVRYIAFFGFSIVFAGLLLVLPFWQSYIMNNAIPALMMLANSRFVAAGCLTLLLIAAIAWIGYARYQKRYFYWIRYCAGIFIVSLGGSYLAQKVLKQYQVMRLIVFMDPNVDPRGFGWQIIQSITAIGSGGPFGKGYLQGTQSHYRYLPEQSTDFIFSILSEEWGFLGGVLVFALFLIIFLRLVRIMQNTSDYFGSYIVAGLVYMFAFHFVVNVGMTMGIMPITGIPLMFVSYGGSAVLSSMIGIGLAMSIRVRRYTH

SEQ ID NO: 53885 - DNA, 2139 bp, Unknown
  Obtained from environmental sample
  misc_feature (1)..(2139): n is a, c, g, or t
ttgaaaggcagtgatttgtctcaaaaagacattaataaagcggtagccgctatttccaaaaaaacaaacatcccccttgtcgcgactaatgacgttcattatctggacaaggacgattatatcgcgcatgacattcttctttgcattggaacaggaaaggtacgcaccgaagaaaagcgaaaaaaatattacggggatcaattttattttaaaacaggcgacgagatggcggatattttcgccgaatatcctgatgcggttgaaaatacggtaaaaatcgcccggcgctgtaacacggacgtgcctataatagagaccaaagaattgccgcagtatctgcccgaatttaaaatccccgaaggttttaaagacccgggtgaatttttacggcatcttacggcggaagggcttgagaaacgttacgcgaaagaaaaagaaaatgatttaaataaatgggaagaaataaagaaaagagcggattatgaactggatacgataatcaacatgggttatacgggatattttttgattgtttgggactttataaaatacgcgaaggagaacaatatcccggtaggtccgggacgcggttccggagcgggatccattgtcgcttattctctgcgtataaccgatatagatcccttaaagtacggtcttttatttgaacgctttttgaaccccgagcgtatttctatgcccgattttgacattgatttcgccaatgaaggacgcgaggaagtaataaattatgttacgcgaacttacggcaaggaaagggtagcgcagataatcacattcggaacattgggcgcgaaagcggttatcaaggacgtggcgagagttttgggaatatcaatatccgagtctgaaatgataacaaaacttatatcgtttgatcccgatattacattggcgaaagcgaaagaagacgagccgcgtcttaaagatatggaaaaggacgcccgttttacggaattatttgccattgcgagtaaattggaagggcttaaccgccattcaagcatacacgccgcgggtatcgttattgggaaaaaaccgctgattgaattggtgccgctctttcaggaaagggaagaaaagggcggaaatatcgccacgcagtacagtatgaacttccttgaagaatgcggtcttgttaaaatggacttcctcggtcttaaaaaccttgatatcattaaacactcaaaggaattaatccgtcaacgcggcggcaagtattccaatttcaatatggaaaatattcccgaagatgatcaaaaaacttttaagatgttaggtgaaggaaaaagccacgctgtttttcagttcgcgtcagatggcatgcaggatattttaaggcagacgaaacctgcatccatagaagacttaacagctttaaacgcgatgtacaggccggggcccatgcagtttattccccgctttgtggaatgtaaaaacggaaaagcgcctataacctatcccgatccaagccttgaaggaattctaaaagaaacctacggcgttattgtctatcaggaacaggtcatggaagtggcaagaataattgcgggttacagcatgggaaaagccgatctcctccgccgggccatgggaaaaaagaaaaaagaaattattgatgaggaaaaaaccccgtttctggaaggcgcagtaaaacagggatactccgcgcagaaggcgggggagatttacgacatgcttgttccgttcgcgggctacggttttaataagagccacgccgccgcgtattccgtattggcgtatcaaaccgcgtatttaaaagcgaattttccggcggaatacatggcggctacgttgatagtcgaaataaaaagcacggacaggcttttatacagcattgtcgaatcccgtaaaatggggataagcgtagatcctcccagtataaattattccgataaactttttaccgtagtggacggcaggatagtatacggtttcctgggcataaaaggcgtaggcgacgctccggctgacgaaatcgtaaggggcaggcagaacggtcattataaaagttttatggattttctggaaagggtagacataaaagccgtgtggcaaaaaagttatagaactgcttattcataccggcgcgtttga

SEQ ID NO: 53886 - protein, 712 aa, Unknown
  Obtained from environmental sample
  DOMAIN (68)...(561): Bacterial DNA polymerase III alpha subunit
  misc_feature (1)..(712): Xaa is any amino acid
MKGSDLSQKDINKAVAAISKKTNIPLVATNDVHYLDKDDYIAHDILLCIGTGKVRTEEKRKKYYGDQFYFKTGDEMADIFAEYPDAVENTVKIARRCNTDVPIIETKELPQYLPEFKIPEGFKDPGEFLRHLTAEGLEKRYAKEKENDLNKWEEIKKRADYELDTIINMGYTGYFLIVWDFIKYAKENNIPVGPGRGSGAGSIVAYSLRITDIDPLKYGLLFERFLNPERISMPDFDIDFANEGREEVINYVTRTYGKERVAQIITFGTLGAKAVIKDVARVLGISISESEMITKLISFDPDITLAKAKEDEPRLKDMEKDARFTELFAIASKLEGLNRHSSIHAAGIVIGKKPLIELVPLFQEREEKGGNIATQYSMNFLEECGLVKMDFLGLKNLDIIKHSKELIRQRGGKYSNFNMENIPEDDQKTFKMLGEGKSHAVFQFASDGMQDILRQTKPASIEDLTALNAMYRPGPMQFIPRFVECKNGKAPITYPDPSLEGILKETYGVIVYQEQVMEVARIIAGYSMGKADLLRRAMGKKKKEIIDEEKTPFLEGAVKQGYSAQKAGEIYDMLVPFAGYGFNKSHAAAYSVLAYQTAYLKANFPAEYMAATLIVEIKSTDRLLYSIVESRKMGISVDPPSINYSDKLFTVVDGRIVYGFLGIKGVGDAPADEIVRGRQNGHYKSFMDFLERVDIKAVWQKSYRTAYSYRRV

SEQ ID NO: 53887 - DNA, 369 bp, Unknown
  Obtained from environmental sample
  misc_feature (1)..(369): n is a, c, g, or t
atggcatatagtattgattttattaaaagggcagtggcgtacaggcaggaagggcatacctttgcgcagttgcgcgaggcatttgatatcccatccgcgacatattacgactgggaaaccaagctcaataacgggcattttgacataacaatcaaacgcacacggcgtcggaaaatagacaaagaagcgcttataaaggcggtagaagaaaaacctgacgctttccttaaggaatacgcggaacgattcgattgcacgccgacggccgtcttctacgcccttgaaaaactcaacataacacgaaaaaaaagacctttacctattctgaaaagtccgagcaggagcgtgcggagtttgccgcaaggctga

SEQ ID NO: 53888 - protein, 122 aa, Unknown
  Obtained from environmental sample
  DOMAIN (1)...(118): Transposase
  misc_feature (1)..(122): Xaa is any amino acid
MAYSIDFIKRAVAYRQEGHTFAQLREAFDIPSATYYDWETKLNNGHFDITIKRTRRRKIDKEALIKAVEEKPDAFLKEYAERFDCTPTAVFYALEKLNITRKKRPLPILKSPSRSVRSLPQG

SEQ ID NO: 53889 - DNA, 789 bp, Unknown
  Obtained from environmental sample
  misc_feature (1)..(789): n is a, c, g, or t
ttgaacgagaccgtaggcggcgattccgatgattttaacataaaaataactacttatgacggagatacgccggaatccctgcgaatttcagcgcgtgatacaggcagaatcatcatttcaaatcccgatatgcttcataccggaatccttcccaaccatccaaaatggataaagttcttttccaacctgaaatatatcgtgatagacgaagcccacgcctacaggggagttatgggaagccatgtcgccaatgtaatacgccgcctccgcagaattacatctttttacggcgcaaaaccgcagtttattttatgctccgcgaccatcggcaaccctaaggagcttgcccaggcgctaatcggccttcctgtggagttggttgacaagaacggcgcgccgcgtggagaaaaacggataatcctttacaacccgcctcttgtcgataaagtgcaggggatacgccgttccgtggtgacggaaagccgccgctggatgattgccctgttaaaagccgggataaaaacgatacttttcgcccattccagggtaaagacagaagtagccgcctcttatgtaaacgaagaccttaaaaatatctttacagataactcccgcataagggtagaagcgtaccggggcggctttttacccaacgagcgccatgagatagaacggggactgcgcgaaggagacatacagggagttgtttcaactaacgcgctggaattaggcatagacataggcggccttgacgcttcgattatcgcgggcttcccccggttcttttaa

SEQ ID NO: 53890 - protein, 262 aa, Unknown
  Obtained from environmental sample
  misc_feature (1)..(262): Xaa is any amino acid
MNETVGGDSDDFNIKITTYDGDTPESLRISARDTGRIIISNPDMLHTGILPNHPKWIKFFSNLKYIVIDEAHAYRGVMGSHVANVIRRLRRITSFYGAKPQFILCSATIGNPKELAQALIGLPVELVDKNGAPRGEKRIILYNPPLVDKVQGIRRSVVTESRRWMIALLKAGIKTILFAHSRVKTEVAASYVNEDLKNIFTDNSRIRVEAYRGGFLPNERHEIERGLREGDIQGVVSTNALELGIDIGGLDASIIAGFPRFF

SEQ ID NO: 53891 - DNA, 864 bp, Unknown
  Obtained from environmental sample
  misc_feature (1)..(864): n is a, c, g, or t
atgaagatgaacaaaaaattatcccagagcatagcgttttggattttccgaattctaggagttttggtggttggaattttgttttggattctaggattcataattgtgaacggcattggtgcaattagctttgaatttcttttttctgaacccaaagagggcatgaccaagggtggtatttttccagccattgttggaacgtgttgccttatagcgggtagtatgctggtggcttttcccattggggttatgtctgcaatatatttgaacgaatatactacaaacggcaaggttgcaaagtttatacgcacaatgacaaataatttgggaggagttccttctgttatttttgggttatttggaatgtctctgtttgtgaatgcaatgaagtggggagattccattatcgcaggttcgttcacccttgggcttttggtgttgcctttggtgattcgcaccacagaagaggctttaaaaatggtaccggattcattccgcacagggagttatgctttgggtgcaaacaagttgcaaacaattaggcgtgttgtgctgccaacggcattcccaaatattttaaccggtttaatactcgcggttggaagagtctctggcgaaactgcgccaattttgttcacggtggctgcttactttttgccaaaacttccaacgagtatttttgaccaagttatggcactcccgtatcatctttatgttatatccaccagcggcacaaatttggaggcaacgcgtccaatggcgtatggcactgcgcttgtgcttatcactttggttttgtgcataaatttgctcgccgcttttttgaggcggaaattgggaagatgtagaatttttctaccttaa

SEQ ID NO: 53892 - protein, 287 aa, Unknown
  Obtained from environmental sample
  DOMAIN (64)...(285): Binding-protein-dependent transport system inner membrane component
  misc_feature (1)..(287): Xaa is any amino acid
MKMNKKLSQSIAFWIFRILGVLVVGILFWILGFIIVNGIGAISFEFLFSEPKEGMTKGGIFPAIVGTCCLIAGSMLVAFPIGVMSAIYLNEYTTNGKVAKFIRTMTNNLGGVPSVIFGLFGMSLFVNAMKWGDSIIAGSFTLGLLVLPLVIRTTEEALKMVPDSFRTGSYALGANKLQTIRRVVLPTAFPNILTGLILAVGRVSGETAPILFTVAAYFLPKLPTSIFDQVMALPYHLYVISTSGTNLEATRPMAYGTALVLITLVLCINLLAAFLRRKLGRCRIFLP

SEQ ID NO: 53893 - DNA, 327 bp, Unknown
  Obtained from environmental sample
  misc_feature (1)..(327): n is a, c, g, or t
ttggcaaaccatatacaaagtgattatcccttatgcttcatcgggcatttctgcagcggtgattttgggaattggcagggcagttggcgaaactatggcagtgcttatggttacgggaaatgctgctgttataccaacgtcccttgtttgcgccaattcgcaccattccggcagcccatagccgccgaactcggtgaggcacctgtgggtggagcgcactatcaggctttgtttatgcttggttgcattttgtttatgataacccttgtgatgagcattgtgtctgagattattccaagcggcatccggggaagggggtgtaaatga

SEQ ID NO: 53894 - protein, 108 aa, Unknown
  Obtained from environmental sample
  misc_feature (1)..(108): Xaa is any amino acid
MANHIQSDYPLCFIGHFCSGDFGNWQGSWRNYGSAYGYGKCCCYTNVPCLRQFAPFRQPIAAELGEAPVGGAHYQALFMLGCILFMITLVMSIVSEIIPSGIRGRGCK

SEQ ID NO: 53895 - DNA, 1059 bp, Unknown
  Obtained from environmental sample
  misc_feature (1)..(1059): n is a, c, g, or t
atgagaaggtttattgaaaaagtaatagaaaatatactgcgacttagcggtgctactaccactatcatcattttgctgatggtggtttttctgttcaaagagggctttgggcttttcaaaaaccccgttgttgaaagagggcacgttttgtgcgttaatgcttccaataaaattgattatttgaattccaaagatataaaattaatatttgatggcgaaatagagaattggaataaattgggcggcaaagacttggctatagaagtttttaggttcaatgatattttcaaacgctattcagaagaagaatttggagataactacgaaaaacttccagaaaaattaggggaggttatatcttccacacccggaataatagcttttataccgcagcaatatatgccttcttctatgccaaaagttaaaaaacttcaagatgagaaaataggcgtagcagatttttttggcggaacggagtggattccaacctctgtgccgtctcctcaatttggcgtgctgcctttggtgcttggaacgctgtgggttagcctcattgcaattttaattgccctgccccttggcttgggcgttgccgtttatctctctgagttagcaaacgaaggaacacgaaaaattttaaaaccagctgtggaattgctcgctggaataccttctgttgtttatggtttttttggcttggtggttttggttcctcttgtgcagagagcgtttaatttgcccgttggcgaaaccgcatttactggcagtttggtgcttgccattatggcactcccaactattataacggttgcagaagatgctatgcgcagcacaccgagcgcgatgcgcgaggcaagcctcgctttgggtgcaactcattggcaaaccatatacaaagtgattatcccttatgcttcatcgggcatttctgcagcggtgattttgggaattggcagggcagttggcgaaactatggcagtgcttatggttacgggaaatgctgctgttataccaacgtcccttgtttgcgccaattcgcaccattccggcagcccatag

SEQ ID NO: 53896 - protein, 352 aa, Unknown
  Obtained from environmental sample
  DOMAIN (176)...(352): Binding-protein-dependent transport system inner membrane component
  misc_feature (1)..(352): Xaa is any amino acid
MRRFIEKVIENILRLSGATTTIIILLMVVFLFKEGFGLFKNPVVERGHVLCVNASNKIDYLNSKDIKLIFDGEIENWNKLGGKDLAIEVFRFNDIFKRYSEEEFGDNYEKLPEKLGEVISSTPGIIAFIPQQYMPSSMPKVKKLQDEKIGVADFFGGTEWIPTSVPSPQFGVLPLVLGTLWVSLIAILIALPLGLGVAVYLSELANEGTRKILKPAVELLAGIPSVVYGFFGLVVLVPLVQRAFNLPVGETAFTGSLVLAIMALPTIITVAEDAMRSTPSAMREASLALGATHWQTIYKVIIPYASSGISAAVILGIGRAVGETMAVLMVTGNAAVIPTSLVCANSHHSGSP

SEQ ID NO: 53897 - DNA, 504 bp, Unknown
  Obtained from environmental sample
  misc_feature (1)..(504): n is a, c, g, or t
gtgcatccttcaaacccagttagcaaactcacccgcgaacaaatggaagacattttcacaggcaaaaccaccaattggaaagaagttggcggtcccgacatgaaaatcatcccttattcacgcgaaacatcttctggcacttatgaatttttcaaagaacacgttttgaaaaataaaaactacgtaaacggcataatgagtatgcctgccacaggtgcaatagttcagtccataagccaaacaaaaggcgcaattggttacattggtctcgcttatttagacaaaaaaatcaaagcggttcaggtttcttttgacgaaggaaaaacctacacagcaccttctgtgaaaagtgctatggacgagacttatccaattgttcgcccacttatctactattacacagaaaaatccgaagctacagttaaaccctttgttgactatgtgctttctgctgctgggcaaaaaattgtgaaagacattgggtttattccaatcagtaaataa

SEQ ID NO: 53898 - protein, 167 aa, Unknown
  Obtained from environmental sample
  misc_feature (1)..(167): Xaa is any amino acid
MHPSNPVSKLTREQMEDIFTGKTTNWKEVGGPDMKIIPYSRETSSGTYEFFKEHVLKNKNYVNGIMSMPATGAIVQSISQTKGAIGYIGLAYLDKKIKAVQVSFDEGKTYTAPSVKSAMDETYPIVRPLIYYYTEKSEATVKPFVDYVLSAAGQKIVKDIGFIPISK

SEQ ID NO: 53899 - DNA, 498 bp, Unknown
  Obtained from environmental sample
  misc_feature (1)..(498): n is a, c, g, or t
atggccgagctcgtgccgtttttccccaaccagtatgataatcctgaaaaccctcgcgctcattacgagacgaccgggctcgaattgtatactcagtgcaagcccacgcattttgttgccggaaccggcacttcgggaacttttatgggcgtttccaggcggcttaaagagcttaatcaatcgatacaaatcgcgctcatgcagccggattcgccgtttcacgggcttgagggaatgaagcacatggattcaaccataaagccgaaaatattcgatgagagcattgccgatctgcatgttgaagtaaagacagaagacgcttacgcgacggcgcggcggcttgccctggaagaagggttgtttgtcgggataagctcaggggctaatgtgtacgccgctatggaatgggcaaaaacgttaccggcgtcttcgcgggtcgctacaatactttgcgataacgggtaccgctacctgtcgcagccgctgtggaaaaattaa

SEQ ID NO: 53900 - protein, 165 aa, Unknown
  Obtained from environmental sample
  DOMAIN (1)...(153): Pyridoxal-phosphate dependent enzyme
  misc_feature (1)..(165): Xaa is any amino acid
MAELVPFFPNQYDNPENPRAHYETTGLELYTQCKPTHFVAGTGTSGTFMGVSRRLKELNQSIQIALMQPDSPFHGLEGMKHMDSTIKPKIFDESIADLHVEVKTEDAYATARRLALEEGLFVGISSGANVYAAMEWAKTLPASSRVATILCDNGYRYLSQPLWKN

SEQ ID NO: 53901 - DNA, 435 bp, Unknown
  Obtained from environmental sample
  misc_feature (1)..(435): n is a, c, g, or t
gtggaaaaattaataatgttgcagcttacttcggaactggaaaacaatattagagcggatggagagacagcctacccaaatgaatgttgtggaattattttgggcgaaatcagcgacgacggaactaaaaacgccaaacgcgttttgacaattaataactccggggaagacaacgagcgttaccatcgatttcttataacaccggaagatatgctccacgcggaacagacggcaagagcggcaaagctggaagttataggcttttaccactcgcaccccgatcatccgtcatctccatccgattatgataaagatcacgctctgcctttttactcgtatgtaatcgtatcggtggacgatggcaaggcgcaggttcttacaagctgggagttaaccgatgatcgcattaattttgtacaggagggtattaattga

SEQ ID NO: 53902 - protein, 144 aa, Unknown
  Obtained from environmental sample
  misc_feature (1)..(144): Xaa is any amino acid
MEKLIMLQLTSELENNIRADGETAYPNECCGIILGEISDDGTKNAKRVLTINNSGEDNERYHRFLITPEDMLHAEQTARAAKLEVIGFYHSHPDHPSSPSDYDKDHALPFYSYVIVSVDDGKAQVLTSWELTDDRINFVQEGIN

SEQ ID NO: 53903 - DNA, 1419 bp, Unknown
  Obtained from environmental sample
  misc_feature (1)..(1419): n is a, c, g, or t
ttgataaaaattcttattccctatgcgctcagggcatttactgaacgcaaagcggaagtggcggtagaaggcggcaaagcgggtgacgcgatcaaggcgctcgccgacgcgcatcctgcccttaaaagccacctcttcacagatgacggccagcttcgcgatttcatcaatctgtttgtgaatggcgtaaacatcaacagccttcagggcttgaacacgcagattgcggataacggcgaaattatgatagtccccgctatagccggaggcagcgatgatataaatctttccaacgaagaaatcgcacgttacagccgccatttgcttttgccggaaattggcgttgaggggcaaaaaaaaataaaggcggcaaaagtcctcattgtcggtacgggcgggcttggcgcgccgcttgccctttacctcgcggcggcgggcgtggggacaatgggcctggtggatttcgacacggtagacgaatcanaccttcagcggcaggtaatccacagcacgcgcgatgtgggcagacccaaagtagcttcggcaaaagacagaatcaaggggataaatccgctgataaatgtggtgacacataacgaaatgcttaccagcaagaatgcgctggaactttttgccgattacgacattatcgcggacggaacggataatttccaaacgcgctatcttgtaaacgacgcttgcgtttttctgggcaagctgaacgcctacggttccgtgtttcagttcgacggacaggcgacagttttcggcgcaaaagacggtccgtgttaccgctgtctgtacccttccccgccgccccccggacttgttccttcctgcgctgaaggcggagttatgggcgtactgcccggcattatcggaacaattcaggcggcggagacgattaagctgattgtaggcggagcaaagccgcttatcggacgcttgcttttattcgatgcgtggcgcatgtcgttccgcgaattaaaattagataaaaaccccgaatgccccgtatgcgggaagaatcccactattcacgaattaattgattatgaacaattttgcggtttgaaaaaaaataccgacagcaaaccgatagatactataaccgctcttgatttaaaaaaacggcttgataacggagacaaaattcaatttatagatatacgcgagcctcatgaacgcgctattgtaaaatttcccgacgcaaaagtaatacctcttggtcagcttgaaagacgcatggaagaattagacccatctatagacgcggtgtttttgtgcaaaatcggtcagcgcagtattttaggaataagagcgctgcaggaagccggttacaaaggaaaactgctgaatcttcaagacggacttaacgcctgggcaagagacgttgataagagcatgcctatttattaa

SEQ ID NO: 53904 - protein, 472 aa, Unknown
  Obtained from environmental sample
  DOMAIN (371)...(464): Rhodanese-like domain
  misc_feature (1)..(472): Xaa is any amino acid
MIKILIPYALRAFTERKAEVAVEGGKAGDAIKALADAHPALKSHLFTDDGQLRDFINLFVNGVNINSLQGLNTQIADNGEIMIVPAIAGGSDDINLSNEEIARYSRHLLLPEIGVEGQKKIKAAKVLIVGTGGLGAPLALYLAAAGVGTMGLVDFDTVDESXLQRQVIHSTRDVGRPKVASAKDRIKGINPLINVVTHNEMLTSKNALELFADYDIIADGTDNFQTRYLVNDACVFLGKLNAYGSVFQFDGQATVFGAKDGPCYRCLYPSPPPPGLVPSCAEGGVMGVLPGIIGTIQAAETIKLIVGGAKPLIGRLLLFDAWRMSFRELKLDKNPECPVCGKNPTIHELIDYEQFCGLKKNTDSKPIDTITALDLKKRLDNGDKIQFIDIREPHERAIVKFPDAKVIPLGQLERRMEELDPSIDAVFLCKIGQRSILGIRALQEAGYKGKLLNLQDGLNAWARDVDKSMPIY

SEQ ID NO: 53905 - DNA, 447 bp, Unknown
  Obtained from environmental sample
  misc_feature (1)..(447): n is a, c, g, or t
atgcccgataaaataactgtaaatgagccctggataagtatgttgaatcacaatattcttattgtctgggaaccttcgtacaatttgggaataccgattgttgacgagcagcaccgcgggattgtttccacgattaattccctctgctacgcgatacagaacaagcatggcaatgagatgctccgtcctgtaatcggcatggttgccgaatatacccgcatccattttgagatagaagaagatttccttaaaaaatgcggatatcccgatcttgaaaagcatcgtatattgcacaaagaattgacagtcgcgctgtcccagacaagcaaggacagcatttggaataaagaccctcaggagtttctgaactttcttaaggactggtggatcaatcatatctgtaaggaagatcgggtattcagccattacgttaaaaacaaaaaatga

SEQ ID NO: 53906 - protein, 148 aa, Unknown
  Obtained from environmental sample
  misc_feature (1)..(148): Xaa is any amino acid
MPDKITVNEPWISMLNHNILIVWEPSYNLGIPIVDEQHRGIVSTINSLCYAIQNKHGNEMLRPVIGMVAEYTRIHFEIEEDFLKKCGYPDLEKHRILHKELTVALSQTSKDSIWNKDPQEFLNFLKDWWINHICKEDRVFSHYVKNKK

SEQ ID NO: 53907 - DNA, 327 bp, Unknown
  Obtained from environmental sample
  misc_feature (1)..(327): n is a, c, g, or t
atgatgaattattacgcaatacaggtaaaaacccgctccgaagataaattcattaagctctttaaagccggacaccccgaaattaccctgccaatccattttccaaaaaggcttcttgacatcagaaaagccggcaaaaaaaagccctataccccgcctgtttttccggggtatttgttcatagaagccgaaagcgatgaggaaatcatatcccaccagtgggaattcaggcggacggaggggttttacacggtttttaaaatcaaatcgcgacattacaccgcttgcggacagggatttggagcttgtcctccattttataaataa

SEQ ID NO: 53908 - protein, 108 aa, Unknown
  Obtained from environmental sample
  DOMAIN (2)...(91): Transcription termination factor nusG
  misc_feature (1)..(108): Xaa is any amino acid
MMNYYAIQVKTRSEDKFIKLFKAGHPEITLPIHFPKRLLDIRKAGKKKPYTPPVFPGYLFIEAESDEEIISHQWEFRRTEGFYTVFKIKSRHYTACGQGFGACPPFYK

SEQ ID NO: 53909 - DNA, 345 bp, Unknown
  Obtained from environmental sample
  misc_feature (1)..(345): n is a, c, g, or t
atgaggaaatcatatcccaccagtgggaattcaggcggacggaggggttttacacggtttttaaaatcaaatcgcgacattacaccgcttgcggacagggatttggagcttgtcctccattttataaataacactggctcagtagcaggacgctccaaagtgtactttaacgaaaactcgcgcattgtcgtcgtagaaggtccattaattgggcttgagggaaggataataaaggtcgatagaagaaagggaagggcaaaaataaagcttgacctttacaatgattcattttccatcgatctggcttttgaggtgataggggcgctggaaaatgataaggggtga

SEQ ID NO: 53910 - protein, 114 aa, Unknown
  Obtained from environmental sample
  DOMAIN (56)...(91): KOW motif
  misc_feature (1)..(114): Xaa is any amino acid
MRKSYPTSGNSGGRRGFTRFLKSNRDITPLADRDLELVLHFINNTGSVAGRSKVYFNENSRIVVVEGPLIGLEGRIIKVDRRKGRAKIKLDLYNDSFSIDLAFEVIGALENDKG

SEQ ID NO: 53911 - DNA, 888 bp, Unknown
  Obtained from environmental sample
  misc_feature (1)..(888): n is a, c, g, or t
atgagcgtcggaaacccgccgccgccgctgtccgtagggcgcgtgcagacggcagtccttgcggccgtcgccgccaggaacggcgaggttaaaaattttgtccccgtgccgtacagaaagcttgaggcttccgtcaaatccaaagacggcgtcgtcataaaagcctttttggaaaacccaaggctcggcaatacatctttctttgaatgcgattggccatacatttgcgaagccatggaagactgcaaaaacagcatcttcggcatcgattccgtggacgtttcttccgtagaaaaaaaagcaaagccgccgaagctgcttaacatcaccgcgctgcaaaaagaggcctttaggcggcacggcctcaagccggaagaaacattggacattgcccaagccctttacgaaacccacaaatgcctttcctatcccaggacgccgtccagggtgatgggcgacaacaacgcggatttgttccgcgagaagttcgatctccttaagggcgagtcttccctttccggcttttccgacctttcccttatcgacgcgggcaacaggcacgttttcaattcggcgcagcttgaggaccaccacgcgcttataccccttgccaaaattccggactcggctaccgacatggaacggaaggtttattccattgtccttgagtcgttttttaccgtctgcatgccggattacgtttacacgaaagtcgctgccattccacgtttcaaaatatttgttctcgtccaaaatacgcgagattttccggaaaggctggaaggaagcggtccgggaacaaaaaggcgacggcgacgaacccgacggggaagaggtcccgcacttcgacgagtccgcctgcgccctgctggatttgagactgcttga

SEQ ID NO: 53912 - protein, 295 aa, Unknown
  Obtained from environmental sample
  DOMAIN (8)...(294): DNA topoisomerase
  misc_feature (1)..(295): Xaa is any amino acid
MSVGNPPPPLSVGRVQTAVLAAVAARNGEVKNFVPVPYRKLEASVKSKDGVVIKAFLENPRLGNTSFFECDWPYICEAMEDCKNSIFGIDSVDVSSVEKKAKPPKLLNITALQKEAFRRHGLKPEETLDIAQALYETHKCLSYPRTPSRVMGDNNADLFREKFDLLKGESSLSGFSDLSLIDAGNRHVFNSAQLEDHHALIPLAKIPDSATDMERKVYSIVLESFFTVCMPDYVYTKVAAIPRFKIFVLVQNTRDFPERLEGSGPGTKRRRRRTRRGRGPALRRVRLRPAGFETA

SEQ ID NO: 53913 - DNA, 957 bp, Unknown
  Obtained from environmental sample
  misc_feature (1)..(957): n is a, c, g, or t
ttgaggaccaccacgcgcttataccccttgccaaaattccggactcggctaccgacatggaacggaaggtttattccattgtccttgagtcgttttttaccgtctgcatgccggattacgtttacacgaaagtcgctgccattccacgtttcaaaatatttgttctcgtccaaaatacgcgagattttccggaaaggctggaaggaagcggtccgggaacaaaaaggcgacggcgacgaacccgacggggaagaggtcccgcacttcgacgagtccgcctgcgccctgctggatttgagactgcttgacaggcttaccaagccgaacagggaattcgccatcgacacgctgcttgcctttatggaacgtcccggaagctcgggcgacgagaacacaaagcttgccgggctcggaaccccggctaccagggcggagataataaggaagcttttttcgggccagtacctgcgcgaggacaggaaaagcctttacgcaacggacagggggctttttttgcttggggcgctttcgaaaaacggatcattaaaaaagatggcggacgtcgcccagaccaccgaatgggaaaattcccttgcctcggacccgaaggctttcgaaagggagattgccgaatacgtcgcgctgtgcgtcaagggcggccgcgaaagggaaacgttccggcaggcttccttgggagcctgcccgctttgcaaaaggccggtctacgaaaccaaaataggctacggctgctccggctacaaggaaaatcccaaatgcggtttcattatttttaaaacaattgcgggcgcttccgtcagcgcctcggacgcttccctgcttcttgtggggcaaaagacaaagccgaaaaaatgcaggagcaaggaaggcaagccgttcgaagcctcgtttgcgcttgagggcgggaacgtgaggtttctttttaaggataaaaaataa

SEQ ID NO: 53914 - protein, 318 aa, Unknown
  Obtained from environmental sample
  misc_feature (1)..(318): Xaa is any amino acid
MRTTTRLYPLPKFRTRLPTWNGRFIPLSLSRFLPSACRITFTRKSLPFHVSKYLFSSKIREIFRKGWKEAVREQKGDGDEPDGEEVPHFDESACALLDLRLLDRLTKPNREFAIDTLLAFMERPGSSGDENTKLAGLGTPATRAEIIRKLFSGQYLREDRKSLYATDRGLFLLGALSKNGSLKKMADVAQTTEWENSLASDPKAFEREIAEYVALCVKGGRERETFRQASLGACPLCKRPVYETKIGYGCSGYKENPKCGFIIFKTIAGASVSASDASLLLVGQKTKPKKCRSKEGKPFEASFALEGGNVRFLFKDKK

SEQ ID NO: 53915 - DNA, 321 bp, Unknown
  Obtained from environmental sample
  misc_feature (1)..(321): n is a, c, g, or t
gtgaatgcggtattgcgcttccttatcgccaaagggatactcaaatgggcgctgcacggcggtatgcacacccgcatactcaatgaagaatcgatacgaaacgtccagacaagccgcgccggaatactgaaaaaacacgtcgcggtgggcgacgaggttgccgagggcgatctgctctgcgaaataatccatcctttagaggggaacacgataggccgcatagcgtcgcctgtggacgggacggtgttcttcgcctacaacaagcaactggtgatggagcataccgacgtattcaacatcataccgttttccaacacgtga

SEQ ID NO: 53916 - protein, 106 aa, Unknown
  Obtained from environmental sample
  misc_feature (1)..(106): Xaa is any amino acid
MNAVLRFLIAKGILKWALHGGMHTRILNEESIRNVQTSRAGILKKHVAVGDEVAEGDLLCEIIHPLEGNTIGRIASPVDGTVFFAYNKQLVMEHTDVFNIIPFSNT

SEQ ID NO: 53917 - DNA, 300 bp, Unknown
  Obtained from environmental sample
  misc_feature (1)..(300): n is a, c, g, or t
gtgacggggcgggaaaatcaaccgaaacgcctacaaagaaaccgtgaggcggtatttacgcgcaatgttgatcccgaaagctatatcgccgaaaagggattgttgatgatcaacgatgacaacgcggtcatcgaagcggtaaaagcggttataacagaaaatcaggactcggtcacggaatacagggccggcaaggaaaaagtgtttgggtttttaatggggcaggttatgaaaaaactgggcggaaaagggaatcccgacatggcgaagaaaacactggaagacgcgctgaaagggtga

SEQ ID NO: 53918 - protein, 99 aa, Unknown
  Obtained from environmental sample
  DOMAIN (1)...(97): GatB/Yqey domain
  misc_feature (1)..(99): Xaa is any amino acid
MTGRENQPKRLQRNREAVFTRNVDPESYIAEKGLLMINDDNAVIEAVKAVITENQDSVTEYRAGKEKVFGFLMGQVMKKLGGKGNPDMAKKTLEDALKG

SEQ ID NO: 53919 - DNA, 870 bp, Unknown
  Obtained from environmental sample
  misc_feature (1)..(870): n is a, c, g, or t
ttgatcgcaagaattatttttatccccgatttgccgaaagcttatcaggtatcgcaactgtacgccccgatttgccgggacggtcatcttaacattgaggttgaaggcaagaaaaaaacaatcaacatacgcgaaatacacatggaagaagacgcgggaaagctgatacacgacgcaaagggcgcgggtacgtttatggacttcaaccgctgcggagtgccgctactggaaatcgtttcgcagccagacttccgcagcgccgccgaggtaatcgcctatcttgaaaaactgcgcgaaacgcttttgtaccttgaggtgtgcgactgcaaaatgcaggaaggttcgattcgcgccgacatcaatctgtcagtgcgccgcgaaggcgatgaattgggagtgcgaaccgagacaaagaacatgaactcgttcaaggcgattgcgcgcgccattgaatacgagagaacgcgacagatcgaaatactggaagacggcgggcaggtcgttcaggaaacgcgccgctgggacgacgaaaagcttgaatcatacagtatgcgctcaaaggaaaacgcgcaggactaccgttacttccccgaacctgacctcttgccgattgatattgatgacgcatggcttgcaagtatcaggaaagacctgccggaactggcgtatcagaagcgcgagcgctactgccatgatttcggcatacccgaatcagaagcggctgttcttaccgttcacaaaaatatctgcgatctgttcgagaccatcgcacaaaaaagcggacagcccgttgaagcggcgcatctcttaacaggtgaaatcatgcggctgatgaacaacgccaatgtttacccggagacctgtctatag

SEQ ID NO: 53920 - protein, 289 aa, Unknown
  Obtained from environmental sample
  DOMAIN (181)...(249): PET112 family, C terminal region
  misc_feature (1)..(289): Xaa is any amino acid
MIARIIFIPDLPKAYQVSQLYAPICRDGHLNIEVEGKKKTINIREIHMEEDAGKLIHDAKGAGTFMDFNRCGVPLLEIVSQPDFRSAAEVIAYLEKLRETLLYLEVCDCKMQEGSIRADINLSVRREGDELGVRTETKNMNSFKAIARAIEYERTRQIEILEDGGQVVQETRRWDDEKLESYSMRSKENAQDYRYFPEPDLLPIDIDDAWLASIRKDLPELAYQKRERYCHDFGIPESEAAVLTVHKNICDLFETIAQKSGQPVEAAHLLTGEIMRLMNNANVYPETCL

SEQ ID NO: 53921 - DNA, 465 bp, Unknown
  Obtained from environmental sample
  misc_feature (1)..(465): n is a, c, g, or t
gtgcccggcttcctgcccggtacggaacaggagtacggtggcatcataaggcacggtgcgaaaatgctcttcgcttactccgaggcgacagtgccgaaggttacggttattgtcagaaaggcttacggcggcgcgtaccttgcgatgtgttcaaaagacttaggcgcggatctcgtacttgcatggccgcttgcggaaattgccgtaatgggccccgacggtgcggcgaatatcatctttaaaaacgatattcagaattccgccgatccggcagcgaccaagcagcaaaagatcgaagagtacacaagggaatttgccacaccttacaaggctgcggaaaggggctttgtggacgatattatcgagccaagccaaacacgactgcgcctgattagcgcttttgaaatgcttgccggcaagaagggagaactgccgtcgaaaaagcacggtaatatcccgctgtaa

SEQ ID NO: 53922 - protein, 154 aa, Unknown
  Obtained from environmental sample
  DOMAIN (1)...(152): Carboxyl transferase domain
  misc_feature (1)..(154): Xaa is any amino acid
MPGFLPGTEQEYGGIIRHGAKMLFAYSEATVPKVTVIVRKAYGGAYLAMCSKDLGADLVLAWPLAEIAVMGPDGAANIIFKNDIQNSADPAATKQQKIEEYTREFATPYKAAERGFVDDIIEPSQTRLRLISAFEMLAGKKGELPSKKHGNIPL

SEQ ID NO: 53923 - DNA, 1152 bp, Unknown
  Obtained from environmental sample
  misc_feature (1)..(1152): n is a, c, g, or t
gtgaggaagaaaaatgaagctgcttatgggaaacgaagcttgcgtggaaggcgctatcgccgcggggatgaaatttttcgcgggctatccaatcacgccatccaccgaaattgccgaggaatcttccagaaggctctccatggtgggcggtcaattcatccagatggaagacgagatagcgggcatggcggcttgcattggcgcgtcatcgcggggctaaagtctatgacagccacaagcggcccgggtttttcactgaagcaggaaaacatcggctacgctgccctcgcggaaatcccctgcgtgatcgtcaacgtccagcgctcaggcccaagcaccggtatgccgacttcgccctcgcaggccgatgtcatgcaggcgcgttggggcacacacggcgaccacccggtaattgccctgtcgccgtcctcggttcgcgagactttcgatctaaccgtcgaagcgtttaacctttcggaaaaataccgaacgcctgtgatccttttaatggacgaaattatcggccatcttcgcgagggcgttgagcttcccgaggcatcggatataaaaattgtgaaccgaaaaaaacctactgtaagcccggatgagtttattgcctacaaagtatccgaaggcgagatcgttccacccatgccgtcgttcggcgaggggtacaggttcaacataacgggcctcattcatgatgagacgggtttcccgaccaataacaacgcaattgccgcgaaaatgtcggagcggctaatgaaaaagatcgaggacaacgttgatgacattatccgctatgagacaagcggcgtttcaggctgcgacatcctgcttgtcgcgtacgggggaaccattcgcacagtgaaagcggcggtaaagcttgccgccgaagccggcattaaagcgggcgtattcaggccgatctcaatctggcctttccccgaaaaagctttcaaggcttgtgtaaaggacaacaatataaaaaaggtgcttgtcgcagagctcaactacggccagatttcacttgaggcagaaagaatattaaaaagcgacgccgaagtttcgtatataggaaaaattgacggcgacatcttgtatcccaatgaggtttttaaaaagatttgcgaggtagtaaaacatggctga

SEQ ID NO: 53924 - protein, 383 aa, Unknown
  Obtained from environmental sample
  DOMAIN (31)...(254): Pyruvate flavodoxin/ferredoxin oxidoreductase, thiamine diP-binding domain
  misc_feature (1)..(383): Xaa is any amino acid
MRKKNEAAYGKRSLRGRRYRRGDEIFRGLSNHAIHRNCRGIFQKALHGGRSIHPDGRRDSGHGGLHWRVIAGLKSMTATSGPGFSLKQENIGYAALAEIPCVIVNVQRSGPSTGMPTSPSQADVMQARWGTHGDHPVIALSPSSVRETFDLTVEAFNLSEKYRTPVILLMDEIIGHLREGVELPEASDIKIVNRKKPTVSPDEFIAYKVSEGEIVPPMPSFGEGYRFNITGLIHDETGFPTNNNAIAAKMSERLMKKIEDNVDDIIRYETSGVSGCDILLVAYGGTIRTVKAAVKLAAEAGIKAGVFRPISIWPFPEKAFKACVKDNNIKKVLVAELNYGQISLEAERILKSDAEVSYIGKIDGDILYPNEVFKKICEVVKHG

SEQ ID NO: 53925 - DNA, 684 bp, Unknown
  Obtained from environmental sample
  misc_feature (1)..(684): n is a, c, g, or t
atggctgattcaattcctgcaagtaaactggttactgcaagtaaccttataaagagaaaccttcgcgtagacaaattgccgcatatctggtgccctggttgcggtaatggaattttgatgcgggctgtggcccaggctatcgaaaacaaggagctggacaagaccaaggtctgcatagtttcgggcatcggctgttcatcaagagcggcgggctacatgaacttcaacacgctgcacacaactcacggacgcgcccttgccttcgcgaccgggattaagctggcaaacccggagcttatcgttatcgtcattacaggcgacggggacgcgacagccatcggcgggaatcattttatccacgctgcccgcaggaacatcggcataacaacgattgtctttaacaacagcatatatggaatgacaggcggacaatattcgcctctgacgccgactaatgactttgcaaccactgccccatacggcaatgtagaccgcccattcgacattattaaactggcggatgcggctggggctacatacgttgccaggatcacaacctaccatgtgaaagaggcggtaaagctgattgagaggggactggaaaataaaggcttttcgcttattgagggaatcagcgcatgtccgaactattatggtcgcaagaacaaaaaggcggcgcggtag

SEQ ID NO: 53926 - protein, 227 aa, Unknown
  Obtained from environmental sample
  DOMAIN (62)...(210): Thiamine pyrophosphate enzyme, C-terminal TPP binding domain
  misc_feature (1)..(227): Xaa is any amino acid
MADSIPASKLVTASNLIKRNLRVDKLPHIWCPGCGNGILMRAVAQAIENKELDKTKVCIVSGIGCSSRAAGYMNFNTLHTTHGRALAFATGIKLANPELIVIVITGDGDATAIGGNHFIHAARRNIGITTIVFNNSIYGMTGGQYSPLTPTNDFATTAPYGNVDRPFDIIKLADAAGATYVARITTYHVKEAVKLIERGLENKGFSLIEGISACPNYYGRKNKKAAR

SEQ ID NO: 53927 - DNA, 519 bp, Unknown
  Obtained from environmental sample
  misc_feature (1)..(519): n is a, c, g, or t
atgcaaacagaacttagattaagcggttcaggcgggcaggggcttatacttgcgggcgtaattctggcggaatccgccttgctcgacggcaagcaggcaatccagtctcagtcatacggcccggaggcacggggcggttcgagcaaggccgaggtcatcataagcgatggcgagattgattttgtgaaggttcagaaatgcgatatgctcctctgcctgacccaggaagcttacgacaagtacggtaaagactttacccgagtcctgattatggatgaaaggataacaatgaaatatcctgagcctgaaaaagttttaaggctccccatcctggataccgccgctgaaaaaatgcagaagcccatggttgccaatattatagcccttggagcgattaacggctttctcaaccttgtcagcaaagaatcccttttaaagtcagttttggacagcgtgcccaggggaacagaggagctgaacaagcaggcgcttgagtctgggtatgggctggttgagtag

SEQ ID NO: 53928 - protein, 172 aa, Unknown
  Obtained from environmental sample
  DOMAIN (11)...(169): Pyruvate ferredoxin/flavodoxin oxidoreductase
  misc_feature (1)..(172): Xaa is any amino acid
MQTELRLSGSGGQGLILAGVILAESALLDGKQAIQSQSYGPEARGGSSKAEVIISDGEIDFVKVQKCDMLLCLTQEAYDKYGKDFTRVLIMDERITMKYPEPEKVLRLPILDTAAEKMQKPMVANIIALGAINGFLNLVSKESLLKSVLDSVPRGTEELNKQALESGYGLVE

SEQ ID NO: 53929 - DNA, 543 bp, Unknown
  Obtained from environmental sample
  misc_feature (1)..(543): n is a, c, g, or t
ttggctgttggctgttggctgttggctgttggctgttggctgttggctgttggctgttgcccgattgcccgattgcccgattgcccgattgcccgattgcccgattgcccgattgcccgattgcccgattgcccgattgcccgattgcccgattgcccgattgcccgattgcccgattgcccgattgcccgattgcccagatcattcgcaaaaaatgccgtaggcattttttgcgttagagaattatacaaaataaaagagaaaaaagaaaagggaaaaaaggaagataaagacaagatactttcatcttgcttttttctttcttcattacgcccaccgctcgggctaaagccctcgcgcattattcggcttaccgggaagttttcctgggctcccgcattgccgaatatatataaagaacacggcttaacgccgtgcctcatatgcgtattttttgtcttgcatacgaaagccatgagaaaaattatccaaaatttgaaaaaaaagtatagagtaaatattaacaattttttcgtgcgttaa

SEQ ID NO: 53930 - protein, 180 aa, Unknown
  Obtained from environmental sample
  misc_feature (1)..(180): Xaa is any amino acid
MAVGCWLLAVGCWLLAVGCCPIARLPDCPIARLPDCPIARLPDCPIARLPDCPIARLPDCPIARLPRSFAKNAVGIFCVRELYKIKEKKEKGKKEDKDKILSSCFFLSSLRPPLGLKPSRIIRLTGKFSWAPALPNIYKEHGLTPCLICVFFVLHTKAMRKIIQNLKKKYRVNINNFFVR

SEQ ID NO: 53931 - DNA, 378 bp, Unknown
  Obtained from environmental sample
  misc_feature (1)..(378): n is a, c, g, or t
ttgttaattggaggttttatgaatatcggattggaaaaaagccgtaaatttgccatacggatatacaacctatacaagcatttatgcgatgaaaaacacgaatatacgcttgctaaacagctattgcgctctggtacatccataggagcaaacctcaccgaagcccaatattcagttagccgtaaagaatttttagtaaaagttaaaatatctctcaaagaatgtgctgaaactgaatactggcttgacttgctcaaggaaaccggactattaagccagaaggaatacgacagtataattccagactgcaaagaaatattgaaactgcttatagctacgactaaaacacttacagatcaggtaacaggtaacaagtaa

SEQ ID NO: 53932 - protein, 125 aa, Unknown
  Obtained from environmental sample
  DOMAIN (4)...(113): S23 ribosomal protein
  misc_feature (1)..(125): Xaa is any amino acid
MLIGGFMNIGLEKSRKFAIRIYNLYKHLCDEKHEYTLAKQLLRSGTSIGANLTEAQYSVSRKEFLVKVKISLKECAETEYWLDLLKETGLLSQKEYDSIIPDCKEILKLLIATTKTLTDQVTGNK

SEQ ID NO: 53933 - DNA, 1218 bp, Unknown
  Obtained from environmental sample
  misc_feature (1)..(1218): n is a, c, g, or t
atgaaaaaaattgaaaaatcttccaaattggaaaatgtatgttacgacatacgcggaccggtgctcaaggaagcaaggcggcttgaagaagaaggttttaaaataataaaactcaatataggcagtcccgcagcttttggactgaacacgccggatgaaattgtccacgatatgattgtaaatttgcaaaacgcccaggcttacggcgaatcacgcgggcttttttccgcgcgtaaagccgttatgcaggacttccaatccaagggagtaatggatgtggaaattgatgatattttcatcgggaacggtgtaagcgaattaatatcgatgtcgatgcaggctctccttgattcaggcgatgaggttttaattccaatgccggattatccgctatggacagccgccgttacccttgcgggcggcaagccggttccctatctttgcgatgaatcggcggattggaaccccgttttagacgatatccgctctaaaattactccaaaaacaagggcgattgtggtaattaaccccaataacccgacaggcgcggtttatgaccgttccgttctggaaggaatcgctcaaattgccagagaaaacgacttaatcgtatatgccgatgaaatttacagccgtattacctatgaagacgcggtacatatcccattttccacaatagcgccggatatttttacagtcacttttgacggattaagcaaggcgtggcgcgcgaccggcttccgcgcgggctggatggttctttccggtaacaaaaaatgcgccgccggttatgtcgaggggcttgatatgcttgcaagcatgcgtctctgccccaatatgcccgctcaatacggcatccaaaccgcgcttggcggctatcagagcattaaagaccttattcttcccggcggcagattgaaagagcagagggacacggcggttagcatggtcaacgaaatccccggtctttccgtagtaaaacccaaaggcgctctttattgttttccaaaagtagacattaaacgctttaatataaaaaatgacgaaaagtttatgctggatttactgcatagccagcacctgctccttgttcacggaaccggctttaactggaaagatcccgaccacttccgcatcgtcttcctccccgacaaagccacccttacggatgctatgcgcagattaggcgtatttttggaaaaatataaacaaaattaa

SEQ ID NO: 53934 - protein, 405 aa, Unknown
  Obtained from environmental sample
  DOMAIN (57)...(291): Beta-eliminating lyase
  misc_feature (1)..(405): Xaa is any amino acid
MKKIEKSSKLENVCYDIRGPVLKEARRLEEEGFKIIKLNIGSPAAFGLNTPDEIVHDMIVNLQNAQAYGESRGLFSARKAVMQDFQSKGVMDVEIDDIFIGNGVSELISMSMQALLDSGDEVLIPMPDYPLWTAAVTLAGGKPVPYLCDESADWNPVLDDIRSKITPKTRAIVVINPNNPTGAVYDRSVLEGIAQIARENDLIVYADEIYSRITYEDAVHIPFSTIAPDIFTVTFDGLSKAWRATGFRAGWMVLSGNKKCAAGYVEGLDMLASMRLCPNMPAQYGIQTALGGYQSIKDLILPGGRLKEQRDTAVSMVNEIPGLSVVKPKGALYCFPKVDIKRFNIKNDEKFMLDLLHSQHLLLVHGTGFNWKDPDHFRIVFLPDKATLTDAMRRLGVFLEKYKQN

SEQ ID NO: 53935 - DNA, 819 bp, Unknown
  Obtained from environmental sample
  misc_feature (1)..(819): n is a, c, g, or t
gtgttcggccaaactgccgatcatcgcgcttatcgccgggcgcgctgtttggcggaaacatggtgggtcgcgcccagcgcttactttatcgggattggggcgatcattagttccggcgtaatcttgaaaaaaacaaagatgtttaccggagacgtcgcgccttttgtcatggaactccccgcgtatcattggccgacggttattaacattctgcgcagtatgtgggagcgcggctggtcgttcatcaaaaaggccggaacaattattcttctagcgactataatcgtgtggttcgcgtctaactttggatggggagaagacggcttcggcatggttgatatggaaaaaagcgttttagcggccatcggcagcgttattgctcctatctttacccccctgggctggggtacttggcaggccgcggtggccgccctcacaggcttgatcgcgaaagaaaacattgtaggtacattcggcatactctacggctttggcgaggcttccgagaatggtgcggaaatatggagcgccttagcggcaagttttaccaccctggccgcgtactccttcctggtgtttaacctgctgtgcgccccctgttttgccgcaatgggcgcaatcaaacgggagatgaacaacgccaaatggttctgggcggctatcggctatcagtgcggtttagcctatatcgtttcgctgtgcatctatcaattcggaatgttattttccggtaattttgggttcggaacgttagcggcgtttcttctcaccgcaggattcttgtatatgctgttccgtccggcgcacaaatataattaa

SEQ ID NO: 53936 - protein, 272 aa, Unknown
  Obtained from environmental sample
  DOMAIN (82)...(215): Nucleoside recognition
  misc_feature (1)..(272): Xaa is any amino acid
MFGQTADHRAYRRARCLAETWWVAPSAYFIGIGAIISSGVILKKTKMFTGDVAPFVMELPAYHWPTVINILRSMWERGWSFIKKAGTIILLATIIVWFASNFGWGEDGFGMVDMEKSVLAAIGSVIAPIFTPLGWGTWQAAVAALTGLIAKENIVGTFGILYGFGEASENGAEIWSALAASFTTLAAYSFLVFNLLCAPCFAAMGAIKREMNNAKWFWAAIGYQCGLAYIVSLCIYQFGMLFSGNFGFGTLAAFLLTAGFLYMLFRPAHKYN

SEQ ID NO: 53937 - DNA, 1824 bp, Unknown
  Obtained from environmental sample
  misc_feature (1)..(1824): n is a, c, g, or t
gtgcgggtggtcaaaatcggcggggcggggccggttaagcgccggatcatggagatgggcatcaccaagggggtggaggtctatgtccgaaaagtggctccgctgggcgacccgatggaggtcacggttcggaactatcaactctccctcagaaaggcggacgtcgaactgattgaggttgaaaacagccgcttatacgttgtcggcgaagattcgcaagaaaacggcgctgtcagcaaagatagcgccgataaaaccgatgccctcggaaaagggccttccgtcaaggagagaaagcgcattaggatcgcgcttgccggaaatcccaacagcggcaaaaccacgctcttcaacgccctcaccggctcaaaccggtttgttggaaactggcccggcgtgacagtggaaaagatggagggaaggcttaagggctatgaggaggtggtcgtgacggacttgcccggcatatactccctctccccgtacacgccggaagaggtcgttgcccgtaattatttgatcgacgaacgccccgacgtcatcctcaacatcgtagacgccacgaatctggagcgcaacctgttccttacgacccagctcaccgagcttggcatacccgtcgtcgtggcgttgaacatgatggacgtcgtgcgtaaaaagggtgacaaaatcgataccgcgaggcttgccaaagagctcggctgccatgtcgaggagatatccgccctaaagggttacggcattgcggaagcttcggacgcggcggttaaggcggcggacggcgtgaagaccgtgccccagcacagcttctcgggcggcgtggagcacacgctggcgcacatcgaggaggcggtgctccacagcatgccggaagaatatcagcgctttttttccgtaaaactctttgagcgcgataagaaaatcgtcaaaaaactggagcttaaagccgaacagatcgcgcatatcgagcaggacatcaggcggttggagatggatatggatgacgactgcgagagcatcatcaccgccgagcgctacgcgtacgtcgattcaatcataagggattgcattgatatcaaaaacaagggtgcgctggacgtgtccgacaagattgacaaggtattgacgaaccgaatcttggcgctcccgattttcgcgcttgtcatgttcatcgtctacttcgtttctgtcaccacggtgggatcgatagcgaccggctgggccaacgacggcgtattcggagacggctggcgcctcttcggcataggttcgtccgcctacgaaaatgccgttggaaaattcgcggacggggcgataacggaaaagcccgacccgtctgatttcggcgtatgggttccgggcgttccggtgcttttgggcaagatactagaagccgtaaattgcgccgattggctgcggaacttaatcatagacggcattttgaagggcgtaggcgcggtgctgggcttcgtgccgcagatgtttatcctgttcatgttcctcgcctttttggaagcctgcggctacatggcgcgtatcgctttcataatggatagaatcttccgtaacttcgggctctctggcaaatctttcatacctatccttataggcacgggttgcagcgttccgggcattatggcgtcgcgcactattgagaacgaccgcgaccganagatgactgtcataaccacctccttcataccgtgttcggccaaactgccgatcatcgcgcttatcgccgggcgcgctgtttggcggaaacatggtgggtcgcgcccagcgcttactttatcgggattggggcgatcattagttccggcgtaa

SEQ ID NO: 53938 - protein, 607 aa, Unknown
  Obtained from environmental sample
  DOMAIN (98)...(289): Elongation factor Tu GTP binding domain
  misc_feature (1)..(607): Xaa is any amino acid
MRVVKIGGAGPVKRRIMEMGITKGVEVYVRKVAPLGDPMEVTVRNYQLSLRKADVELIEVENSRLYVVGEDSQENGAVSKDSADKTDALGKGPSVKERKRIRIALAGNPNSGKTTLFNALTGSNRFVGNWPGVTVEKMEGRLKGYEEVVVTDLPGIYSLSPYTPEEVVARNYLIDERPDVILNIVDATNLERNLFLTTQLTELGIPVVVALNMMDVVRKKGDKIDTARLAKELGCHVEEISALKGYGIAEASDAAVKAADGVKTVPQHSFSGGVEHTLAHIEEAVLHSMPEEYQRFFSVKLFERDKKIVKKLELKAEQIAHIEQDIRRLEMDMDDDCESIITAERYAYVDSIIRDCIDIKNKGALDVSDKIDKVLTNRILALPIFALVMFIVYFVSVTTVGSIATGWANDGVFGDGWRLFGIGSSAYENAVGKFADGAITEKPDPSDFGVWVPGVPVLLGKILEAVNCADWLRNLIIDGILKGVGAVLGFVPQMFILFMFLAFLEACGYMARIAFIMDRIFRNFGLSGKSFIPILIGTGCSVPGIMASRTIENDRDRXMTVITTSFIPCSAKLPIIALIAGRAVWRKHGGSRPALTLSGLGRSLVPA

SEQ ID NO: 53939 - DNA, 456 bp, Unknown
  Obtained from environmental sample
  misc_feature (1)..(456): n is a, c, g, or t
atgaaaacgtttaaagggagagtagtagttccttccggggacggaaaagaagttaacgccgaggcgctggtttcaagcaagggctttaatacgctggccagtttccagaaggctttgatgttcggcgacaaacaggcgcgttgctcggatcagaacaacggcgatatttacggcaagccaatggcgggaaaggccctgtgccttccgcagactatcggttccaccaccggcggcatggtgcttttctgcgccgcctcaatggagcgtcaacccgcctgcctgcttttctccaagcccattgattccctcgccgccgccggcgcgattcttgccggtgtctggacggacaagcccatgcttacgattgattccctgggcgatgaatttcttgcggcggtcaaatcaggttcgcgcgtaaaagctctatgcgacggcacggtggaagtggatagttga

SEQ ID NO: 53940 - protein, 151 aa, Unknown
  Obtained from environmental sample
  DOMAIN (1)...(149): Protein of unknown function DUF126
  misc_feature (1)..(151): Xaa is any amino acid
MKTFKGRVVVPSGDGKEVNAEALVSSKGFNTLASFQKALMFGDKQARCSDQNNGDIYGKPMAGKALCLPQTIGSTTGGMVLFCAASMERQPACLLFSKPIDSLAAAGAILAGVWTDKPMLTIDSLGDEFLAAVKSGSRVKALCDGTVEVDS

SEQ ID NO: 53941 - DNA, 729 bp, Unknown
  Obtained from environmental sample
  misc_feature (1)..(729): n is a, c, g, or t
gtggataaagtcgtaattgaaaatggcgcggttactggagtaaagctggaaaatgagactttgaacaccgatgccgtgattgttacgcaggaaactatcgccgcgcttggcaagttattcgacacccctccgcaagacgagtggctgcaggagctgcgtgaaaaaacaaaacccgccgtttgcacttttaccggcattggtgtccgcgcgcaattgcctgagactataccggcatggcagcttgaggagccgataaaatacgccggtacagaaataacagaaatcgggtttagcaattatgccggatatgaaggctatgcgccaaaaggctgcgccgctcttaccaccgcgtttttgggcgatacctatgacttctggaagaaggcaaaagaggaaggccgttataatgaagaaaagcgcgtactggctgaacaaataagagttgcgctttgccggaagtttccccaggcggaggggaatatcgaggttatcgacattgccacgcctttaacatacgagcgttataccggtgcgtatcacggctcctggatgaaaatccacggccccggcgaaaaaatgaaaatctacccggggtctgtgaaaagcgtcagcggcttatatttctccggtcacagaattatatcgcctggcgggcttccttcagcgctggccgcaggacgcatggctgcacagatggtctgccgtcagtttgatacggtgtttatgtaa

SEQ ID NO: 53942 - protein, 242 aa, Unknown
  Obtained from environmental sample
  misc_feature (1)..(242): Xaa is any amino acid
MDKVVIENGAVTGVKLENETLNTDAVIVTQETIAALGKLFDTPPQDEWLQELREKTKPAVCTFTGIGVRAQLPETIPAWQLEEPIKYAGTEITEIGFSNYAGYEGYAPKGCAALTTAFLGDTYDFWKKAKEEGRYNEEKRVLAEQIRVALCRKFPQAEGNIEVIDIATPLTYERYTGAYHGSWMKIHGPGEKMKIYPGSVKSVSGLYFSGHRIISPGGLPSALAAGRMAAQMVCRQFDTVFM

SEQ ID NO: 53943 - DNA, 924 bp, Unknown
  Obtained from environmental sample
  misc_feature (1)..(924): n is a, c, g, or t
atggtattatacgcaaaagatggctgggccgctgaggtaagtcttgagctaatctgcaaggcaagggaacttgctgacagactcggagttgaagttagcgccgctctgtttggggctgaggtaaaaggagaagttttaaaacttgcgagctttggtgcggacagagtatacattgccgaagatgcgcggcttagatattacaccccggttccatacagcaaattaatgatcaacgtaatcaaggatcataagccgcaaattgtcttgttcggagcgactatcgaaggccgggatcttgcgccgcgtgtcgcctctaatttaatggttgggcttaccgccgactgtaccgatctgcaaataggcgatcacacccgggacgaaatcgaatacaaagacattctttaccaaatacttcccacgttcggcggcaatattatcgcgacgattgtcagcccccaaaaaaagccgcagatggcaactgttcgcgaaggcgttatgcgaatgactgtaggcgacaattcgcgcagggcgcagactgtcccggtttctgccaatctcggcgctgacgatttcccgagtgaaattattgatcgcgtaatggaagaaaagacgctggatcttaaaagtgcgcaaattattgtatcgggcggatttggagtcggaaacaattttgccctggtaaaggaacttgcgcatactctcggcgccgaggtgggcgctactcgcgccgcgattgatgccggttttattggcagggaacatctgattgggcagacgggcgctactgtccacccaaagctttatatagcgtgcggcatttcgggggcgattcagcatcgagccggtatggacaattcttcgcgtatcatcgcgattataatgatccggaagcgccgattttcggcattgcccattacggaatag

SEQ ID NO: 53944 - protein, 307 aa, Unknown
  Obtained from environmental sample
  DOMAIN (7)...(194): Electron transfer flavoprotein domain
  misc_feature (1)..(307): Xaa is any amino acid
MVLYAKDGWAAEVSLELICKARELADRLGVEVSAALFGAEVKGEVLKLASFGADRVYIAEDARLRYYTPVPYSKLMINVIKDHKPQIVLFGATIEGRDLAPRVASNLMVGLTADCTDLQIGDHTRDEIEYKDILYQILPTFGGNIIATIVSPQKKPQMATVREGVMRMTVGDNSRRAQTVPVSANLGADDFPSEIIDRVMEEKTLDLKSAQIIVSGGFGVGNNFALVKELAHTLGAEVGATRAAIDAGFIGREHLIGQTGATVHPKLYIACGISGAIQHRAGMDNSSRIIAIIMIRKRRFSALPITE

SEQ ID NO: 53945 - DNA, 795 bp, Unknown
  Obtained from environmental sample
  misc_feature (1)..(795): n is a, c, g, or t
ttgcagttcgcaggtgggcgaaccgtgaatgcccagcttgtgctccagccgcctgataatcattgtcggcttcgccgactcgtcgtcgcgcttgtaaatgaagaacgaaagccccctcgcgccctttcccttttcctcactgcgggcaagcaccagcccgatagtgccgcagccgttggtgataaagcgtttaacgccgttcagataccacttgccgtccgcgccctgcacggcctgagggttcaccgactgaagatcgcttcccgcgtccggctcggtaagaaccatcgccgaatcccattcgccagagcagagtttcggcagataccgcgtcttctgatcttccgaggcgaatttgttaatcgttccggcgttatcctgctggagtccgaaattgaggaaagagccgtccgccctcgcggcaatatccgcggcaatggtgagtatcgtgttgggcatgttaaggccgccgtactggcggggaatgacaaagcccatcatgtcggctttagccagcatatccagcgcctttttggtcgccgggtgaagcgtcacctggttgttggcgagggtcgggcccgcctcatcaacggccggagcgttaggcgccatccactggcctgcgatttcgccgatgatgttcagcaccatgcggtacgattctttcgcgtcctgaacgtccttcggcgcgtgggggtactgcttcgcctggctgaaattttcttctttaagatgaatgatgcgatccagatcaagatgctccagttggaacaatatatcttcgttatctgttaa

SEQ ID NO: 53946 - protein, 264 aa, Unknown
  Obtained from environmental sample
  misc_feature (1)..(264): Xaa is any amino acid
MQFAGGRTVNAQLVLQPPDNHCRLRRLVVALVNEERKPPRALSLFLTAGKHQPDSAAAVGDKAFNAVQIPLAVRALHGLRVHRLKIASRVRLGKNHRRIPFARAEFRQIPRLLIFRGEFVNRSGVILLESEIEERAVRPRGNIRGNGEYRVGHVKAAVLAGNDKAHHVGFSQHIQRLFGRRVKRHLVVGEGRARLINGRSVRRHPLACDFADDVQHHAVRFFRVLNVLRRVGVLLRLAEIFFFKMNDAIQIKMLQLEQYIFVIC

SEQ ID NO: 53947 - DNA, 633 bp, Unknown
  Obtained from environmental sample
  misc_feature (1)..(633): n is a, c, g, or t
gtggaaggcgaagtttttggggaatgcgctggagacattcagcggcaatacgtccgaccgccggaagttggaatctctgcgccaagagaacgatcggctggtacatatggtcggggagctgacgatcgacaacaacttcttaaaaaaaaacttgaagaagttgaacctgttgtgaggcaaaaaatggtggaaaaacaagatgaacggagcctatctcggcagtgccgcctcctttctgtcgggcgtacgtccgtgtactaccgcccccaagaaaacggccggacgctggatttgatgcggcggatagacgaactttacaccgaagacccgacctacggtgcacggcggatgtgcgccgcattgcgcggcaggggcgttaaaatcggtcggtataaggtacggcggttgatggaaaagatgggcttggaggccatttaccgcaaacccaaactgtccgaaccgcaccccgaccacaaaatttatccgtacctattgcgcggagtaacggttacccgtgtcaatcaggtctggagcacggacatcacgtacatccggttgcggcacggctttgtgtatcttacggctgttatcgactgggtgcgccagttcggcgcgtgtaatatagcgtggtga

SEQ ID NO: 53948 - protein, 210 aa, Unknown
  Obtained from environmental sample
  misc_feature (1)..(210): Xaa is any amino acid
MEGEVFGECAGDIQRQYVRPPEVGISAPRERSAGTYGRGADDRQQLLKKKLEEVEPVVRQKMVEKQDERSLSRQCRLLSVGRTSVYYRPQENGRTLDLMRRIDELYTEDPTYGARRMCAALRGRGVKIGRYKVRRLMEKMGLEAIYRKPKLSEPHPDHKIYPYLLRGVTVTRVNQVWSTDITYIRLRHGFVYLTAVIDWVRQFGACNIAW

SEQ ID NO: 53949 - DNA, 330 bp, Unknown
  Obtained from environmental sample
  misc_feature (1)..(330): n is a, c, g, or t
atgccaagaaaggccacaggagcgaagctgtccggtacccggaagacgtatgacgacgcattcaaagtgaaggtcgtcctagaggcgttacgtgagacgatgccgctcagcgaacttgcgtcgaagtaccaagtccaccccaatcagatcagccagtggaaggcgaagtttttggggaatgcgctggagacattcagcggcaatacgtccgaccgccggaagttggaatctctgcgccaagagaacgatcggctggtacatatggtcggggagctgacgatcgacaacaacttcttaaaaaaaaacttgaagaagttgaacctgttgtga

SEQ ID NO: 53950 - protein, 109 aa, Unknown
  Obtained from environmental sample
  DOMAIN (14)...(99): Transposase
  misc_feature (1)..(109): Xaa is any amino acid
MPRKATGAKLSGTRKTYDDAFKVKVVLEALRETMPLSELASKYQVHPNQISQWKAKFLGNALETFSGNTSDRRKLESLRQENDRLVHMVGELTIDNNFLKKNLKKLNLL

SEQ ID NO: 53951 - DNA, 819 bp, Unknown
  Obtained from environmental sample
  misc_feature (1)..(819): n is a, c, g, or t
atgtcccttgatcaggttgtggaagatatctgcgcttccatcgccaaaagagccgaaaacaaagaaaacttcggagtggttctgattccggagggactgattgaatttattccggaaataaaacttcttatcgaagagctgaacgatgccatggctttgaacgacggtgaaatcaccaaatttacttcattaattgatcagctctactggctgagccgcgaaataacgccggagtcatacaagcttcttcagagcctgcctccggaaatatccaggcagctgttaatggacagggacccgcacgggaatgttcaggtttcccgtatcgaaacagaaaagctcttgatgggaatggtggaaaagcgccttgcaaaattaaaggaagaaggcctgtacaaagggactttctcggccatggggcatttcttcggttacgagggccgctgcgcttttccctccaattttgacgccgattactgttactcgctgggttacagcgcgttcgcgcttatcgcggcagggctaactggctatatctccagcattaaaaacctgaccgcgcctgcaagtgaatgggtagcagggggaattccccttaccatgatgatgaacctggagcaaaggcacggctccaaaaagccggtcataaaaaaggctctggttgacttaaacggggaacctttcaaggtatttgataatgagcgggacggttgggcggtaaaaacttcatatcattatcctggcgcaattcaatactatgggccgcctgaagtttgcgatcaaccgactatgactttgaagctggaaaagaagaagtaa

SEQ ID NO: 53952 - protein, 272 aa, Unknown
  Obtained from environmental sample
  misc_feature (1)..(272): Xaa is any amino acid
MSLDQVVEDICASIAKRAENKENFGVVLIPEGLIEFIPEIKLLIEELNDAMALNDGEITKFTSLIDQLYWLSREITPESYKLLQSLPPEISRQLLMDRDPHGNVQVSRIETEKLLMGMVEKRLAKLKEEGLYKGTFSAMGHFFGYEGRCAFPSNFDADYCYSLGYSAFALIAAGLTGYISSIKNLTAPASEWVAGGIPLTMMMNLEQRHGSKKPVIKKALVDLNGEPFKVFDNERDGWAVKTSYHYPGAIQYYGPPEVCDQPTMTLKLEKKK

SEQ ID NO: 53953 - DNA, 411 bp, Unknown
  Obtained from environmental sample
  misc_feature (1)..(411): n is a, c, g, or t
atgttctattttgtagacaaaaccccaaactgccattacaataaaaatcattacgccatgtcatatattaacaagaacagggaagtcctgcttaatcaatatccgggtctctgggaagatattaattccaaaagcgatgataacgaattaaaagatattattgtagaaacggcaaagacaggcgatcctacaatgcaaattaacggaatgtatattcactctccgcgcgatccgttacgtgaaggtcagcgtctagcgcaggcttgcggagaaaacgcagacggcgaaaaaaaagccgttgtaattctaggctttgggcttggttacgccgctcaagcggctgcggaaatgggtcattgcgtaattgtggcggaaaaacataaggacctgctgataaaagcgctgaggtag

SEQ ID NO: 53954 - protein, 136 aa, Unknown
  Obtained from environmental sample
  misc_feature (1)..(136): Xaa is any amino acid
MFYFVDKTPNCHYNKNHYAMSYINKNREVLLNQYPGLWEDINSKSDDNELKDIIVETAKTGDPTMQINGMYIHSPRDPLREGQRLAQACGENADGEKKAVVILGFGLGYAAQAAAEMGHCVIVAEKHKDLLIKALR

SEQ ID NO: 53955 - DNA, 843 bp, Unknown
  Obtained from environmental sample
  misc_feature (1)..(843): n is a, c, g, or t
ttgatgaagcggtattttactaatattatagttaatatgaacgacaaatttccatttcgtttttttgtggtaaccatattatggtcgtggttgtttttcctgcctttaatacttaatggttatgggatcatatatattgataataatattctccccgtattaactcctttaataatagttattggggcatttggtcctacgataggagtatgctattctttacgcactctgaatgggaaaggagcaataaagaaatattttaagttgtttttgtccttaaaatttggttggaaagtatggttgtcaatttttattattttgggtgttcccgcttttttggcttggattataccggaattttttggtcatgccagactttcaccgtatttgcctaatccatttttgtttccgatttatttaattttttgtatgttctttggaggcggtcaggaagaaatcggctggcgcggatatataatgccgtatttggaaaaaaaattcggattaattatcagcccgtttgtttttggaattatatgggcggtttggcatattcccttatggtttatacccggatcaactcaagtttatatgaattttttcggctttactttattgacgattggatattcatatatttttgaatggataataaaaacatccggtaagcgtctattgtccggtcttgtatcacacggaacggcaaacgctttttccgcgctttttccgtttcttgcaatggagccaaatgcaatacagatacgattttggatatattgtattcttatttttgttattggcatagtaatagttgtattgagaagttataaaagtaaagtgtaa

SEQ ID NO: 53956 - protein, 280 aa, Unknown
  Obtained from environmental sample
  DOMAIN (138)...(243): CAAX amino terminal protease family
  misc_feature (1)..(280): Xaa is any amino acid
MMKRYFTNIIVNMNDKFPFRFFVVTILWSWLFFLPLILNGYGIIYIDNNILPVLTPLIIVIGAFGPTIGVCYSLRTLNGKGAIKKYFKLFLSLKFGWKVWLSIFIILGVPAFLAWIIPEFFGHARLSPYLPNPFLFPIYLIFCMFFGGGQEEIGWRGYIMPYLEKKFGLIISPFVFGIIWAVWHIPLWFIPGSTQVYMNFFGFTLLTIGYSYIFEWIIKTSGKRLLSGLVSHGTANAFSALFPFLAMEPNAIQIRFWIYCILIFVIGIVIVVLRSYKSKV

SEQ ID NO: 53957 - DNA, 315 bp, Unknown
  Obtained from environmental sample
  misc_feature (1)..(315): n is a, c, g, or t
ttggaggaacatggcatccgggtcagagaagtggtgaagatcgggttgaagcgtccgcacatcctggacttgctgcgcaacggcgatatccatatggtcgtcaataccgtgagcgggccgcattcagcgcgcgatgccacgtccatccgctatgaagccatctcgcgccagatcgcgctgctgaccaccgtgacagccttggccgccgccgtggaaggactggaggtgcggcagaccgacaagcgcactgtggccccgttgcaggattattacgccggcgtggtggaaggcaaggtgttgcgccggaagcgctga

SEQ ID NO: 53958 - protein, 104 aa, Unknown
  Obtained from environmental sample
  DOMAIN (2)...(62): MGS-like domain
  misc_feature (1)..(104): Xaa is any amino acid
MEEHGIRVREVVKIGLKRPHILDLLRNGDIHMVVNTVSGPHSARDATSIRYEAISRQIALLTTVTALAAAVEGLEVRQTDKRTVAPLQDYYAGVVEGKVLRRKR

SEQ ID NO: 53959 - DNA, 834 bp, Unknown
  Obtained from environmental sample
  misc_feature (1)..(834): n is a, c, g, or t
atgtcgagggagaccttgcacacggtatcgtacacgccgtcgccgagcaatttcctgccctcggcttgggagatgttttcatcgtgggttcccagtcccgccttggtggagggggtaaacagcgctgcgtccagtttgggcggattcgcgcagatccgccgggagcttgatgccgcagaggctgccggttttcttatactccttccagccggatccggtgatgtgcccgcgcacgatgcattccatcggcaggggcgcggcttttttcaccagcacggatcgcccttccagttcgtccgcgtagggcgcgagcttggccggatattcccggtgattcgcggtgatgaggtggttggggatgatgtgcctgaacctgtccatccagaacagggtgatccggttcaataccactcccttgtaggggatggggctgctcatgatcacgtcaaaggcggacatgcgatccgttgtgatcatcaggagcgtgttcctgtcgatctcgtaaatgtcgcgcaccttgccgcgcgccagcagggggtattccctgatttcggtctggcggatcactttcatgcttttctcctcatgcggcggacggcaaagcccggatacgcgccgctcagcgcttccggcgcaacaccttgccttccaccacgccggcgtaataatcctgcaacggggccacagtgcgcttgtcggtctgccgcacctccagtccttccacggcggcggccaaggctgtcacggtggtcagcagcgcgatctggcgcgagatggcttcatagcggatggacgtggcatcgcgcgctgaatgcggcccgctcacggtattga

SEQ ID NO: 53960 - protein, 277 aa, Unknown
  Obtained from environmental sample
  misc_feature (1)..(277): Xaa is any amino acid
MSRETLHTVSYTPSPSNFLPSAWEMFSSWVPSPALVEGVNSAASSLGGFAQIRRELDAAEAAGFLILLPAGSGDVPAHDAFHRQGRGFFHQHGSPFQFVRVGRELGRIFPVIRGDEVVGDDVPEPVHPEQGDPVQYHSLVGDGAAHDHVKGGHAIRCDHQERVPVDLVNVAHLAARQQGVFPDFGLADHFHAFLLMRRTAKPGYAPLSASGATPCLPPRRRNNPATGPQCACRSAAPPVLPRRRPRLSRWSAARSGARWLHSGWTWHRALNAARSRY

SEQ ID NO: 53961 - DNA, 495 bp, Unknown
  Obtained from environmental sample
  misc_feature (1)..(495): n is a, c, g, or t
atgaaagtgatccgccagaccgaaatcagggaataccccctgctggcgcgcggcaaggtgcgcgacatttacgagatcgacaggaacacgctcctgatgatcacaacggatcgcatgtccgcctttgacgtgatcatgagcagccccatcccctacaagggagtggtattgaaccggatcaccctgttctggatggacaggttcaggcacatcatccccaaccacctcatcaccgcgaatcaccgggaatatccggccaagctcgcgccctacgcggacgaactggaagggcgatccgtgctggtgaaaaaagccgcgcccctgccgatggaatgcatcgtgcgcgggcacatcaccggatccggctggaaggagtataagaaaaccggcagcctctgcggcatcaagctcccggcggatctgcgcgaatccgcccaaactggacgcagcgctgtttaccccctccaccaaggcgggactgggaacccacgatga

SEQ ID NO: 53962 - protein, 164 aa, Unknown
  Obtained from environmental sample
  DOMAIN (11)...(164): SAICAR synthetase
  misc_feature (1)..(164): Xaa is any amino acid
MKVIRQTEIREYPLLARGKVRDIYEIDRNTLLMITTDRMSAFDVIMSSPIPYKGVVLNRITLFWMDRFRHIIPNHLITANHREYPAKLAPYADELEGRSVLVKKAAPLPMECIVRGHITGSGWKEYKKTGSLCGIKLPADLRESAQTGRSAVYPLHQGGTGNPR

SEQ ID NO: 53963 - DNA, 1764 bp, Unknown
  Obtained from environmental sample
  misc_feature (1)..(1764): n is a, c, g, or t
atggataataagatgattaaccttaagataaacggacggcccgtgaccgtgcccgccgggactacgatcctgcaggccgcccgtcagatagcggtgaacatccccaccctctgctggcatcccgaccttgaggcgtgggcctcctgcgggatatgcattgtgaaggcggagaattcgccgaagatgttgcgcgcctgcgccaccgccgtagaggaggggatgtccatcatcacccacgactctgagatagtggaggttcgcaaaacggtgatagagctgatcctctctacgcaccccaacgactgcctcgcctgcccgcgcaaccagaactgcgagttgcagaggctggccgccgagttcggcatccgcgaaaaaaccttcccgcagcgtctgcgcgacctgccggaagactcgtcaacgacttcgctggtgctcaacccggagaagtgcatactatgcggacgctgcgccaaagtatgccagaacctgcaaggcgtgtgggcgttggagttcctgagccgaggcgaaaagacgcgcatagcgcccgccgccgacgtccgcttgaacgacagcccctgcatacggtgcggccagtgttcggcccactgtcccgtgggcgcgatctacgagaagtcggaggagcatatcgtctggaacgccctccgcaaacccgacatgcatacggtggtgcagatagcccccgccgtccgcgtggccataggcgaggcgttcggtatgccctccggttcggtcgagacgggcaaactctacgccgcgttgcgtcagctcggcttcaaggcggtcttcgacaccaacttctccgccgacctcaccatcatggaggaggggagcgagttcgtggacaggttcacgaataggcgggacgacgctcccataccgctgatcaccacctgctgccccgcgtgggttgactacttagagaaattctactgcgacatgataccgtacttctctaccgcgaagtcgccgcaggcaatgctaggcgccctctccaagacctactacgcgcaaaagataggcgtagcgccggagaagattttcatggtctcgataatgccctgcaccgccaagaagttcgagatctcccgctccaaagagatgtcgtccagcggctacaaggacatcgacgtctctctcaccacacgcgagctgagccgtatgataaagtcggcgggcatagacttcaagaatctgccggaagagggcgccgactccatactcggcgagtacactggcgccgggacaatcttcggcgcgaccggcggcgtgatggaggccgcgttgcgtaccgcttatcatttgataacgaagaaagaactcgccgacgtaaacttcaaagacgtccgcggtttagagggcgtcaaagaagcgactgttgacgtagacggcacaaaggtgagggtagccgtagcccacggcatggtcaacatcgccgcggtgctcgacaaaatcaagaccgctctcgccgagggcaaggagaccccgtatcacttcgtagaggtaatggcctgccgaggcggttgcgtaggcggcggcggccagccctacggcgccgacgacaaggtacgcaaactccgcgccgacggtctgtatttggacgatgaaaagtccaagttccgctgctcccacaagaacccgcagatcgccaaggtctacgaggagttcttggaaaagccgctgtcccacaagtcgcacgagctgttgcacacgagctacgagccgaggccggagtatcggtggtag

SEQ ID NO: 53964 - protein, 587 aa, Unknown
  Obtained from environmental sample
  DOMAIN (8)...(72): 2Fe-2S iron-sulfur cluster binding domain
  misc_feature (1)..(587): Xaa is any amino acid
MDNKMINLKINGRPVTVPAGTTILQAARQIAVNIPTLCWHPDLEAWASCGICIVKAENSPKMLRACATAVEEGMSIITHDSEIVEVRKTVIELILSTHPNDCLACPRNQNCELQRLAAEFGIREKTFPQRLRDLPEDSSTTSLVLNPEKCILCGRCAKVCQNLQGVWALEFLSRGEKTRIAPAADVRLNDSPCIRCGQCSAHCPVGAIYEKSEEHIVWNALRKPDMHTVVQIAPAVRVAIGEAFGMPSGSVETGKLYAALRQLGFKAVFDTNFSADLTIMEEGSEFVDRFTNRRDDAPIPLITTCCPAWVDYLEKFYCDMIPYFSTAKSPQAMLGALSKTYYAQKIGVAPEKIFMVSIMPCTAKKFEISRSKEMSSSGYKDIDVSLTTRELSRMIKSAGIDFKNLPEEGADSILGEYTGAGTIFGATGGVMEAALRTAYHLITKKELADVNFKDVRGLEGVKEATVDVDGTKVRVAVAHGMVNIAAVLDKIKTALAEGKETPYHFVEVMACRGGCVGGGGQPYGADDKVRKLRADGLYLDDEKSKFRCSHKNPQIAKVYEEFLEKPLSHKSHELLHTSYEPRPEYRW

SEQ ID NO: 53965 - DNA, 615 bp, Unknown
  Obtained from environmental sample
  misc_feature (1)..(615): n is a, c, g, or t
gtgcagaccggcggcccctccggcggcgttatcaccgccgactacttggacacgcccatcgacttcgacaaccttgccaagctcggttccatcatgggatccggcggtatgattgtcatggacgaagacgactgcatggttgacgtgaccaagttctaccttgagtttacagtggacgagtcgtgcggtaagtgttctccttgtcgcgtcggcgggcgtcagctcttcaaccacttagagaagatcacaaacggcgaaggcacggaggaggacatccgcaagatgcgcctcataggcaaggccatgcagaaagcgtcgctttgcgctctcggtcagaccgcgcccaaccctgtcgtctccacgctccagtatttcgagagcgagtacatggcccacataaaggagcgcaggtgtccggccggcaagtgcaagaagatgttgcgcttctcaatagtggccgacaagtgcaaaggttgcggtctgtgcgcgaagaagtgtccggcgggctgtatcaaaggcgagataaagaagccgtatgtaatagactccgcagcgtgcataaagtgcggcgcgtgcgaggaggcgtgtaaattcaaggcagtcgtcaagaactaa

SEQ ID NO: 53966 - protein, 204 aa, Unknown
  Obtained from environmental sample
  DOMAIN (179)...(202): 4Fe-4S binding domain
  misc_feature (1)..(204): Xaa is any amino acid
MQTGGPSGGVITADYLDTPIDFDNLAKLGSIMGSGGMIVMDEDDCMVDVTKFYLEFTVDESCGKCSPCRVGGRQLFNHLEKITNGEGTEEDIRKMRLIGKAMQKASLCALGQTAPNPVVSTLQYFESEYMAHIKERRCPAGKCKKMLRFSIVADKCKGCGLCAKKCPAGCIKGEIKKPYVIDSAACIKCGACEEACKFKAVVKN

SEQ ID NO: 53967 - DNA, 888 bp, Unknown
  Obtained from environmental sample
  misc_feature (1)..(888): n is a, c, g, or t
atgctttttgggcgttcttcctcttatggaaccaagtttaaaagaaaaagaatcttgaagaacgtcttctttggggtaatgattcttgcttttctttcgcttttaccggttttttttctgaaaattagaagcgcaagccgaaatgaaagccgagagttaagggattcttttgaatccggcgcatttgaagccgcctatgagcagagtaaccagatgctgaagaaaaagcctctggatttctttctgctgacagtacacgggttttcggcctatcagcttgcaatcgcccagacaaacacttttgataccctttctttcattgataattgcatctggtcgcttagaaaggctctgctttcaaaggagaacgacggaagggttttttatgttctgggaaaggcgtactattataaaggggcggggtattcggatttggccgttagttaccttgaaaaagccagagcggccctgtacagagccgccgacattccagaataccttgggctggcctatgcctcgatgcgggatttccgcagcagcgtggaggcgttttctctggcactgacaggcgatgtttccccatctgatattttactgcttgccatcgcaaggtcgtaccttgcccttgatgaagcagagcaagcaaaagcatatttgatccgctgtctggaaataacaaaggattccaaaaccacagccgcggcgcgcctggttttgggcaacacgctggtaaaaaccggagatgttcagggggccgtgaaagagtatttgaaagttatcgaagaaaacgatgataatgccgaagcccattatcaacttggagaactgtacgcttgggaggggatgaaccagagcaagggcagaatggcgacgggcgatcagaattga

SEQ ID NO: 53968 - protein, 295 aa, Unknown
  Obtained from environmental sample
  misc_feature (1)..(295): Xaa is any amino acid
MLFGRSSSYGTKFKRKRILKNVFFGVMILAFLSLLPVFFLKIRSASRNESRELRDSFESGAFEAAYEQSNQMLKKKPLDFFLLTVHGFSAYQLAIAQTNTFDTLSFIDNCIWSLRKALLSKENDGRVFYVLGKAYYYKGAGYSDLAVSYLEKARAALYRAADIPEYLGLAYASMRDFRSSVEAFSLALTGDVSPSDILLLAIARSYLALDEAEQAKAYLIRCLEITKDSKTTAAARLVLGNTLVKTGDVQGAVKEYLKVIEENDDNAEAHYQLGELYAWEGMNQSKGRMATGDQN

SEQ ID NO: 53969 - DNA, 384 bp, Unknown
  Obtained from environmental sample
  misc_feature (1)..(384): n is a, c, g, or t
ttgctgcttgccgaagaaaactacaccgatgacacgatagcagaacaaaccgggctgagccggagagggcttgaacaattgcggcagcggtttgtcgaggaagggtttgaagcaacccttgaaggaaaaccgcgagggcacaggccaaaagtattgggaggggaagacgaggcgcgtttaatagcgcttgtttgcggccccaaaccggatgggcacacgcgctggtcattgcgacttttggcagacacttggaaaacattggcgtatacagacgtgaaaacggtatcgcatgaaacaataagaaggacgctaaaaaaaacgaaattaagccttggcaaagccaggagtggtgcatcccacctaaggaaacggaagagtttgtag

SEQ ID NO: 53970 - protein, 127 aa, Unknown
  Obtained from environmental sample
  misc_feature (1)..(127): Xaa is any amino acid
MLLAEENYTDDTIAEQTGLSRRGLEQLRQRFVEEGFEATLEGKPRGHRPKVLGGEDEARLIALVCGPKPDGHTRWSLRLLADTWKTLAYTDVKTVSHETIRRTLKKTKLSLGKARSGASHLRKRKSL

SEQ ID NO: 53971 - DNA, 1299 bp, Unknown
  Obtained from environmental sample
  misc_feature (1)..(1299): n is a, c, g, or t
ttgttattagacatggatccattagaccttgcccgcgggaaacagggttccaccggaagcgggttgtttgattatgtaaacgataggccctatgtttcatcttcatttatgagtactgcaatctcccgtgtttacggaaccgccatgtccggccgctgtgaaaaaaatcaatctttagcggacagcgcactggaactttccgccactcttgtcatgctaccctgccgcggtgataccgcaatgttggaaaaggttttcacgccattgggttataaagttaaatgggagaacggtcttttggacgagcgttttcccgaatggggagactgttgttacgtgaatttgactatcagcggtaaaatacggctacaggaccttctgcggcatatctatgtattgattcccgtttttgattaccgtaaacattactggataaacgataaagaaattgacaaactccttgcccacggttcaggctggctggaaaaccaccctgaaaaaaattttattacaaggcgttatttcaccaagttaggtcatttcacaaggcaggctcttgagcgtcttaaccgtctggataacggcgaaggcggcgcacagagtcctgtaacggaaagcgagtcggaaacggaatccgctatatcggtaaagataccccgccttaatgatcagcgactgtccgcagtattgaacgaactaaaaaacagcggcgtaaaatcggtactggacatgggatgcggcgaaggccgtttgctgcagcttctgatgaaggaaaaaaattttatcgccatagcgggaactgacgtatcagccgttatattgagcagggcagccgaaattcttaaacttgaccgcatgtcggaagatgtaaaaaagcgcgtaacgctgtttcaaagttctctttgttacagggacaaacgatttaaaaactacgatgctgtctctatggtggaagtgattgaacatctggatgaaaaccgccttcccgctcttgaggcggttgtctttgcagacgcggctccggcgacaattatcatcaccacgccaaattttgactataacgtaaattatacgggtcttagagaaaataaatttcgccacggcgaccatcgctttgaatggaaccgcttccaattccacgcatgggccgatgccgccgccgaccgcaataattactcggttcgctatgaagacattggcgaacaggacgaaaatcaaaatacgccgactcaaatggctgttttcaggaaaaacgctccccaaaaacaaacgtccgatgaaacggagagcgccgtatga

SEQ ID NO: 53972 - protein, 432 aa, Unknown
  Obtained from environmental sample
  DOMAIN (242)...(345): Methyltransferase domain
  misc_feature (1)..(432): Xaa is any amino acid
MLLDMDPLDLARGKQGSTGSGLFDYVNDRPYVSSSFMSTAISRVYGTAMSGRCEKNQSLADSALELSATLVMLPCRGDTAMLEKVFTPLGYKVKWENGLLDERFPEWGDCCYVNLTISGKIRLQDLLRHIYVLIPVFDYRKHYWINDKEIDKLLAHGSGWLENHPEKNFITRRYFTKLGHFTRQALERLNRLDNGEGGAQSPVTESESETESAISVKIPRLNDQRLSAVLNELKNSGVKSVLDMGCGEGRLLQLLMKEKNFIAIAGTDVSAVILSRAAEILKLDRMSEDVKKRVTLFQSSLCYRDKRFKNYDAVSMVEVIEHLDENRLPALEAVVFADAAPATIIITTPNFDYNVNYTGLRENKFRHGDHRFEWNRFQFHAWADAAADRNNYSVRYEDIGEQDENQNTPTQMAVFRKNAPQKQTSDETESAV

SEQ ID NO: 53973 - DNA, 1725 bp, Unknown
  Obtained from environmental sample
  misc_feature (1)..(1725): n is a, c, g, or t
ttgacagattggccgaggccaaaagaaacggcaggccgccccgccgggagttccttcaaaaacataaacgggccggtaacgctttcatccggcgattacctgtatatcaaagtaaccgccgaagacgggacaataaactattatcggtttaatattgaacaggaagcgcctcctcctcccgcaaaagtaaccgtaacgtttaacactgacggcggaagccccgcaatcgggccgatcaccatagataaagacagttccctgggaactcaattccctgctgcgccaacaaaagccaactacaacttcggcggctggttcaacgggaatatcgaatacacaagcgctacgacaataagcgcaagccttaccctgaccgcaaaatggaccttactatcggggggcgtgcccttacagagcatttcgctgggtaaaacctccacaactttaaccctgtattccaccgaacaattaaacccgacttttacccccgcggacgccacctataaaacaataacatggacaagcatcgccccaaatgtggcggctgtagacgcgaacggaaaaattaccgccgctggtgttaccgcctcgttaagcgaaaaatatacggttactccggcgacaggtacggcgacaattacaggaacaacagcagagggtataaccgtcagtattacggttaatacaaccgtgaggccgcagacggctacggttgattcggtgccggccatgaaagatcaattcagccaatattttatgatggggaatattgccggtggcgccaatgatataaacggaacaggaacaacggcggcacggcttaaacgccactacaatatccttaccgcggaaaatgtcatgaagcccagctatttaacaaacgccaggaacgcctctaccggagcgattacctacacatggaccaatcctgacaactttgtaaaggcgtgcacagataacaactttaaggtacatgggcacgtcctcctctggcacagccagaatccccaatgggtgtgggatcaaattgccaaaaaagacggaactatcgcgtcgggtatgactaaaactgccgctcttgatattatgaagaaatacattaccgaggtaatgacccatttcaaggggaaggtttattcctgggatgtgttgaatgaagctttccctgacaacgcaagttcctcggcaaactggaaagacgcgattcgcaaaggcgccagcggggaagggcaggatgcaaatccctggtatatagcaatcggttcggattttgtatacgaaggatttctcgccgcgcgtttagccgatcctaccgcgatactgtactacaacgactacaacaccgataactcaaacagggccaggttaatccgggatatggtgaaggaagtgaatgacaagtatttggctctgccttccggcagtaaaccctcaggcgatccagccggcaggctgcttattgaaggcattggaatgcaggagcatcacaataccggcgtgtcaaccgcctcaatcagggcctctataaacctgttcagaccgctgggcgtaaaaatttccgtcagcgaacttgacgtgctgtgccagggatatagtgagtacagttcaaaccccgccaaaaacaccgaggcgaattatcccgaaacatccaccaataccgtaaccaacaacgggtttgttaaagccgcccaactgtacggcgaatacatgaaactgtacatttga

SEQ ID NO: 53974 - protein, 574 aa, Unknown
  Obtained from environmental sample
  DOMAIN (136)...(227): Bacterial Ig-like domain (group 2)
  misc_feature (1)..(574): Xaa is any amino acid
MTDWPRPKETAGRPAGSSFKNINGPVTLSSGDYLYIKVTAEDGTINYYRFNIEQEAPPPPAKVTVTFNTDGGSPAIGPITIDKDSSLGTQFPAAPTKANYNFGGWFNGNIEYTSATTISASLTLTAKWTLLSGGVPLQSISLGKTSTTLTLYSTEQLNPTFTPADATYKTITWTSIAPNVAAVDANGKITAAGVTASLSEKYTVTPATGTATITGTTAEGITVSITVNTTVRPQTATVDSVPAMKDQFSQYFMMGNIAGGANDINGTGTTAARLKRHYNILTAENVMKPSYLTNARNASTGAITYTWTNPDNFVKACTDNNFKVHGHVLLWHSQNPQWVWDQIAKKDGTIASGMTKTAALDIMKKYITEVMTHFKGKVYSWDVLNEAFPDNASSSANWKDAIRKGASGEGQDANPWYIAIGSDFVYEGFLAARLADPTAILYYNDYNTDNSNRARLIRDMVKEVNDKYLALPSGSKPSGDPAGRLLIEGIGMQEHHNTGVSTASIRASINLFRPLGVKISVSELDVLCQGYSEYSSNPAKNTEANYPETSTNTVTNNGFVKAAQLYGEYMKLYI

SEQ ID NO: 53975 - DNA, 993 bp, Unknown
  Obtained from environmental sample
  misc_feature (1)..(993): n is a, c, g, or t
gtgccatttgagcaaggctctgacaacagggacgcgcctgaaatcacctttaaattgattcgccacgaatggaagcagtcccgccaggccggcattggcggaaggatcaacctgtcctgggaaatggttgaggaaactgtcatggaaagaagtatacgtccaggcagaagggaatactcgggtgttattcccttcactccttcaaccagcggcgaatacgaagtgaggctttcgagcaaggattcactgggccgttcagcgcaaacgcgttacaggttttatgtaaccggtgcgggctgggcgctgtggggcaggggcgattcggacagcatcaccctgaggccggacaagggctcctacgcgccgggagagacagccaaacttttggtgcaatctcccctgccaaaagggaagtacctccttacgcttgaaagggaaggcatcctcgaagagaagatcatcgagcttgacggctccgccctgaccatagacgttcccatcaaggaatcgtacataccgattgtgtatgccgccatcgcctcgtatacggtcagatccgggccgccgactcacacttactacgagcctgacctggacaagccaaaaggccttttcggcctgacaagcctttttgtggataacgaaaaccggcattatacaatcgagattgaagcttccaaaagcgtatacaggccggcagaacaggcggaggtaacgctgaaggtaagccagaatggaaagcccgctgccggcgtggagttgacctttatggcagttgaccgtggagttgttgatttaatcgactaccatgtgcctgaccctctggcatttttctacaaccccgataatttcccgcttggcgtgcggggcgctgacagccgctcgctgctcatcgatcccgttacttacagcatctcggatctccagggcggcgacgaggaagacaattccaaaatggaagagcggaaggattcagacccaccgcagttttag

SEQ ID NO: 53976 - protein, 330 aa, Unknown
  Obtained from environmental sample
  DOMAIN (107)...(269): Alpha-2-macroglobulin family N-terminal region
  misc_feature (1)..(330): Xaa is any amino acid
MPFEQGSDNRDAPEITFKLIRHEWKQSRQAGIGGRINLSWEMVEETVMERSIRPGRREYSGVIPFTPSTSGEYEVRLSSKDSLGRSAQTRYRFYVTGAGWALWGRGDSDSITLRPDKGSYAPGETAKLLVQSPLPKGKYLLTLEREGILEEKIIELDGSALTIDVPIKESYIPIVYAAIASYTVRSGPPTHTYYEPDLDKPKGLFGLTSLFVDNENRHYTIEIEASKSVYRPAEQAEVTLKVSQNGKPAAGVELTFMAVDRGVVDLIDYHVPDPLAFFYNPDNFPLGVRGADSRSLLIDPVTYSISDLQGGDEEDNSKMEERKDSDPPQF

SEQ ID NO: 53977 - DNA, 1215 bp, Unknown
  Obtained from environmental sample
  misc_feature (1)..(1215): n is a, c, g, or t
atgagttttgaaaaactgcttaggcctgcgtccgtcgccgtcgtcggcgcgtccgcgaagcccggtaaggtgggctacgaagtgctcaacaacatcattaacgacggtttttcggggcagatctacccgattaacccgacttcggccgagattctcggcaagaagtgctacaagacgctgaccgaggtgccgggcgagatcgacctcgtcgtcgtggtggtcgggcgcgatttggtgatcccggtgctcaaggagatggggcagaaggggagcaaggcggccatcatcatcaccgccgggttcggcgagacgggcgaggagggcaagaagctgcagaatgagatggttgagatcgtcaagcagcacgggatcacgatggtggggccgaactgtttgggggtgctcaacccgtggcacaagctcaacgcctccttcggcggggcggcgggggagccgggcgggatcgcgcttatctcccagtccggggcgctactcaccgccgtgcaggacatcgcggcgcgggagcagctcgggtggtcggtgctcgcctccatcggcaacaaggcctcgcttgacgaggtggagtgtctgcaggggctgaaaaacgataaaaacacgaaggttatcaccgcctaccttgagaacatcacgcgcgggcgcgacttcatccgcgaggcggaggagacgagcaaggagaagccgatagtcattctgaaggcggggcggacgagcgcgggcgctgcggcggcctcctcgcacacgggcagccttgccggagccgactccacctacgccgccgccttcgacagggtgggcgtgatccgggccgagtccatagagcatctcttcgacgtggccatggccttctcctacatgcccctgcccaagggcgacagggtcgcggttgtgaccaacgcgggcggccccggcatcatgatgtccgatgcgatcgagatggccggtttgaagatcgcccattttgacgacgccacgactaagaaattgttggagaccctcccgcccgccggttccgcccacaaccccgtggacgttctgggcgacgcgaagagcgagatgtacgggcaaggcgatggacatagtgatcgagagccccgaggtcgacagcttgatcgtggtgctcaccccgcagaagatgaccgacgaggacaacgtggccctaaagatggtggagctctccaagaagcacaaggataa

SEQ ID NO: 53978 - protein, 404 aa, Unknown
  Obtained from environmental sample
  DOMAIN (5)...(101): CoA binding domain
  misc_feature (1)..(404): Xaa is any amino acid
MSFEKLLRPASVAVVGASAKPGKVGYEVLNNIINDGFSGQIYPINPTSAEILGKKCYKTLTEVPGEIDLVVVVVGRDLVIPVLKEMGQKGSKAAIIITAGFGETGEEGKKLQNEMVEIVKQHGITMVGPNCLGVLNPWHKLNASFGGAAGEPGGIALISQSGALLTAVQDIAAREQLGWSVLASIGNKASLDEVECLQGLKNDKNTKVITAYLENITRGRDFIREAEETSKEKPIVILKAGRTSAGAAAASSHTGSLAGADSTYAAAFDRVGVIRAESIEHLFDVAMAFSYMPLPKGDRVAVVTNAGGPGIMMSDAIEMAGLKIAHFDDATTKKLLETLPPAGSAHNPVDVLGDAKSEMYGQGDGHSDREPRGRQLDRGAHPAEDDRRGQRGPKDGGALQEAQG

SEQ ID NO: 53979 - DNA, 462 bp, Unknown
  Obtained from environmental sample
  misc_feature (1)..(462): n is a, c, g, or t
gtgataaccttcgtgtttttatcgtttttcagcccctgcagacactccacctcgtcaagcgaggccttgttgccgatggaggcgagcaccgaccacccgagctgctcccgcgccgcgatgtcctgcacggcggtgagtagcgccccggactgggagataagcgcgatcccgcccggctcccccgccgccccgccgaaggaggcgttgagcttgtgccacgggttgagcacccccaaacagttcggccccaccatcgtgatcccgtgctgcttgacgatctcaaccatctcattctgcagcttcttgccctcctcgcccgtctcgccgaacccggcggtgatgatgatggccgccttgctccccttctgccccatctccttgagcaccgggatcaccaaatcgcgcccgaccaccacgacgacgaggtcgatctcgcccggcacctcggtcagcgtcttgtag

SEQ ID NO: 53980 - protein, 153 aa, Unknown
  Obtained from environmental sample
  SIGNAL (1)...(19)
  misc_feature (1)..(153): Xaa is any amino acid
MITFVFLSFFSPCRHSTSSSEALLPMEASTDHPSCSRAAMSCTAVSSAPDWEISAIPPGSPAAPPKEALSLCHGLSTPKQFGPTIVIPCCLTISTISFCSFLPSSPVSPNPAVMMMAALLPFCPISLSTGITKSRPTTTTTRSISPGTSVSVL

SEQ ID NO: 53981 - DNA, 684 bp, Unknown
  Obtained from environmental sample
  misc_feature (1)..(684): n is a, c, g, or t
ttggccgagtgtagcaataaccatgcctttgattacggagaaacggcgtttttagatacgcttgagtatttggaaaaaaatgaaattgcgattcttggagcgggacgcaacattacagccgcatccgcgccttttattttttcaacggagaaacttgaaatacgagttttcggaattgcttcattcccacgtgaacgcaccggttgggacggcgcgtcagtaaacgccgcagcggacaaagcgggaatgttatttgccgtacaaaacagcatagagcggcttaaagaaaattttgttcaaaaggacggagtattaaatgtgcttttatttcacggcggtcatgaatggacatggaaaccggaacccggcgctcgcaaattgtacactgaacttgcgcaaagcggagcggatttacttatcggctcacatccgcatacagtgcaaggttttgaatggatagaaggaaaactaattttctggtcgcttggaaactatgtttttgccggaatgcacgatatgtacggcggcgaggaagggttgttgatccggctgggctacatgggaaaaacgctgatttattttgaacctgttccggtacggattaaaggaccgcgttccgatgtcggtcaggcggagcagctaaaacgtttttacgcgctttcgcgggaactagccggcaagtaa

SEQ ID NO: 53982 - protein, 227 aa, Unknown
  Obtained from environmental sample
  misc_feature (1)..(227): Xaa is any amino acid
MAECSNNHAFDYGETAFLDTLEYLEKNEIAILGAGRNITAASAPFIFSTEKLEIRVFGIASFPRERTGWDGASVNAAADKAGMLFAVQNSIERLKENFVQKDGVLNVLLFHGGHEWTWKPEPGARKLYTELAQSGADLLIGSHPHTVQGFEWIEGKLIFWSLGNYVFAGMHDMYGGEEGLLIRLGYMGKTLIYFEPVPVRIKGPRSDVGQAEQLKRFYALSRELAGK

SEQ ID NO: 53983 - DNA, 1218 bp, Unknown
  Obtained from environmental sample
  misc_feature (1)..(1218): n is a, c, g, or t
atgcataatataaatataccgtcagataaaattatcgcttgctttcagcctattctttccgccgataccaaagagatatacgcttatgaagtcctggggcggtatgttgaagacgacggaacggttaaatcgttaggcgctttttttaccgatcctgatacctcacatgaagaagcgctcagggtagacagaatagtaagaaaatatgcttttaagaaatacgcggaagaaaagcgggacgaatatttgtttatcaacatcagattggcgtggcttctgccgtatgcagcaagcccggaagaaatgcttaccttgcagctggtagaagaattcggcattgctcctgaaaaacttgttatagaaattacggaagaagagtttaacgccaacgaagaatatatccgcgccatagtccactacaaaaaaatcggttgccgcatcgctcttgacgattacggaaagagcgccagtaacattgaccgtttggcaaagcttcagcccgacattataaaaatcaatattgattacatccacaaaagtgaaaggtcttatcattaccgcgagtatttacggtcacttgcaacctttgccgattcagtaggtatcgaagtgctgtatgaaggcgtggagacagagcggcagcttgatatttgcatttcatcaaagggaaggttttatcagggatttttaattgccgtacctcaaccatctatgcgcgatatggttattaattcgtctgtattttccgcgttaatcgaaaccgaatataaaacaatacaaagcaaggcgatttacgtggataacgtgaaaaattcactggacgatcaggttgagcatttcttgcttaaaaacccatttgatgctgaaaaaatcaacaacgacacgtatcttgtaacgcttttacatgaattgccggaagtgaaacgtgtttatctgtgcagtaggcaaggcgttcagctttccaataatattgagcggcatttggaagatgttatattccgcgaatataaaaacaagaactgggcatggcgcggatattttcatgaaagcctgacggcttttgctatgggcaaaaaaagctgcctgtcaaatatgtatcgtgattttatgacaaaggaacagatgttcacctattattacgcaatcagtgatgatgtgtttttgtttgtggatattgccagagatactgaaaggatgaaggcctatgccgctggataa

SEQ ID NO: 53984 - protein, 405 aa, Unknown
  Obtained from environmental sample
  DOMAIN (3)...(234): EAL domain
  misc_feature (1)..(405): Xaa is any amino acid
MHNINIPSDKIIACFQPILSADTKEIYAYEVLGRYVEDDGTVKSLGAFFTDPDTSHEEALRVDRIVRKYAFKKYAEEKRDEYLFINIRLAWLLPYAASPEEMLTLQLVEEFGIAPEKLVIEITEEEFNANEEYIRAIVHYKKIGCRIALDDYGKSASNIDRLAKLQPDIIKINIDYIHKSERSYHYREYLRSLATFADSVGIEVLYEGVETERQLDICISSKGRFYQGFLIAVPQPSMRDMVINSSVFSALIETEYKTIQSKAIYVDNVKNSLDDQVEHFLLKNPFDAEKINNDTYLVTLLHELPEVKRVYLCSRQGVQLSNNIERHLEDVIFREYKNKNWAWRGYFHESLTAFAMGKKSCLSNMYRDFMTKEQMFTYYYAISDDVFLFVDIARDTERMKAYAAG

SEQ ID NO: 53985 - DNA, 306 bp, Unknown
  Obtained from environmental sample
  misc_feature (1)..(306): n is a, c, g, or t
ttgggcatcagcttttggcgctggcaaacnggttattcaacgcgcaagctgaaattcggccaccgcggcgccaatcagccggttaaggaattatcaaccggcctcgtgtatatcaccagccagaaccacggatacgctgttgtaacggacaacagctcatttgtaaacgtaaacgacggcacctgcgaggggctggattacgggaattcattttcggtgcagtttcatcccgaagcgcgcggcgggccattggatacgggttttctgtttgaccgtttcatggaaaggatgaaggttaatgcataa

SEQ ID NO: 53986 - protein, 101 aa, Unknown
  Obtained from environmental sample
  misc_feature (1)..(101): Xaa is any amino acid
MGISFWRWQTGYSTRKLKFGHRGANQPVKELSTGLVYITSQNHGYAVVTDNSSFVNVNDGTCEGLDYGNSFSVQFHPEARGGPLDTGFLFDRFMERMKVNA

SEQ ID NO: 53987 - DNA, 759 bp, Unknown
  Obtained from environmental sample
  misc_feature (1)..(759): n is a, c, g, or t
atggctcccgaggaatttgccgaaacaaaggaacgctttgaatttttaagcaatcaaatggccgaccttgaaaaagcaagaaaagatttggaagaccttaccgccgaaatccggcaggaatcttcggcattgtttctggaaacttacaatcgaatcaagaaaaattttcacaacatgttccgcaggctnttcggcggagggcgcgcggaactcaggctttcagaccccaaccatattttggaatccggcatagaaattttcgcccagccgccgggaaaaaaactggaacatttaagcctgctctccggcggagaatgttcaatgacggcggtcgccctgcttttcgcgacatacatggtaaaacccagccccttctgccttctggacgaaattgacgccgcgttagacgaacagaacgtagggcgctttgtccaccttctgcgcgagttcagcgacacaagccagtttattattattacgcataacaagaaaactgttacgggcgcgggaacgcttttgggcgttacgatgcaggaatcgggagtgacaaaacttatcacggtgcgcattgaacacggggaacttgcggtagaagactccgagccgttccagagcgagttgtgggacgcggacggcaagtttgaggaagaagaagtcgcgcccgaagcaggcagggagcttcccgtcggcatgaatgatccgaagaaagtaacgcaggcgcagttaagaccgattaggtccggtgtgccgaagagttga

SEQ ID NO: 53988 - protein, 252 aa, Unknown
  Obtained from environmental sample
  DOMAIN (6)...(184): RecF/RecN/SMC N terminal domain
  misc_feature (1)..(252): Xaa is any amino acid
MAPEEFAETKERFEFLSNQMADLEKARKDLEDLTAEIRQESSALFLETYNRIKKNFHNMFRRLFGGGRAELRLSDPNHILESGIEIFAQPPGKKLEHLSLLSGGECSMTAVALLFATYMVKPSPFCLLDEIDAALDEQNVGRFVHLLREFSDTSQFIIITHNKKTVTGAGTLLGVTMQESGVTKLITVRIEHGELAVEDSEPFQSELWDADGKFEEEEVAPEAGRELPVGMNDPKKVTQAQLRPIRSGVPKS

SEQ ID NO: 53989 - DNA, 378 bp, Unknown
  Obtained from environmental sample
  misc_feature (1)..(378): n is a, c, g, or t
atgaacgcaaacattaacagacagcaagcatgggaattgcttacaaaatacaacaaagacgctttccatttacagcacgcgttaaccgtagaaggcgtaatgagatggtttgccgccgatcaaggctatggcgaagaagctgacttttgggctattgtaggactgttacacgacattgactttgaacaattccctaaagaacactgtataaaggcgaaagaactgcttaactccggcggtgcgagcgatgaattgatccacgccgtatgcagtcatggatacggacttaccgttgtggaagataaaccggaacatgtcatggaaaaagtgctctttgccagcgacgaattgacaggcttaatctctcggccgatctga

SEQ ID NO: 53990 - protein, 125 aa, Unknown
  Obtained from environmental sample
  misc_feature (1)..(125): Xaa is any amino acid
MNANINRQQAWELLTKYNKDAFHLQHALTVEGVMRWFAADQGYGEEADFWAIVGLLHDIDFEQFPKEHCIKAKELLNSGGASDELIHAVCSHGYGLTVVEDKPEHVMEKVLFASDELTGLISRPI

SEQ ID NO: 53991 - DNA, 1407 bp, Unknown
  Obtained from environmental sample
  misc_feature (1)..(1407): n is a, c, g, or t
atggacgaaatttcgggcaaggccccgttaatattaaagctggatgaaagtgatattgccggcccgctgagaatcagggttcgttctttcattgagactgtaatgatacgccgcaaaagaaaagagcatagcgtaaaacctttgggagatccctacgcggccaaatatacaaaaaaagaaccaaggaaggttttgcttatgcccaacgtaagccgggcgttctgcatgattatgagcggagcccttgccaatgaaggggtccttgtggaacaactgccgatgggcggtcttgaggctattgcgttggggaaaaaatttgttcataacgacatgtgccttcccgtgcaggtcgtggtaggggaggcccttctcgcgttaaaaagcgggaaatacgatccgaacaaaactttggtcggcatggcgaaagtgttatgcgattgccgtctttccaactatatgcccctcgcgagaaaagccctggacgaggccggttatccgcaggtgccgattattaccaccgatgtgtcggattccaaaaacgcccatccgggacttcgctttacaaatataacctacactaaagccgtctggggcatagtacagacggacgctattgaattcctgcggcgcaggatacggccttacgaactgcagaaaggggaaaccgatcaagttgttgaaaacactttcaatgaaatttccgaagggctcgcgagaagaggcattcccggggcaaacgccgcgttcaagaaagcgataaacgatatatgcgccgtacgctatgaccgttcaagactgcgggaacctgtttttattcagggcgagtactatttaacctttcatcccggttcaaactttgaaattgaaaactatcttgaaagaaacgggatggaagtgattatgcccagaatgaacaccgtttaccgtcatctgtttttacagcatacccttgccgagatggatgaattcaaagtgcgtcattctttgtatgacagtttatacgcccgggccggcaataaatttatggacatagccgagaattacgttaataaaatcgcctcgaagcatccattgtacgagtctgagatttcgcttaaagaggcggcaaaatacagcgatgatataatgcatcattcgatattatcaggtgaatccttccttatcgccgcccatactttgcataacgccgaaaaagggatccgttcgtttattatactccagcctttcggctgtctgccgaatcatatttgcgggcggggggtgataaaaagaatcaaggaaacgcaccccgatattcaaattctgccgcttgattacgagcccgacgtaagtttcgccaatattgaaaacagaatacagatgctgctgatgaatgtgaagaacttgaaagcgggcgcggttgcgtag

SEQ ID NO: 53992 - protein, 468 aa, Unknown
  Obtained from environmental sample
  misc_feature (1)..(468): Xaa is any amino acid
MDEISGKAPLILKLDESDIAGPLRIRVRSFIETVMIRRKRKEHSVKPLGDPYAAKYTKKEPRKVLLMPNVSRAFCMIMSGALANEGVLVEQLPMGGLEAIALGKKFVHNDMCLPVQVVVGEALLALKSGKYDPNKTLVGMAKVLCDCRLSNYMPLARKALDEAGYPQVPIITTDVSDSKNAHPGLRFTNITYTKAVWGIVQTDAIEFLRRRIRPYELQKGETDQVVENTFNEISEGLARRGIPGANAAFKKAINDICAVRYDRSRLREPVFIQGEYYLTFHPGSNFEIENYLERNGMEVIMPRMNTVYRHLFLQHTLAEMDEFKVRHSLYDSLYARAGNKFMDIAENYVNKIASKHPLYESEISLKEAAKYSDDIMHHSILSGESFLIAAHTLHNAEKGIRSFIILQPFGCLPNHICGRGVIKRIKETHPDIQILPLDYEPDVSFANIENRIQMLLMNVKNLKAGAVA

SEQ ID NO: 53993 - DNA, 2316 bp, Unknown
  Obtained from environmental sample
  misc_feature (1)..(2316): n is a, c, g, or t
gtgttaagcgctaaagccctcattgacattgacattgatcccccggaaagtgcaatccgcaaggcgattcgttccaatatatgccgctgtacgggctataaaaaaatcattgacggaatcaggcttgccgcagggcttttcagggataaggcgcagattcccgcgcggcgttttaccggcggcatgggcgagagtatgcaccgtcccgacgcggcggttaagacgctgggcacgggaaaatacgttgacgatcttgtttttgacggaatgttgcacgcctcggcaatccgttccgcgcatcccagggcaagagtgctgaagatcgacgcaagcgcggcactggctcatcctgactgcgtttcggtgttaactgcaaaagacgtgccggggaatatcaaaatcgggcatctttcttttatttccgattacgatgttatgatcgccgagggggggatcacccgctttataggcgacgcgctggcgctggcggtgtgcaggcgcaaggaaaaactcgacgaagtaaaggcgctggtaaaaattgattacgaggttcttgagccgctgacaaatcctctggcggcaatggcggaaggcgcgccgcttatccataataaagaaaaaaatattctttcgcacgagcacttagtccggggcagcgctgacgaggttctggcgaaatcaaaatatgtggtaacaaaacattattcgctgccctttaccgaacacgccttcatggaaccggagtgtgcgatcgctatgccggaaggcgaggacggacttgtgttgtattcaggtgggcagagcgtctatgacgaacagcgtgagtgttccaggatgttgggaattgatcctgaaaagatacatgttatgagccagtttgtgggcggcggtttcggcgggaaagaagacatgagcgttcaacagcacgcctgccttgccgcgtgggttttgaaaaagccggtaaaggtattgctgtcgcgtcaggaaagcatcaacctgcacccaaaacgccatgccatggagattgaactgacaacaggctgcgatgaaaatggaatgcttaccgcgatgaaggccgtgattgtggctgacacaggcgcctatgccagcctcggcgggccggtactgcagcgggcctgcacccacgccgccggaccctacaattatcaggtgattgatattgacgggaaagcggtgtacaccaacaatattcccggcggcgcgttccgcggattcggcgtgcctcagagctgttttgccacggaaagcaacctcaatctgttagctgaaatggcaggcatcagcccctgggagatacgttaccgcaacgccataaggcccggtcaggtactgcccaacggtcagctcgcgggtgacgacgcggaactggaagcctgccttcttgcggtaagggggaagtatgaacaggcgcaagctgaaggcaaatgcgtcggcatcgcctgcgcgttcaaaaatgcggggataggcgtcggcctgccggatgttggccgctgcattctttcggtggagcgaagcggtagcggtgaaccgctgtttgtgcacatcaggaccagcgccgcctgtatcggtcagggccttgccacggttgtcacccaaatagcctgcgaggcgctgaatctgccgccggagcattttaccgttgagccgcccgacacggcccgtacccccaattcggggacaaccactgcctcgcggcagacgttgtttaccggggaagcaacccggcgggcggcgctcaaactgaaagcggcgctggaaacggttggcggcgatttgcaaaaactggaggggcaggaattctttggcgaatattcagcccttaccgatccaatgccatccacggatggcattggcagcgataagcccaacccggtaagccatgccgcgtacagttacgctgcggcggtggcggtacttggcggtgagggtagggtggaaaaaatcaccgccgcttacgacatcggtacggtggttaaccccaagtccgccgaaggccaggttgaaggcggtattctcatgggcatgggctacgcccttaccgaagattttcctatggaaggcggctaccccaaagccacatacggaaccctgggcctgatacgcgctactgaagcgccgcagatggagatcgtttttatgaagccgaaaaacccgccgccgcttgcccacggcgcgaaaggggtaggggagcttgccacgattccggtaacgccggccattgccggggcctattacgcgaaagacgggaagcttaggacgaaacttcctatggaagaaacgttctataaaaaataa

SEQ ID NO: 53994 - protein, 771 aa, Unknown
  Obtained from environmental sample
  DOMAIN (3)...(42): [2Fe-2S] binding domain
  misc_feature (1)..(771): Xaa is any amino acid
MLSAKALIDIDIDPPESAIRKAIRSNICRCTGYKKIIDGIRLAAGLFRDKAQIPARRFTGGMGESMHRPDAAVKTLGTGKYVDDLVFDGMLHASAIRSAHPRARVLKIDASAALAHPDCVSVLTAKDVPGNIKIGHLSFISDYDVMIAEGGITRFIGDALALAVCRRKEKLDEVKALVKIDYEVLEPLTNPLAAMAEGAPLIHNKEKNILSHEHLVRGSADEVLAKSKYVVTKHYSLPFTEHAFMEPECAIAMPEGEDGLVLYSGGQSVYDEQRECSRMLGIDPEKIHVMSQFVGGGFGGKEDMSVQQHACLAAWVLKKPVKVLLSRQESINLHPKRHAMEIELTTGCDENGMLTAMKAVIVADTGAYASLGGPVLQRACTHAAGPYNYQVIDIDGKAVYTNNIPGGAFRGFGVPQSCFATESNLNLLAEMAGISPWEIRYRNAIRPGQVLPNGQLAGDDAELEACLLAVRGKYEQAQAEGKCVGIACAFKNAGIGVGLPDVGRCILSVERSGSGEPLFVHIRTSAACIGQGLATVVTQIACEALNLPPEHFTVEPPDTARTPNSGTTTASRQTLFTGEATRRAALKLKAALETVGGDLQKLEGQEFFGEYSALTDPMPSTDGIGSDKPNPVSHAAYSYAAAVAVLGGEGRVEKITAAYDIGTVVNPKSAEGQVEGGILMGMGYALTEDFPMEGGYPKATYGTLGLIRATEAPQMEIVFMKPKNPPPLAHGAKGVGELATIPVTPAIAGAYYAKDGKLRTKLPMEETFYKK

SEQ ID NO: 53995 - DNA, 435 bp, Unknown
  Obtained from environmental sample
  misc_feature (1)..(435): n is a, c, g, or t
ttgtttcttggcaccttgactacgcccgcttcgcctcgccttagctcagctcgctgtcgcagctcgcctgcggccgtttcctccggccccaatagctcgcagcttcgaccgggacaaccgtcgcccggccgggtttcgcctcatgcgtcatcccttgaaaccaagaacggtactggaataataaccagtttcccatcggctacgggtttccccctcgccttaggggccgacttaccctgggcagatgacctttacccaggaatccttaggcttccggcggacggggatctcacccgtcttttcgtctacttatacctgcattctcccttccactgcctccagcaaccctcgcggtttgccttcgtcggcccgtggaatgctcccctaccctctcgcgattgctcgcgaaagccgcggcttcggttgcgtgcttag

SEQ ID NO: 53996 - protein, 144 aa, Unknown
  Obtained from environmental sample
  misc_feature (1)..(144): Xaa is any amino acid
MFLGTLTTPASPRLSSARCRSSPAAVSSGPNSSQLRPGQPSPGRVSPHASSLETKNGTGIITSFPSATGFPLALGADLPWADDLYPGILRLPADGDLTRLFVYLYLHSPFHCLQQPSRFAFVGPWNAPLPSRDCSRKPRLRLRA

SEQ ID NO: 53997 - DNA, 303 bp, Unknown
  Obtained from environmental sample
  misc_feature (1)..(303): n is a, c, g, or t
gtgccaaaccttcccgtcgatgtgaactcttggggaagatcagcctgttatccccggagtaccttttatccgttaagtgacggcgcttccactcgcgaccgccagatcactaagacctactttcgtacctgctcgacctgtcagtctcgcagtcaagcctccttgtgcctttacactcatacggtgatttccaaccaccgcgaggagaccttcgcgcacctccgttactctttaggaggcgaccgccccagtcaaaccgcccgcctatcactgtcccgttcccagcttcatggaaacggttag

SEQ ID NO: 53998 - protein, 100 aa, Unknown
  Obtained from environmental sample
  misc_feature (1)..(100): Xaa is any amino acid
MPNLPVDVNSWGRSACYPRSTFYPLSDGASTRDRQITKTYFRTCSTCQSRSQASLCLYTHTVISNHREETFAHLRYSLGGDRPSQTARLSLSRSQLHGNG

SEQ ID NO: 53999 - DNA, 369 bp, Unknown
  Obtained from environmental sample
  misc_feature (1)..(369): n is a, c, g, or t
atggtttatcttgaggggggcttcccgcttagatgccttcagcggttatcccttccgaacgtagctacccggcacttgcacttggcagtacaaccggtacaccagaggttcgtccatttcggtcctctcgtactaaaaacagctcctctcaaccatccaacgcccatggcagatagggaccgaactgtctcgcgacgttctgaacccagctcacgtaccgctttaattggcgaacagccaaacccttgggacctgcttcagccccaggatgcgatgagccgacatcgaggtgccaaaccttcccgtcgatgtgaactcttggggaagatcagcctgttatccccggagtaccttttatccgttaagtga

SEQ ID NO: 54000 - protein, 122 aa, Unknown
  Obtained from environmental sample
  misc_feature (1)..(122): Xaa is any amino acid
MVYLEGGFPLRCLQRLSLPNVATRHLHLAVQPVHQRFVHFGPLVLKTAPLNHPTPMADRDRTVSRRSEPSSRTALIGEQPNPWDLLQPQDAMSRHRGAKPSRRCELLGKISLLSPEYLLSVK

SEQ ID NO: 54001 - DNA, 492 bp, Unknown
  Obtained from environmental sample
  misc_feature (1)..(492): n is a, c, g, or t
atggaaatcttaaaaacaatatactgtttaccagttccgtcaggagatcaggcattacaaattttaaaaaaggtaattcctgatctgatccttcttgatattgaaatgcctgttatgaatggctacgaagttattaaaaaactcaagcagggagacgaaacaaaagatataccggtaatattcctcacttcgcataccgatccgggaaacgagcttgacggattaagcatgggcgcgattgattatatcaccaaacctttctcccccctgctccttgtgcagcgtatcgagaatcatctttcgataacctcacaaaaaaaagagcttattcaacacaataagtctttacaggaagcgatagaagaaaaaaacaaagaaattaaaaaactgcaagatgctattcataatgcagtttcggaaataaatggattaaaaagtgaattgtcgagcagccacattgaacgccttttaaaatatttgcaaattgattaa

SEQ ID NO: 54002 - protein, 163 aa, Unknown
  Obtained from environmental sample
  DOMAIN (1)...(97): Response regulator receiver domain
  misc_feature (1)..(163): Xaa is any amino acid
MEILKTIYCLPVPSGDQALQILKKVIPDLILLDIEMPVMNGYEVIKKLKQGDETKDIPVIFLTSHTDPGNELDGLSMGAIDYITKPFSPLLLVQRIENHLSITSQKKELIQHNKSLQEAIEEKNKEIKKLQDAIHNAVSEINGLKSELSSSHIERLLKYLQID

SEQ ID NO: 54003 - DNA, 1137 bp, Unknown
  Obtained from environmental sample
  misc_feature (1)..(1137): n is a, c, g, or t
atgatacgcggcgcttttgccgtccaactgccggaatgtaacgcttttcctctgcttaaagccaggatccaaattaaccagtccctttacaacctgggctttcgcaacaatgagccggcgcttgaaggggcaaaaaaggcggccataatctgtcaaaacagcggcagcccatgccttgccatgtcctaccggcttatggcgcttgccagcctttcccataaacgcataaacgagaccgtcaattatcttggatttgcccttgagaacgcggtactgtcgggagaaccgcaggagataggcatggcaagctattacgccgcctccgtgcaattgctctacggcaatctgtcgctttctaaaaaacacgctgaaagggcgcgcaggcattttctggaagcgggaagcccgcaatgggcggatcgttcccgttttcttgaagggcgtctcgcctttgaagccggttattaccaacaggcttcggatatctttgaggatattcttaaaaacccggacggcgaanacaacggcgagaaacaaaagctgattgaggcatggatttaccgcgccgttatcaacggccacaacccctcatacccgccgcctgatgacatggtgttcgacgccggactgtttcagcttgaggcgctttactttgagggcgaatacgcaaaaatggaagaactgtcggattatctgttagggattcccatggacgatacttttatccatatagaacaaccggactggcgaagcggttttacccagtgcgaattattgtatttttcatgggccgatttatgggaaaggatgcttggtgcatggcgttctctcgcacaatgccgcctgtccgcaaaaaaagccggggaagcacaaattacaatgcagcagttaattcgtaaaagccagttcccggaaatcgacacctgggatccgttttattactacgccttgtaccagacgcttgaacattccggagcaaaccaggtcgatattcgcacagccgcaagcgccgcgttcaaccgtctgcagaaccgcgccagccgcatagatgattctgatatccgccagcaatacctcaaacagccccactggagcaaagcccttagcaaagcggcggttgaatttaaactggtgtaa

SEQ ID NO: 54004 - protein, 378 aa, Unknown
  Obtained from environmental sample
  misc_feature (1)..(378): Xaa is any amino acid
MIRGAFAVQLPECNAFPLLKARIQINQSLYNLGFRNNEPALEGAKKAAIICQNSGSPCLAMSYRLMALASLSHKRINETVNYLGFALENAVLSGEPQEIGMASYYAASVQLLYGNLSLSKKHAERARRHFLEAGSPQWADRSRFLEGRLAFEAGYYQQASDIFEDILKNPDGEXNGEKQKLIEAWIYRAVINGHNPSYPPPDDMVFDAGLFQLEALYFEGEYAKMEELSDYLLGIPMDDTFIHIEQPDWRSGFTQCELLYFSWADLWERMLGAWRSLAQCRLSAKKAGEAQITMQQLIRKSQFPEIDTWDPFYYYALYQTLEHSGANQVDIRTAASAAFNRLQNRASRIDDSDIRQQYLKQPHWSKALSKAAVEFKLV

SEQ ID NO: 54005 - DNA, 909 bp, Unknown
  Obtained from environmental sample
  misc_feature (1)..(909): n is a, c, g, or t
atgatccttttggatgttgatatgccggaagtcaacggttacgaggctataaaaatcctgaaatccaaaccggaaacaaaagatattcccgtaatctttcttaccgcccgcgctgaatcggacgatgaactggcggggctttcccttggagccattgattacatcacaaagccgtttcagccgccattgcttcttaaacgaatcgaggtacatcttctggtagaagcccagcaaaaagaacttcaatacttcaatgaaaatcttcaaaaaatggtcgaggaaaaaacacaaaacgtaatagaactgcagaacgccctcctgaaaacaatagcggaattggttgaatgccgcgacgacattaccggaggccacatagaacggacacagcggggaatagatattctgctggaaggaattgagagaagcggagtttacatggaagaaacaaaaggctggaataaggatctgcttctccagtcttgtcagcttcatgacgtaggcaaaatatccatcagcgacagcatactcaagaaacccggaaaacttacggaagaagaattcaatgaaatgaaaaaacacgcggctttcggcgaacaaataattgaaaagattgaggctctaacgaaagaaagcgattttttggattacgcgaaaatattcgccgccagtcatcacgaaaaatgggacggcactggttatccgcgcggacttaaagacagtaaaatacccctgcttggccgtataatggcgattgccgacgtatacgacgctcttacttcagcgcgtccctacaaagaagcctttagccacgaggaagcggtgcgtattattaccgaaagcagcggaacccagtttgatcccgcgcttgttgatatattcatcctcgttgcggaacaattcaaaaattag

SEQ ID NO: 54006 - protein, 302 aa, Unknown
  Obtained from environmental sample
  DOMAIN (1)...(69): Response regulator receiver domain
  misc_feature (1)..(302): Xaa is any amino acid
MILLDVDMPEVNGYEAIKILKSKPETKDIPVIFLTARAESDDELAGLSLGAIDYITKPFQPPLLLKRIEVHLLVEAQQKELQYFNENLQKMVEEKTQNVIELQNALLKTIAELVECRDDITGGHIERTQRGIDILLEGIERSGVYMEETKGWNKDLLLQSCQLHDVGKISISDSILKKPGKLTEEEFNEMKKHAAFGEQIIEKIEALTKESDFLDYAKIFAASHHEKWDGTGYPRGLKDSKIPLLGRIMAIADVYDALTSARPYKEAFSHEEAVRIITESSGTQFDPALVDIFILVAEQFKN

SEQ ID NO: 54007 - DNA, 1281 bp, Unknown
  Obtained from environmental sample
  misc_feature (1)..(1281): n is a, c, g, or t
gtgaacgggaacgtgaccgtcagggccaacttcacgcagaatcagagccagtacacgctgaccgtcaaccgcgccccgacggccggcgggtcggttaaggtcgccaacaacgactacacggcgcccgtcaccgtaaacggcgggacggcgacctccatatcggccgccgcggcgagcgggtacacgttcacgaactggacggtgaccagcggttcggcgcagataaataacgcgaacagcgcaagcacgacggtctcgctcagcgggaacgccactataaccgccaacttcacgcaaaatccgacaacgcccaccaaatacacgctgacggtcagccgccttccggacaacggcgccggcacggtcaaagtcagcaacgcggattactcggcgccggttcaggtagacggcgggacggcggtcaatatcgcggccgcgtcggcggccaactacaagttcacaaactggacggtggcgacaggcaccgcctccatagctaacgcgggcaacgcgacgacgacggtcaccctgagttcaaacgccaccatcaccgccaatttcacgtctaccgtcgtaacccctcccggcggcggcagcggcaggacggatacgataaaagtcgaggcggagaactacacgagcaacaacggcgccaatatgcaaaccggcgccatcgagggcggaggtttgtgcataggatacattgaaaacggttactcgacgacatacaataatgtgaacacgccgaaagccggcaactacaccatgctgttcagaatcgccaccggtaccgagcgaagctctttcacggtctccgtgaacggccagaacgtcgggacggtaagcaccaacaacaccggcggctgggacacctacgtgacggtggctatcggctccgacgttaagctaaacgccggcaacaacacggtggtgctgaacttccagaacgccgtaaacgtggactacttcctgcttttgggcgagcctaccgtgacctctccgcctccgaactccgttaagtacaacgcggccaaagcggctaacgcgcgtacgcagatcgctttgaggccggccgtacgcggtttcgccgcggcgttgccgacgggtcacggcttcacctcctacaaggtgatcgacctgcaaggcagggaggtaaaatccggcagaatcggcggatcgacgaccgaactgagcgtaaccggattgaaacacagcgtggtcttcctaagattggaaggcaaaaaccagacgccgctgtcactgaaagtcgtgacttattga

SEQ ID NO: 54008 - protein, 426 aa, Unknown
  Obtained from environmental sample
  DOMAIN (208)...(327): Carbohydrate binding module (family 6)
  misc_feature (1)..(426): Xaa is any amino acid
MNGNVTVRANFTQNQSQYTLTVNRAPTAGGSVKVANNDYTAPVTVNGGTATSISAAAASGYTFTNWTVTSGSAQINNANSASTTVSLSGNATITANFTQNPTTPTKYTLTVSRLPDNGAGTVKVSNADYSAPVQVDGGTAVNIAAASAANYKFTNWTVATGTASIANAGNATTTVTLSSNATITANFTSTVVTPPGGGSGRTDTIKVEAENYTSNNGANMQTGAIEGGGLCIGYIENGYSTTYNNVNTPKAGNYTMLFRIATGTERSSFTVSVNGQNVGTVSTNNTGGWDTYVTVAIGSDVKLNAGNNTVVLNFQNAVNVDYFLLLGEPTVTSPPPNSVKYNAAKAANARTQIALRPAVRGFAAALPTGHGFTSYKVIDLQGREVKSGRIGGSTTELSVTGLKHSVVFLRLEGKNQTPLSLKVVTY

SEQ ID NO: 54009 - DNA, 1305 bp, Unknown
  Obtained from environmental sample
  misc_feature (1)..(1305): n is a, c, g, or t
atgaaaaggatgtcatttgctgtttcgttgttcacattcttatttgccgtcagcgcgtactcgcagaacggcgtaactacacgttattgggatgcttgcaagccaagttgcggatggaccagcaacgcttccggcagccccaacggtgtttgcaaaagctgtaatataaccggtggggtagaatccagtaacgactcacggagcgcgtgcgaaaacggccctgcttttacgtgtatgaagcaggctccgtgggcagtggatgacaacatgtcatacggttttgtcgccaacaataaggtcggttgcggcaagtgcgtggagtttacgtttacaaatacgactatcagcgggaaaaaaatgactgtcatggtaagcaacttcggtaacctcggcggagacgcccattttgacatcatgattcctgggggcggcgtgggtgattttgacgcccctactaggcagattcagcagaatggcggttcagtgcggatatggcgtgagaatggcggtttagagccaagtgccggcgccgatgcggcttgtataaggaaaatgtgcgacgcggctttcggcacggctgctcttgcggacttgaaagccggttgctattggtacatagactggttcaagatggccgataaccctaacgtttcttataaggaagtcacttgtccgcaagcgttggtcgataagtacaagggcaatttcaattctacgcctaacccgccgcctaacacaacctacacgctcacagtcaaccgcaacccgaccaacggcggaaccaccactccggcgagcagccagtccaatattaacggcggatcgcaggtcaacatatcggccacggcggcgagcggctacacgttcaccaattggacggtatccggtagcggcacaatcgccaacgcgaacaacgcatccacaaccgtcacagtaaacgggaacatcaccgttacggccaacttcaataacagcgctaacccccccgtacccgtaaaaggcgacaccataaaggttgaggcggagaatttctcgagtaaatccggcgacaatataaaggttgaagacggcgcaatcggctggatcgaaaacggaaactcgacgacctacaaggtgaacgtcggaaaggccggaacggccaccatgctattccggatcgcaaccgaagttcagagcaatttttcggtggaagtgaacggcacgaatgtcgggaggatttcccaaggcagcaccggcggttggggtaccttcataaccgtgcagctcagcaacgccgtaacctcagagccggagaaaacacgataa

SEQ ID NO: 54010 - protein, 434 aa, Unknown
  Obtained from environmental sample
  SIGNAL (1)...(21)
  DOMAIN (340)...(434): Carbohydrate binding module (family 6)
  misc_feature (1)..(434): Xaa is any amino acid
MKRMSFAVSLFTFLFAVSAYSQNGVTTRYWDACKPSCGWTSNASGSPNGVCKSCNITGGVESSNDSRSACENGPAFTCMKQAPWAVDDNMSYGFVANNKVGCGKCVEFTFTNTTISGKKMTVMVSNFGNLGGDAHFDIMIPGGGVGDFDAPTRQIQQNGGSVRIWRENGGLEPSAGADAACIRKMCDAAFGTAALADLKAGCYWYIDWFKMADNPNVSYKEVTCPQALVDKYKGNFNSTPNPPPNTTYTLTVNRNPTNGGTTTPASSQSNINGGSQVNISATAASGYTFTNWTVSGSGTIANANNASTTVTVNGNITVTANFNNSANPPVPVKGDTIKVEAENFSSKSGDNIKVEDGAIGWIENGNSTTYKVNVGKAGTATMLFRIATEVQSNFSVEVNGTNVGRISQGSTGGWGTFITVQLSNAVTSEPEKTR

SEQ ID NO: 54011 - DNA, 1311 bp, Unknown
  Obtained from environmental sample
  misc_feature (1)..(1311): n is a, c, g, or t
atgacagatcgccgagggcagtcgcctgaacgctggacaaactggtttgaagagtatttgcgctttaacatggaaaccaaccgcgctattgagggcgcaggtcttggcatgagcattacaaaacatcttgtaagattaatgaacggcgatatcaaggtgcagagcatgcttggcaaaggttcgacgtttaccgtatacctgccgcaaaaaattgccgggggagtctcaagcgttataggcaaagaattagctgaaaaaataggacagatgagccccgtaaaatccgcgcacaaaaagaaagcgcctattatctacgaatatatgccttacggcaaaatactggttgtggacgatgttgaaacgaatctgtatgttacaaggggtttaatttcaccctacggcctttcggttgatacagcctcaagcgggtatgaagtgattaaaaaagtaaaaagcggtttaacgtgggatattgtttttatggatcattttatgccgggaatggacggggttgagactgcgcggattatacgcgggttgggttatacaaaacccattgtcgcgctgacagccaacgtcgtatccgggcaggcggaaatgttttttgcaaacggatttgatgattttatttccaagcctatagacatacgccagcttgaccttattctgaataaacacatacgcgacaaataccccgatgatattatcaaaaccgcgcggcagttaaaaaacaacatgnggaaaagctttatttctccgttggttgtaaatcccgaacttgccgggattttcactcgtgacgcgaataaggctattaacatgctggaaacgatcttgaaaaaaacagacagtttagacgacgacgatacgcaaatgtatgttatcaatattcacgcgatgaaaagcgcgttggctaatatcggggagattgagctttcagccgccgccgctaaattggaagatgcgggacgggaccagaatattgccgaaatttctaacgatacgccgggctttatatccgcccttagagcggtaattcaaaaaatcaatcctaataaggacggtaatgacgataaagcggatgttgctatgagcgaagaagatcacgcgaatcttattgaacagttgtcccttatacaaaaagccagtattgaatttgacaaaaaaaccgttaaaaagactctggctcaaattaaagaaaaaacatggacctttacggttaataaattactggaagcaatatcagaacacctgctccacagcgaatttatcaagattgcgaatcttatagacaattacaagaatagctga

SEQ ID NO: 54012 - protein, 436 aa, Unknown
  Obtained from environmental sample
  DOMAIN (2)...(70): Histidine kinase-, DNA gyrase B-, and HSP90-like ATPase
  misc_feature (1)..(436): Xaa is any amino acid
MTDRRGQSPERWTNWFEEYLRFNMETNRAIEGAGLGMSITKHLVRLMNGDIKVQSMLGKGSTFTVYLPQKIAGGVSSVIGKELAEKIGQMSPVKSAHKKKAPIIYEYMPYGKILVVDDVETNLYVTRGLISPYGLSVDTASSGYEVIKKVKSGLTWDIVFMDHFMPGMDGVETARIIRGLGYTKPIVALTANVVSGQAEMFFANGFDDFISKPIDIRQLDLILNKHIRDKYPDDIIKTARQLKNNMXKSFISPLVVNPELAGIFTRDANKAINMLETILKKTDSLDDDDTQMYVINIHAMKSALANIGEIELSAAAAKLEDAGRDQNIAEISNDTPGFISALRAVIQKINPNKDGNDDKADVAMSEEDHANLIEQLSLIQKASIEFDKKTVKKTLAQIKEKTWTFTVNKLLEAISEHLLHSEFIKIANLIDNYKNS

SEQ ID NO: 54013 - DNA, 1092 bp, Unknown
  Obtained from environmental sample
  misc_feature (1)..(1092): n is a, c, g, or t
ttgcacaggaagagcgcagcgcttcttatagaagaggggaaaaaattaaaagaggggattgcggcggcggaaaacgaattggcggctgttgaggcggagcttttaactgaggcgcggaagatcccgaacatggcgcatcctgacgcgccggttggtaaggaagacaaggacaatcttgaagtaaagagggtaggggagcctgtaaagtttgattttacccccgcagaccatgttaaacttgggcaggaccttgatattatcgactttgattcgggaacaaaggtgtcaggcaccaaattttactatttaaaaaatgaaggcgtctatctggaacttggccttatccgttatgcgcttgatattttacataaaaagggatttactccctttattactcctgatattgcccgcgaagaaattttggaaggtatcggttttaatccgcgcggcgcggaatctaatgtgtatacgcttgagggtgaagaaacctgtcttgtaggaactgcggaaattacacttggaggttattactccaacatgattcttccgaaagacaagcttccccttcggatggcgggtctttcccactgttttcgccgtgaagcgggcgcggcaggtcagttttccaaaggactctaccgcgttcatcaatttacaaaacttgaaatgttcgtttactgtctgcccgaagaatcggggcgttttcatgaagaactgcgctncatagaggaagaaatttttatgggtcttaacatacctttccgcgtagtggatacatgcacaggcgatttgggcgcgcccgcttaccgcaagtgggacttggaagcgtggatgccagggcgcaacggcggcgaatggggcgaagtaacctctacctcaaactgcactgattatcaggcgcgaagacttaatatccgctttaaagacgacgacggtaaaaataaatatgttcatatgttaaacggcacggcaatcgctatttcccgcgcaatcatcgcagttttggaaaatttccagcaagcggacggcactgtgcgccttccgaaagcgttggttccttattgcgggtttgatgttataaagaagaaataa

SEQ ID NO: 54014 - protein, 363 aa, Unknown
  Obtained from environmental sample
  DOMAIN (110)...(281): tRNA synthetase class II core domain (G, H, P, S and T)
  misc_feature (1)..(363): Xaa is any amino acid
MHRKSAALLIEEGKKLKEGIAAAENELAAVEAELLTEARKIPNMAHPDAPVGKEDKDNLEVKRVGEPVKFDFTPADHVKLGQDLDIIDFDSGTKVSGTKFYYLKNEGVYLELGLIRYALDILHKKGFTPFITPDIAREEILEGIGFNPRGAESNVYTLEGEETCLVGTAEITLGGYYSNMILPKDKLPLRMAGLSHCFRREAGAAGQFSKGLYRVHQFTKLEMFVYCLPEESGRFHEELRXIEEEIFMGLNIPFRVVDTCTGDLGAPAYRKWDLEAWMPGRNGGEWGEVTSTSNCTDYQARRLNIRFKDDDGKNKYVHMLNGTAIAISRAIIAVLENFQQADGTVRLPKALVPYCGFDVIKKK

SEQ ID NO: 54015 - DNA, 516 bp, Unknown
  Obtained from environmental sample
  misc_feature (1)..(516): n is a, c, g, or t
atgactaagaagggattggtaaaacagcatatagtttcggctcttgttgaaaacagagccggaactttaagcagagtatcgggtcttttcagcagacgcggttttaacattgacagcctcactgtaggcgagacggataatccttctatttccagaatgacaattgcggtaacaggcgaggagcgtgttcttgagcaaattgttaaacaactggaaaaacttgtcgatgtaatcgccgtgcgggaattggacagcgcctcctgtctgcgccgtgaaatcatgcttgttaaagtgggcgttgatgaaaaaaaccgtcccgccattcttgaaatagccggtatcttccgcgcccgcattgtcgatgtttcccaaacgagtatcacagttgaagcgacaggcaacatggaaaaacttaacggattgcttcttctcttgcgcccctacggtatcctagagcttgcccgcacaggtcttgtcgctcttgagcgcggggcaagtgtgctttccgtaaaataa

SEQ ID NO: 54016 - protein, 171 aa, Unknown
  Obtained from environmental sample
  DOMAIN (10)...(83): ACT domain
  misc_feature (1)..(171): Xaa is any amino acid
MTKKGLVKQHIVSALVENRAGTLSRVSGLFSRRGFNIDSLTVGETDNPSISRMTIAVTGEERVLEQIVKQLEKLVDVIAVRELDSASCLRREIMLVKVGVDEKNRPAILEIAGIFRARIVDVSQTSITVEATGNMEKLNGLLLLLRPYGILELARTGLVALERGASVLSVK

SEQ ID NO: 54017 - DNA, 357 bp, Unknown
  Obtained from environmental sample
  misc_feature (1)..(357): n is a, c, g, or t
atgtctagagcaaaaacaagagttcctagccgtgagcgccgcaaaaaaataatgaaagccgcaaagggctactatggtcgccgcaaaagcaatttgcgccttgccatagatgcaacaacccacgcgggccagtatgcttacgttcaccgccgcgacaaaaaaggcgattaccgctccctgtggataacccgcctgaacgcagcagtccgcgagcacgatttgaactacagcgagttcatacacttgctcggtgccgccaacataaacctcaaccgcaaggttctggcagatttggcaatcacggatccggctgcatttgcaaaggtagtggaaatagctaagaaagccaaaggctag

SEQ ID NO: 54018 - protein, 118 aa, Unknown
  Obtained from environmental sample
  DOMAIN (6)...(109): Ribosomal protein L20
  misc_feature (1)..(118): Xaa is any amino acid
MSRAKTRVPSRERRKKIMKAAKGYYGRRKSNLRLAIDATTHAGQYAYVHRRDKKGDYRSLWITRLNAAVREHDLNYSEFIHLLGAANINLNRKVLADLAITDPAAFAKVVEIAKKAKG

SEQ ID NO: 54019 - DNA, 669 bp, Unknown
  Obtained from environmental sample
  misc_feature (1)..(669): n is a, c, g, or t
ttggatattgatgagctgatccataagcggacagcacaggtcaggcggctgcaggacaacattataaccgttttggctgatgccattgaagaacgtgacaatgaaacaggcggtcataatgatcggacggcggcgtatatcaaaatactgataaaagcgttacaggaacgcggagtatatgttgatgaaataaacggctgggtcattgaaatggttgcttcatcggcccggttacatgatatgggcaagattcgtgttcaggatacaatattaaacaagccggccaaattggactatgaagaatacgaaaagatgaaattacacactactgagggagcgcggatgatcaataaaatgatcgggcaaacaggcgaggtagaattcctgaataacgcgaaactgttcgcggaataccaccatgaacgatgggacggaaccggttatccgcatgggcttaaggggacgagcatcccgcttcagggacgcataatggcaattgttgacgtatatgacgcgcttgtttcaaaacggccatataaagaagcgtttactgccgaagatgcgattcaaataatcaaaaccagcgcagacaaacattttgaccccaagattgtggaagtatttcttgaagtgcaggatcagctcaaggcggtaagagaggctttatga

SEQ ID NO: 54020 - protein, 222 aa, Unknown
  Obtained from environmental sample
  DOMAIN (36)...(173): HD domain
  misc_feature (1)..(222): Xaa is any amino acid
MDIDELIHKRTAQVRRLQDNIITVLADAIEERDNETGGHNDRTAAYIKILIKALQERGVYVDEINGWVIEMVASSARLHDMGKIRVQDTILNKPAKLDYEEYEKMKLHTTEGARMINKMIGQTGEVEFLNNAKLFAEYHHERWDGTGYPHGLKGTSIPLQGRIMAIVDVYDALVSKRPYKEAFTAEDAIQIIKTSADKHFDPKIVEVFLEVQDQLKAVREAL

SEQ ID NO: 54021 - DNA, 408 bp, Unknown
  Obtained from environmental sample
  misc_feature (1)..(408): n is a, c, g, or t
atgcacagccgcggcacgccggatacgatgcaaaccgatccgagttacgcggatgtgccggacgaggtggtcggcgagctgtcccgatcaatagatgtgtttctacgctccggcgtggacaggaacaggataattgtggatccgggtttcggcttcgcaaagaacttagctcacaacgtaaatttgttacgcgagcttgacaaattagtagcaatgggctatccggtgctggtgggcctgtcacgaaagtcgtttatcggcgcgttaaccgatagaccggtcgttgagcgtttacccggaacgttagcggcgacatccgccgcgtaccgccgcggcgcaaagattttcagggtgcatgatgttaaggagaccgttgacttcctgaaagtcctcgcagcagtcagttga

SEQ ID NO: 54022 - protein, 135 aa, Unknown
  Obtained from environmental sample
  DOMAIN (1)...(90): Pterin binding enzyme
  misc_feature (1)..(135): Xaa is any amino acid
MHSRGTPDTMQTDPSYADVPDEVVGELSRSIDVFLRSGVDRNRIIVDPGFGFAKNLAHNVNLLRELDKLVAMGYPVLVGLSRKSFIGALTDRPVVERLPGTLAATSAAYRRGAKIFRVHDVKETVDFLKVLAAVS

SEQ ID NO: 54023 - DNA, 879 bp, Unknown
  Obtained from environmental sample
  misc_feature (1)..(879): n is a, c, g, or t
atggtgtcgcgggcgcaagccgccgcgcgcagggcggcggaatcaatagcaagagccagagagtcggctaaacgcaacgaatcagccagccgtaaagaatcaactatacttagcgaatcggccagacgtaacgaatcggccagtcgcaaagaatccgctatacgtagcgaatcagccaaccgcaaggaatccgccacacgtccggcttcggcaaaacgcagggaatcaatcaaacgcagagaatctactatccgtaacgagtcaaccaaacgaagggaatccgccgcgcgccgagccgcggccgaccgcaaagaatccgccaaccgcaatgaatcaaccaaccgcaaggagtcggcgattcgcttggaatcggctaaacggagagaatcggccgtttgccggaaattgaccatccgcaaagaatcaattcgccgtagggaatcggttaaacgcgctaagttggccaaacgccgagtctcggccttttggagagattcggccaaccgcaaggagtcggctgttcggagcgagtctgctctgcgtaaagagtcggcgattcgctgtaaatccgctccgcgcagagaatcggcgatccgcagggagtccgctaaacgtagcgagtcggcaatcagttgggagtttatcgcagccttatccgtaccgccgccgataccccataaaccgccgccttttttcccaaagagattgccacccgcgaaaaacaggagcaataggacgatgacgagcaacaacagcagcaatataagcggcgttaaagagagcttggaacgcttcttttcgctgccggacggattattttttttatcggaagatttattctttgccattatatactttgtcctaacatctcaacattaa

SEQ ID NO: 54024 - protein, 292 aa, Unknown
  Obtained from environmental sample
  misc_feature (1)..(292): Xaa is any amino acid
MVSRAQAAARRAAESIARARESAKRNESASRKESTILSESARRNESASRKESAIRSESANRKESATRPASAKRRESIKRRESTIRNESTKRRESAARRAAADRKESANRNESTNRKESAIRLESAKRRESAVCRKLTIRKESIRRRESVKRAKLAKRRVSAFWRDSANRKESAVRSESALRKESAIRCKSAPRRESAIRRESAKRSESAISWEFIAALSVPPPIPHKPPPFFPKRLPPAKNRSNRTMTSNNSSNISGVKESLERFFSLPDGLFFLSEDLFFAIIYFVLTSQH

SEQ ID NO: 54025 - DNA, 1608 bp, Unknown
  Obtained from environmental sample
  misc_feature (1)..(1608): n is a, c, g, or t
atggcaaagaataaatcttccgataaaaaaaataatccgtccggcagcgaaaagaagcgttccaagctctctttaacgccgcttatattgctgctgttgttgctcgtcatcgtcctattgctcctgtttttcgcgggtggcaatctctttgggaaaaaaggcggcggtttatggggtatcggcggcggtacggataaggctgcgataaactcccaactgattgccgactcgctacgtttagcggactccctgcggatcgccgattctctgcgcggagcggatttacagcgaatcgccgactctttacgcagagcagactcgctccgaacagccgactccttgcggttggccgaatctctccaaaaggccgagactcggcgtttggccaacttagcgcgtttaaccgattccctacggcgaattgattctttgcggatggtcaatttccggcaaacggccgattctctccgtttagccgattccaagcgaatcgccgactccttgcggttggttgattcattgcggttggcggattctttgcggtcggccgcggctcggcgcgcggcggattcccttcgtttggttgactcgttacggatagtagattctctgcgtttgattgattccctgcgttttgccgaagccggacgtgtggcggattccttgcggttggctgattcgctacgtatagcggattctttgcgactggccgattcgttacgtctggccgattcgctaagtatagttgattctttacggctggctgattcgttgcgtttagccgactctctggctcttgctattgattccgccgccctgcgcgcggcggcttgcgcccgcgacaccatagccccgtcggtctacgccgacccgtccggcggtttgcacaaacaggcggtgtccgtcaaactcacggccaacaaggtctgcagggtggagtggagcgtagacggggtgaagaattggaaggtctacaacggcaaaccgattgacatatcgaaaaacagcactctctactacagggccgttgacgactgcggaagggtaatgaacataaaaagcaagcgctacgaatttgacatgaccgcgcggcgctgtccggcggacatggagctcgtcaagttcggtaacaccgagatttgcgtggacatttacgagtggccgaacaagaagggcgccgttccgcaatcgtacgtatcgctgtatcaggctatggactcctgcttcgctatgcgcaagcggctttgcacgacggaggagtggacggcggcgtgcggcgggccggagaagtggaagtacacgtacggggagatttatgaatggaatacctgcgcctcgcgtgacactttggcccataggtcgggcagcaaaccggagtgccgcggttatttcggggtttttgacatgtccggaaatctagccgagtggacctccacgccggcgccgcaggacaagtcgttcaacaacgtgatgggcgggttttggacgagcggcgaccagagccgctgcgtcgacgcccggtacagttacttcccgcagaataaacacaatccggtcggctttcgttgctgcgtggacgcgcctccggcgtcggggggcgggcgataa

SEQ ID NO: 54026 - protein, 535 aa, Unknown
  Obtained from environmental sample
  DOMAIN (350)...(525): Domain of unknown function (DUF323)
  misc_feature (1)..(535): Xaa is any amino acid
MAKNKSSDKKNNPSGSEKKRSKLSLTPLILLLLLLVIVLLLLFFAGGNLFGKKGGGLWGIGGGTDKAAINSQLIADSLRLADSLRIADSLRGADLQRIADSLRRADSLRTADSLRLAESLQKAETRRLANLARLTDSLRRIDSLRMVNFRQTADSLRLADSKRIADSLRLVDSLRLADSLRSAAARRAADSLRLVDSLRIVDSLRLIDSLRFAEAGRVADSLRLADSLRIADSLRLADSLRLADSLSIVDSLRLADSLRLADSLALAIDSAALRAAACARDTIAPSVYADPSGGLHKQAVSVKLTANKVCRVEWSVDGVKNWKVYNGKPIDISKNSTLYYRAVDDCGRVMNIKSKRYEFDMTARRCPADMELVKFGNTEICVDIYEWPNKKGAVPQSYVSLYQAMDSCFAMRKRLCTTEEWTAACGGPEKWKYTYGEIYEWNTCASRDTLAHRSGSKPECRGYFGVFDMSGNLAEWTSTPAPQDKSFNNVMGGFWTSGDQSRCVDARYSYFPQNKHNPVGFRCCVDAPPASGGGR

SEQ ID NO: 54027 - DNA, 1533 bp, Unknown
  Obtained from environmental sample
  misc_feature (1)..(1533): n is a, c, g, or t
ttggccgccggggtcaacgccctcaacgcgtttatagggcccggtaaaaccccgcaagactatgttgattacgcccgaaacgacgcggacggcattgtacgcggcgaccttctgctgactatggcggaggggctcaaccgcgtaaccgaaagattggaaacgctcggcttgacaatattgaaagacacgcgcggacaatacgttacacgcggttggcgcaacgtcaagatcaacggtgagaatataaaaccgattttggcccaagcggtcttgaagcgggagaatatcaccgtgctgaaccgggtgaacgttttcgaatacgtcgtgcaagagaatcgaattttgggcgcttacgcgatagcggttgacgagccgatactgtacgttatctcggccaaggccgtgttatgcgccaccggcggcgcctcggggctgtacaaaccgaacaatccgggcggctctcggcacaagctgtggtatccgcccttcaacaccggagcgggcctttctatgggtattcgcgccggagcggaaatgacctctttggaaatgcgtttcatcgccctgaggtgcaaggataccatagctcccacgggaaccttggcgcaaggagtcggggcgaagcagattaattcgctcggggaaatttacgaagacaaatacggcctcacgacctcgcagcgtttgtacggaactgtgacggaaaatctgagcggacgcggcccgtgctatctgaagacggcaggcatcacgaaagagcaggatgaggatttggtgaaggcctacctcaacatggccccgagccagagtttgcgctggttggaaagcgggctgccgccgagcgtcaaggatgtggaaatagtgggaaccgaaccgtacgtcacgggcggccacaccggcgccggatattgggtggacacgcatcgggaaacgaccgtgcgcggtcttttcgcggtcggggacgcggccgggggctgcccgcagaaatatgtgaccggggccttggtcgagggagagatagcggccaaaagagcggtcggatatatgagcgaaaaaatacctccgttagcgaggggcggcgccgaaacggtaaagcgaaaactggaaagttatttatcccataatagcggcgagatttatttttctgtggattatcttgaagaggaaatgcagacgtcaatggataaacacgccggagggatcggcgcctcttaccgtttctcggaagcatcgttaaagagcgccgacaaaaaaatccgagaattggaagcgcgctccaaccatatctgcgccgccgatatgcaggaattggtttacatattggaactcaaagaacgcctgattctatgcaagtcgttgattgtccatctttcgaccagaaaagagacgcgctggcgcagtttcgccgagcgcgtcgattttccgaacaaaagcgatacgtgggagtgttacgtaaattcccgctcggaaaacggcaaaatctgcgccatttcacggccgttagtgatggagggagagttttatgagcattga

SEQ ID NO: 54028 - protein, 510 aa, Unknown
  Obtained from environmental sample
  DOMAIN (387)...(508): Fumarate reductase/succinate dehydrogenase flavoprotein C-terminal domain
  misc_feature (1)..(510): Xaa is any amino acid
MAAGVNALNAFIGPGKTPQDYVDYARNDADGIVRGDLLLTMAEGLNRVTERLETLGLTILKDTRGQYVTRGWRNVKINGENIKPILAQAVLKRENITVLNRVNVFEYVVQENRILGAYAIAVDEPILYVISAKAVLCATGGASGLYKPNNPGGSRHKLWYPPFNTGAGLSMGIRAGAEMTSLEMRFIALRCKDTIAPTGTLAQGVGAKQINSLGEIYEDKYGLTTSQRLYGTVTENLSGRGPCYLKTAGITKEQDEDLVKAYLNMAPSQSLRWLESGLPPSVKDVEIVGTEPYVTGGHTGAGYWVDTHRETTVRGLFAVGDAAGGCPQKYVTGALVEGEIAAKRAVGYMSEKIPPLARGGAETVKRKLESYLSHNSGEIYFSVDYLEEEMQTSMDKHAGGIGASYRFSEASLKSADKKIRELEARSNHICAADMQELVYILELKERLILCKSLIVHLSTRKETRWRSFAERVDFPNKSDTWECYVNSRSENGKICAISRPLVMEGEFYEH

SEQ ID NO: 54029 - DNA, 327 bp, Unknown
  Obtained from environmental sample
  misc_feature (1)..(327): n is a, c, g, or t
atgagcattgaaataaagcgtgatttatgcgtaggctgcggcaaatgttcacagatttgcccggggagtctaatcaaattgaaagacgggaaagccgtgattccgcgccttgagcgctgttggggatgcgcctcttgcgtcaaggaatgtccgtcggaggcgatagcgcttttcctcggcgaggatataggggggctggggggaaagatgacggtacgcaaggagggaacgctgttacattggacgctgactatgcctgactcgacatccaaaaccgttactattgacagtcgggattcgaacaagtattangattcgcaggattaa

SEQ ID NO: 54030 - protein, 108 aa, Unknown
  Obtained from environmental sample
  DOMAIN (33)...(56): 4Fe-4S binding domain
  misc_feature (1)..(108): Xaa is any amino acid
MSIEIKRDLCVGCGKCSQICPGSLIKLKDGKAVIPRLERCWGCASCVKECPSEAIALFLGEDIGGLGGKMTVRKEGTLLHWTLTMPDSTSKTVTIDSRDSNKYXDSQD

SEQ ID NO: 54031 - DNA, 735 bp, Unknown
  Obtained from environmental sample
  misc_feature (1)..(735): n is a, c, g, or t
gtgataagtttgttgaatgacggagcgcccgtactcacggaaaaggggaaatccgcatccgccggtgactatataaaagaaacgccaaaactgcttgcggctgtttttgattcccgcacgcccacgttccgccataaaatgtacagcgaatataaagccacgcggcaaaaggctccggatgaccttcacgcgcaggttccgttagtggaagaatttcttgccgcgctgaacatcccgtgcctgcgggcggacggttttgaggccgatgatattatcgcgaccctggcaaaaaaatgccgggaagaaaaaaggcagtgttacatactttcctcggacaaggatctgctgcagctggcgggaggcggaacttttgagctgcgtcccgcgaaatccccaaaaaacaccgctcagggtgggccgccttcgtccgccgcggcgccaggatgggaaataatcgggccggatgaagtaaaggccgaatggggcgtcccgccggaaaagatactggaccttctttcgcttgccggggacgcttctgacaatattccgggcgtaaaaggcataggtgaaaaaacggccgtggaatatataatgcgttacggctcgcttgacggaatctataaaaacatcgccggtcttgggggcagcagaggcaaaaagatcgccgaggggaaagagagcgcgtatttttcacagtcattgataaggctggaaacaatgtgccattgccaataa

SEQ ID NO: 54032 - protein, 244 aa, Unknown
  Obtained from environmental sample
  DOMAIN (163)...(244): 5'-3' exonuclease, C-terminal SAM fold
  misc_feature (1)..(244): Xaa is any amino acid
MISLLNDGAPVLTEKGKSASAGDYIKETPKLLAAVFDSRTPTFRHKMYSEYKATRQKAPDDLHAQVPLVEEFLAALNIPCLRADGFEADDIIATLAKKCREEKRQCYILSSDKDLLQLAGGGTFELRPAKSPKNTAQGGPPSSAAAPGWEIIGPDEVKAEWGVPPEKILDLLSLAGDASDNIPGVKGIGEKTAVEYIMRYGSLDGIYKNIAGLGGSRGKKIAEGKESAYFSQSLIRLETMCHCQ

SEQ ID NO: 54033 - DNA, 411 bp, Unknown
  Obtained from environmental sample
  misc_feature (1)..(411): n is a, c, g, or t
atgcaggaggacaaggaagctgtcttcggcgccgttgacacggtaaaagcctgtctgtcggtcttccgcggaatgtttgagactattacgtttaatactgataatatgtacaaaagcgcgttgggcggatacacaaacgcaacagacgcggctgactggctggtaaaaaaggggctccccttcagggaagcgcacgaaataacaggcagacttgtgttatacgccattaataaaaaggtacggcttgacgaattgactctggacgaaattaaatccatatcgcccgtgtttgatgaaacgttttacagggctatttccatcgagaccggcgtcagcgcgagggatttaaccggcggcccggcggaaaaagccgtgcttaaatcgatagaacaattatcaaagagaatatga

SEQ ID NO: 54034 - protein, 136 aa, Unknown
  Obtained from environmental sample
  misc_feature (1)..(136): Xaa is any amino acid
MQEDKEAVFGAVDTVKACLSVFRGMFETITFNTDNMYKSALGGYTNATDAADWLVKKGLPFREAHEITGRLVLYAINKKVRLDELTLDEIKSISPVFDETFYRAISIETGVSARDLTGGPAEKAVLKSIEQLSKRI

SEQ ID NO: 54035 - DNA, 999 bp, Unknown
  Obtained from environmental sample
  misc_feature (1)..(999): n is a, c, g, or t
gtgtttatacgtagatggtccaatatagacgaactcagaaaggctcttgcagcagcttatgcagaaacagaaaaaccagttctcataataggcacttccattatgggaaaagggattaaagatgcacagaacaatgcttttgaaagcaaagtttcaactcacgggcaacctatagatgcggctggagcttccaccgctcaaaccatacagagccttggcggagacccgcaaaatccctttgttatttggcccgaagttaaagaattttttgataatcgcttggcagaacttcaaaaagaagccgattcctggcagcaaagatttgaaacttggaaaggaacctacccaaacttggctgcagatttagagaactggcaaaaaaacagggcacccgttttggatttatcggttgttccgcaaaaacaaggggttgcaacaagggtgaactccggtgctattttatcttggcttgcagataaccaaaaaaatatggtttgctcttcggcagacctttccaacagcgataacacacaagcatttttagataaaacaggcatactaaaacccgatgatttcagtggagcatttttgcaagctggagttgccgagctaactatgggctccgttgcctgtggcattgttttgcacggggaatttaccgcaacttgtgcgaccttcttcgtgttcagcgattatatgaagcccattttaaggcttgcatcactaatggctttgcccgttaaatttttattcacccacgatagtttcagggttggcgaagatggtcccacccacgagcctgtggagcaagaagcacaaattcgcctattggaaaacatgagcctgccaaacggcaagccttctatgctggttttgcgccccgcagatgctaacgaaacaactcttgcttgggaaatggctatggcaaacggagatagcccaaccgctctcatattgtctaggcaaacaatgcctccattggaggaatccccattctag

SEQ ID NO: 54036 - protein, 332 aa, Unknown
  Obtained from environmental sample
  DOMAIN (144)...(326): Transketolase, pyridine binding domain
  misc_feature (1)..(332): Xaa is any amino acid
MFIRRWSNIDELRKALAAAYAETEKPVLIIGTSIMGKGIKDAQNNAFESKVSTHGQPIDAAGASTAQTIQSLGGDPQNPFVIWPEVKEFFDNRLAELQKEADSWQQRFETWKGTYPNLAADLENWQKNRAPVLDLSVVPQKQGVATRVNSGAILSWLADNQKNMVCSSADLSNSDNTQAFLDKTGILKPDDFSGAFLQAGVAELTMGSVACGIVLHGEFTATCATFFVFSDYMKPILRLASLMALPVKFLFTHDSFRVGEDGPTHEPVEQEAQIRLLENMSLPNGKPSMLVLRPADANETTLAWEMAMANGDSPTALILSRQTMPPLEESPF

SEQ ID NO: 54037 - DNA, 531 bp, Unknown
  Obtained from environmental sample
  misc_feature (1)..(531): n is a, c, g, or t
atgctaacgaaacaactcttgcttgggaaatggctatggcaaacggagatagcccaaccgctctcatattgtctaggcaaacaatgcctccattggaggaatccccattctagagtctgtgcttcaggctatattgtgcaaaatgcagaaaaccntaagctgacatttgctgccaacggctccgatgtttatttatgctgccaagctgctgacattntgcgcaaagaaggaatttccgtgcgcgtggttagcgttatgagcccaaggcttttcatggacttgccgcaaaaagagcgcgaggctttgattcctcgctggggagcggcatttgctgtttccagcggtttgccatctgtgtttgcacctatagttggaccgttagggcattcctggggtttaaccagctttggaaggtctgcaccgttcacagttttggaaaaggaatttggctacactccagaagcggttgcagaaaaagcgaaaatttatctaaaaaattatgaggagattaggagggaattatgctcataa

SEQ ID NO: 54038 - protein, 176 aa, Unknown
  Obtained from environmental sample
  misc_feature (1)..(176): Xaa is any amino acid
MLTKQLLLGKWLWQTEIAQPLSYCLGKQCLHWRNPHSRVCASGYIVQNAENXKLTFAANGSDVYLCCQAADIXRKEGISVRVVSVMSPRLFMDLPQKEREALIPRWGAAFAVSSGLPSVFAPIVGPLGHSWGLTSFGRSAPFTVLEKEFGYTPEAVAEKAKIYLKNYEEIRRELCS

SEQ ID NO: 54039 - DNA, 834 bp, Unknown
  Obtained from environmental sample
  misc_feature (1)..(834): n is a, c, g, or t
ttggaaaacaaagttaaatacaatccgagcatagttggcattttaataataaaccccgacaatcctacgggcatggtgtacccgcttgagcatcttaaaaagatgattgagattgcaaaagaatacaaagtgttcgtgatagccgatgaaatctacaataaagtggtgtataacggagcgcgttcatactcgcttgcggaatatataggcgatgcacccggcatagctatgaaagggctttccaaggaattgccgtggcccggttctcgctgcggctggatggagtattacaacagggacaaagaccaagaatttgccgctttttgcagcgcactggacaatgctaagatggtggaggtttgctcaacaacccttccgcagctcgcgttgccgcttattttgggcgatagccgctatgaggcacaccgtgctaatttaaacgagcaaataggcaaacgcagcactttgataaacaaaattttaggcgaagttgccgaactgaaattcaaccccacttacggcgcattctacaattccataattttcagagacggagttttgaacaacaaacaaaccctgcccattgaaaatccaaagatgaaagcacttgtagaggaatggtgtgagggcgttagcccccgattaccgctttgtctattaccttctcggctcaactggaatttgcgtggtgcccatcagcagtttttgctcggagcttttgggctttcgcataacccttttggaagaagacgaaaaggaattgaacaatgttttcacaacgctcagagatgctatcaaagcgtatgtgaagagtgcctagcgagattcctttaa

SEQ ID NO: 54040 - protein, 277 aa, Unknown
  Obtained from environmental sample
  misc_feature (1)..(277): Xaa is any amino acid
MENKVKYNPSIVGILIINPDNPTGMVYPLEHLKKMIEIAKEYKVFVIADEIYNKVVYNGARSYSLAEYIGDAPGIAMKGLSKELPWPGSRCGWMEYYNRDKDQEFAAFCSALDNAKMVEVCSTTLPQLALPLILGDSRYEAHRANLNEQIGKRSTLINKILGEVAELKFNPTYGAFYNSIIFRDGVLNNKQTLPIENPKMKALVEEWCEGVSPRLPLCLLPSRLNWNLRGAHQQFLLGAFGLSHNPFGRRRKGIEQCFHNAQRCYQSVCEECLARFL

SEQ ID NO: 54041 - DNA, 1692 bp, Unknown
  Obtained from environmental sample
  misc_feature (1)..(1692): n is a, c, g, or t
ttgaagaaagaacaatacactgtttttcgccaatcattgtatgacttcccatgccctgtaacgcttgggaaaaatgcgccttcttttgggcttcaccgctataaacagggcttgcggtttgttccacccgatgatgaagggtttaccatgcgtggcgataaacagcggcttgtctacaaggggcggcggcgttcccatcggtttacgatactcggcgatacggcttttgaatacgattgtatccttaaaagggaacctgaaagcaatattatttctttacgcatggaaggtgctgaaagttttgactttttccggcagccggattttgtagaagaaccttttttgagggggtcttatgccgtctacaaaaaagaaacgctggtaggcgaagggacaggaaagctctgccatatacacaggccggaggttattgacgcaagggggcggcggtgctggggggaattgtcggttgttgggaacgagttacacataacgatacctgaaaattggcttgctgaagccaagtatccggttattgttgatcctacgattggcactactgcggttgggagccaatacctaattgaatatgacccgccttatgatccctggattcaaattatgtttgagggttcaatacctgtaaaccgttttttggctgcagatacgttaaatgggcaatgcacagcttatttgtatacaaatgacagtttttatacaggagaggaatacggacggcctgttttatattcagataacagcaataagccgcagacaaggaaatcaataaatgaggggctggctgactttcatatttacagggggcttccggcaggatggcgcaatgcaaatttttcgactaatggaacgattgcaagcggttcatatatctggtttggagtttttgtagattttttttgggagccacggtttgattttggcgcaaaatgctatagttgtgattggtatgacattgggaatagcataccgaacacatacccgctttataatgctaattggtataatgattttaagttatccatgtactttacctacgccggtgctgggcagaatcaccagaggacattgacgcagggggtttcgttaccagataacaagatattaacaggaaattacaagcgcacagcatcgcaaacggttcaggcagacgcaacgccaataaagcatcttacaattatcaagaacatacaagacacattaagcagttttggccttgctacaaagatgcttacactttttacaagaatacaagaaacattaagctgttatgacttaacgacaagggtgcattccattttatcaagcataaaagactcggtaaacagttttgaactaagcaggtcttcttttttattttaccgcaatatccatgaagatttagttacaaacgataccctgtaccatttgagaaatattgtcagtgggcttgtagacagtgtgggtatggagagtgaagcaaaaacagggtttattcatttcagaacaataagtgaaactgcccatgttataagctcagtatttcgtgggatggttttttttgctcgaattgttacagaggtttttgtccgtgattatttattaggtcggttcttaaaatcaaaagcagaggtgtcaataaaatcctctgtttgcagggagattactcttgaaagccggattattgagaaatga

SEQ ID NO: 54042 - protein, 563 aa, Unknown
  Obtained from environmental sample
  misc_feature (1)..(563): Xaa is any amino acid
MKKEQYTVFRQSLYDFPCPVTLGKNAPSFGLHRYKQGLRFVPPDDEGFTMRGDKQRLVYKGRRRSHRFTILGDTAFEYDCILKREPESNIISLRMEGAESFDFFRQPDFVEEPFLRGSYAVYKKETLVGEGTGKLCHIHRPEVIDARGRRCWGELSVVGNELHITIPENWLAEAKYPVIVDPTIGTTAVGSQYLIEYDPPYDPWIQIMFEGSIPVNRFLAADTLNGQCTAYLYTNDSFYTGEEYGRPVLYSDNSNKPQTRKSINEGLADFHIYRGLPAGWRNANFSTNGTIASGSYIWFGVFVDFFWEPRFDFGAKCYSCDWYDIGNSIPNTYPLYNANWYNDFKLSMYFTYAGAGQNHQRTLTQGVSLPDNKILTGNYKRTASQTVQADATPIKHLTIIKNIQDTLSSFGLATKMLTLFTRIQETLSCYDLTTRVHSILSSIKDSVNSFELSRSSFLFYRNIHEDLVTNDTLYHLRNIVSGLVDSVGMESEAKTGFIHFRTISETAHVISSVFRGMVFFARIVTEVFVRDYLLGRFLKSKAEVSIKSSVCREITLESRIIEK

SEQ ID NO: 54043 - DNA, 1062 bp, Unknown
  Obtained from environmental sample
  misc_feature (1)..(1062): n is a, c, g, or t
atggattttacaccggagaaaataacaccttactttcagccaatactgtcggcggattcaaaaagcgtgtattcctacgaaattttgggaagatatatcgacgataagggggaagtgcggtctctggggaacttctttaacgatgataatacctcaaatgaggacgctctgcgcatagacaggcatataagaagagaagccatgaggaagtatgccgaggaaaaacgggacgagtacctgtttattaatataaggctcgcgtggctgcttcagtttgcggaaaacccggaagaaatgcttaccttgcaatgggcaaaggaattcgatattactcccgacaagcttgtcatagaaattacggaagaggaatttaacgcgaacgaaacatatatccgcacgataatccactataaaaatgtcggctgccgtatcgctcttgatgattacggaaaaaaagccagcgatatcgagcgtttggcgaaaataaagcccgatattatcaaaataaacatggattacatccacagaaccgaaaattcctaccactaccgcgaatatttgcagtctgttgccgattttgccgagtcggtcggaattgaggtgctgtatgaaggcatagaaacccaaaaacagcttgatatctgcatgtcgttaaagggaaggtattatcaaggattcctcatcgccatgcctcagccttcaatgtgtgatgctaaaataaacgacgctgttttttccacggcaattgataatgtatatacgctttttcaggatgaaataatagtgacggaagctttgcgaaaatctttggacacgcgggttgaacgtttcctggcgcagaatccttttaattctgaggataaagatcatgacaactaccttgttaacctctgccaggaattgacgaacgtgcggctggtttttttatgcgacagacgcggcaaccagctaacttccaacattgtatggcagccgggaggagccgcgtttatcaacagcggccgtttggcaaagtataaaaacaggaactgggtatggcgcggctattttttcgaaacttga

SEQ ID NO: 54044 - protein, 353 aa, Unknown
  Obtained from environmental sample
  DOMAIN (1)...(231): EAL domain
  misc_feature (1)..(353): Xaa is any amino acid
MDFTPEKITPYFQPILSADSKSVYSYEILGRYIDDKGEVRSLGNFFNDDNTSNEDALRIDRHIRREAMRKYAEEKRDEYLFINIRLAWLLQFAENPEEMLTLQWAKEFDITPDKLVIEITEEEFNANETYIRTIIHYKNVGCRIALDDYGKKASDIERLAKIKPDIIKINMDYIHRTENSYHYREYLQSVADFAESVGIEVLYEGIETQKQLDICMSLKGRYYQGFLIAMPQPSMCDAKINDAVFSTAIDNVYTLFQDEIIVTEALRKSLDTRVERFLAQNPFNSEDKDHDNYLVNLCQELTNVRLVFLCDRRGNQLTSNIVWQPGGAAFINSGRLAKYKNRNWVWRGYFFET

SEQ ID NO: 54045 - DNA, 957 bp, Unknown
  Obtained from environmental sample
  misc_feature (1)..(957): n is a, c, g, or t
atgcacggggtttttgttgattccaagggaaagaaaacgagcgtttcaataggggaggacgatgacgatccggtgtttaccataacggatcttttgccccaccttgcccaggatcagatgcagaagaaagcttccgaagttgtggagggggaagacctggacgtgctttctggttcccggccatacgttgacgagaaggtgaaagaaaaggtaaaactgcgcttcctttcgattctgaacgaaaaattcggcctggacgaaaaaggctttgcctcggcggagattgaatttgtccccgccgccaaagcccgcgaccttgggcttgatcgcagtatgattggcgcttacggccacgatgacaggagcggcgcatacccggcgctcagggcgctgatggaaattgccgcccaaaaggaagcgcctgaaaaaaccgtgctttgctatttttccgacaaggaagagatcggttcggttggcaataccggggcgcagtcctggggctttgaaaatttcattgctgcccttgccggggaagacgatctgcgccgctgtcttagcaattcttccatgctttcctgcgatgtaagtcccgcttttgatccttcgtactcaagcgtttatgaaaagcggaattcgtcttacatgggtaaaggtctggttattaacaagtacaccggctcgaggggcaaagttggcgcatcagacgcaaacgcggaatactgcgccagggtgctggccgtcttcgacaaaaatagaatcccctggcagtttggcgaaatgggcaaggtggataaaggcggcggcggaaccatcgcccttcatgcggcaaaatacggcattgaagttcttgactgcggcacccctgtcttgtcgatgcattcccccttcgaggtaatcagcaagatcgacctttatatcgcgttcaaaggatacacggcctttttgagggagatttaa

SEQ ID NO: 54046 - protein, 318 aa, Unknown
  Obtained from environmental sample
  DOMAIN (55)...(310): M42 glutamyl aminopeptidase
  misc_feature (1)..(318): Xaa is any amino acid
MHGVFVDSKGKKTSVSIGEDDDDPVFTITDLLPHLAQDQMQKKASEVVEGEDLDVLSGSRPYVDEKVKEKVKLRFLSILNEKFGLDEKGFASAEIEFVPAAKARDLGLDRSMIGAYGHDDRSGAYPALRALMEIAAQKEAPEKTVLCYFSDKEEIGSVGNTGAQSWGFENFIAALAGEDDLRRCLSNSSMLSCDVSPAFDPSYSSVYEKRNSSYMGKGLVINKYTGSRGKVGASDANAEYCARVLAVFDKNRIPWQFGEMGKVDKGGGGTIALHAAKYGIEVLDCGTPVLSMHSPFEVISKIDLYIAFKGYTAFLREI

SEQ ID NO: 54047 - DNA, 744 bp, Unknown
  Obtained from environmental sample
  misc_feature (1)..(744): n is a, c, g, or t
atgaatcttgaagcttttattctcggctgcggaggaatgatgcctctgcccaaccgtcatcttacgtcggtgcttttaaggcgggaaggggacctcttcctgtttgactgcggcgagggaacccaggtgtcgctcaggcgtcttaacctgcggtggaaaaaaatctccgttatttttgtcagccatacccacgccgatcacgttacgggaattccgggccttcttatgctttcttcgcaggtggacagagacgatcccctttacataatcgggccgcccaggattgccgaatacattgaaagcagtcgccgcgtgctggatatgtacatcaactatgagatcgttgtcaaggaaataaccgcgcccggagtggtttattcgggcgaggattttcatgtacgggcttttcccttgaggcatacaaagccctgctacggctatgctctggaggaggacaagcgccccggggaattccacgttgaaaaagccgaggccttangcgttaagcgcgggccaaagtgggccgcccttcagtcaggccagatcgtccaggccgaagacggaacggacgtacgcccggatcaggttcttggccccgaaagaacggggagaaattttcttttgttaccgacagccttgctttccctgaaatatcgtccgaggtcgcgggttccgacctctttgtctgcgagggtatgtttgaacacgccctcgcagaagacgcccacggcaaaaaacacatga

SEQ ID NO: 54048 - protein, 247 aa, Unknown
  Obtained from environmental sample
  DOMAIN (20)...(213): Metallo-beta-lactamase superfamily
  misc_feature (1)..(247): Xaa is any amino acid
MNLEAFILGCGGMMPLPNRHLTSVLLRREGDLFLFDCGEGTQVSLRRLNLRWKKISVIFVSHTHADHVTGIPGLLMLSSQVDRDDPLYIIGPPRIAEYIESSRRVLDMYINYEIVVKEITAPGVVYSGEDFHVRAFPLRHTKPCYGYALEEDKRPGEFHVEKAEALXVKRGPKWAALQSGQIVQAEDGTDVRPDQVLGPERTGRNFLLLPTALLSLKYRPRSRVPTSLSARVCLNTPSQKTPTAKNT

SEQ ID NO: 54049 - DNA, 411 bp, Unknown
  Obtained from environmental sample
  misc_feature (1)..(411): n is a, c, g, or t
gtgggccgcccttcagtcaggccagatcgtccaggccgaagacggaacggacgtacgcccggatcaggttcttggccccgaaagaacggggagaaattttcttttgttaccgacagccttgctttccctgaaatatcgtccgaggtcgcgggttccgacctctttgtctgcgagggtatgtttgaacacgccctcgcagaagacgcccacggcaaaaaacacatgactgcggttgaagccgcccaaatagcggcccagtcaaacggcataaaaaaactggcgctcatccactatagcccgcgctataccgagtacgacctgaaacagcttctcaaggaagccaaagagatttttcccgacacggtactttccaaagacaaggcagtgtttccgattgagtatgtggattga

SEQ ID NO: 54050 - protein, 136 aa, Unknown
  Obtained from environmental sample
  misc_feature (1)..(136): Xaa is any amino acid
MGRPSVRPDRPGRRRNGRTPGSGSWPRKNGEKFSFVTDSLAFPEISSEVAGSDLFVCEGMFEHALAEDAHGKKHMTAVEAAQIAAQSNGIKKLALIHYSPRYTEYDLKQLLKEAKEIFPDTVLSKDKAVFPIEYVD

SEQ ID NO: 54051 - DNA, 1338 bp, Unknown
  Obtained from environmental sample
  misc_feature (1)..(1338): n is a, c, g, or t
atgaaaattaaaaatctttttataatcggtcttttatttttttgttttgcctgcgcaaaaaatactaacatcggcgacggaataaaaaaagtgcgagtaacgcccgctgttattcacgaacaatccgatgaggcgtcaggctttggaagtttgtcttttcttaccaaagtagacattacatctccgcaggaagcggtaattaaaaaactttatttccgcgaaggcgattttgtacggcagggacaagttgtgattcaacttgaaaacccgcagataaatttagcggttgaacgatcggaaaacaattattcgcaagcactggcggcgaggaatttagccgactcaaggcttcttgagggtatctttcaggcggaggctcagcttcttactcttgataaagctgaggcggaacttgctctgtcaaaaaagagatgggaagaagacagacgcaaacatttaaatcaggagacgctttttgaggcgggcggcgttcacacggaagcaatccttgtaagcagattcagtcttgataccgaatgggagcagattcaattaatggagagggaacttgagattaggcgcattggctgtcgggatcaagaccttgttaaagcgggcattgccgttccgttaggtgaaatcgaacggcaagccgcgcttgtctcgcttatgacatcaagtttaaaggcggaacttgaagcggcaaacgcccgtcttgaagcggcggaaaaggaacttaaatccgccaatatagcgcttgaggaattgacaataagaagtccagccggaggagttatcggcgcgcgttatcttgaggagggcgagcgtgtccgtcttcaggataaaattatcagccttattgatacagcttcgttatacgcaatttttccggtacgcgaaaaggacgctctgcgaattgaaaagggaatgaaagcctttgcgatgatagacggaacaggcgaaacaagaaacggtattgtcgatttaatttatcctcaggcggacagtcaatctttaagttttcttgtgcgcgttctactgcaaaataccagcgccaatagcagattaaaaccgggaatgtttacccgcgttacgataaatttgggtcaaccgggaaacgccgtgtttattcccgaatcttcgatatttaatcggaaaaacgacgagggcagtatttttattgtcaacggcaaatctttaacggaacggaaaataattatcgggacaactgctggagaagaatgtgaaataacttcgggattaaatgccggagaactggttgttttgcgccctgatccggatttaagggagggaacaaatgtctcgattatggaataa

SEQ ID NO: 54052 - protein, 445 aa, Unknown
  Obtained from environmental sample
  SIGNAL (1)...(19)
  DOMAIN (55)...(377): HlyD family secretion protein
  misc_feature (1)..(445): Xaa is any amino acid
MKIKNLFIIGLLFFCFACAKNTNIGDGIKKVRVTPAVIHEQSDEASGFGSLSFLTKVDITSPQEAVIKKLYFREGDFVRQGQVVIQLENPQINLAVERSENNYSQALAARNLADSRLLEGIFQAEAQLLTLDKAEAELALSKKRWEEDRRKHLNQETLFEAGGVHTEAILVSRFSLDTEWEQIQLMERELEIRRIGCRDQDLVKAGIAVPLGEIERQAALVSLMTSSLKAELEAANARLEAAEKELKSANIALEELTIRSPAGGVIGARYLEEGERVRLQDKIISLIDTASLYAIFPVREKDALRIEKGMKAFAMIDGTGETRNGIVDLIYPQADSQSLSFLVRVLLQNTSANSRLKPGMFTRVTINLGQPGNAVFIPESSIFNRKNDEGSIFIVNGKSLTERKIIIGTTAGEECEITSGLNAGELVVLRPDPDLREGTNVSIME

SEQ ID NO: 54053 - DNA, 1275 bp, Unknown
  Obtained from environmental sample
  misc_feature (1)..(1275): n is a, c, g, or t
atggcccttaaatttttagctccccaaaaagcgaatatcgattcaatcattgaaatcgatacggagctcaacgaaatccaggatttggatttccttttggagcggatacttcgtgaagccaggaaagtggttcatgccgatgccggttcaatttatattaagcagattgtagaagaagacggcttaagagtcgaaaagctggccattaaatactcgcaaaatgatactttgcaaaaagagctgcctccggggcagaaacttttgtattctgttttttcattgctggtaaacgataagacattgtcgggttactgcgctcttacaaagcagttggtaaatatcgaagacgcctacaatttgccctctggagtcccgtattcattcggaaagagctatgatcagattacagggtataaaacaacctccatactgtcggttcctctaaagaatgccgacggaaggcttcttggggtaattcagataataaattccaaggataaaaaagggaatatcataccattctcaaaggaggatgagcgattaattacccactttgccgtaaacgcgacgatggcgcttcaaaaagcccagattatgcgtaccatgatccttaggatgataaaaatggcggagcttcgggatcccaaagaaacgggaacccatgtaaaccgcgtcgcgggctacgctgtggaaatttacgatcgctgggccagccgacagggagtaccggaagatgaaaggaacaaattcaaggacagtttcaggattgcttccatgctgcatgacgcgggcaaggttgccattccggatattattttaaaaaagcctgccaagtttacgcccgaagagtaccaggttatgcagaaccatacggtttacggctcggcgctttttgacgatccccaatctccgcttgatgtcctggcccgtgacatagcttttacccatcatgaaaactgggacggcaccggctaccccggctgggtggatccgtcaacgggagccccgattaagacgggagaagacggcaagccaatcgggaaaaagggagaagagattccactttcggggcggattgtaagccttgccgatgttttcgacgccctttgttccagacgggtttataaggatccatggaccgaggacgatgtgcttcttgaaataaaaaaactgtccggtacaaaattcgatcccgatctggtagatgttttctttgagatacttccctctatcaagcagattcagcagctatatcccgacggcgcttctcattaa

SEQ ID NO: 54054 - protein, 424 aa, Unknown
  Obtained from environmental sample
  DOMAIN (28)...(193): GAF domain
  misc_feature (1)..(424): Xaa is any amino acid
MALKFLAPQKANIDSIIEIDTELNEIQDLDFLLERILREARKVVHADAGSIYIKQIVEEDGLRVEKLAIKYSQNDTLQKELPPGQKLLYSVFSLLVNDKTLSGYCALTKQLVNIEDAYNLPSGVPYSFGKSYDQITGYKTTSILSVPLKNADGRLLGVIQIINSKDKKGNIIPFSKEDERLITHFAVNATMALQKAQIMRTMILRMIKMAELRDPKETGTHVNRVAGYAVEIYDRWASRQGVPEDERNKFKDSFRIASMLHDAGKVAIPDIILKKPAKFTPEEYQVMQNHTVYGSALFDDPQSPLDVLARDIAFTHHENWDGTGYPGWVDPSTGAPIKTGEDGKPIGKKGEEIPLSGRIVSLADVFDALCSRRVYKDPWTEDDVLLEIKKLSGTKFDPDLVDVFFEILPSIKQIQQLYPDGASH

SEQ ID NO: 54055 - DNA, 441 bp, Unknown
  Obtained from environmental sample
  misc_feature (1)..(441): n is a, c, g, or t
atggccgaaatgaatgtattggacgcgctatgcatcggggcaatccaagggctgggaggcggctttggtctgtccagaagcggctccaccatttcagtcggcgtttttaggggcataattttgtctgagtccacaaggttcagctttctcttgggcatcccgacaatagctgctgcagccactgtcgagggagggcacatggttaaggacatgctcaaaaatgatggtgtgggccaagcggcttggttttcgggggcatcaaaccccattcttttgagcgttgtcggcatttgcgcggcatgcgtttcggggtattttgcactgggcctgctgagtcgcttcacatcgaagccgcgcttgggaggatttgtgatatactgtcttgtcgtgggcgcagcgatcattgcattctattgggggttgcccgctaagaggctctaa

SEQ ID NO: 54056 - protein, 146 aa, Unknown
  Obtained from environmental sample
  DOMAIN (1)...(134): Bacitracin resistance protein BacA
  misc_feature (1)..(146): Xaa is any amino acid
MAEMNVLDALCIGAIQGLGGGFGLSRSGSTISVGVFRGIILSESTRFSFLLGIPTIAAAATVEGGHMVKDMLKNDGVGQAAWFSGASNPILLSVVGICAACVSGYFALGLLSRFTSKPRLGGFVIYCLVVGAAIIAFYWGLPAKRL

SEQ ID NO: 54057 - DNA, 876 bp, Unknown
  Obtained from environmental sample
  misc_feature (1)..(876): n is a, c, g, or t
ttgtcgtgggcgcagcgatcattgcattctattgggggttgcccgctaagaggctctaagaagcctttgcccgcgacattacagaaaaattgccatgcaccgttgtcaggaggcgcagtgatacatgttgtggatgtccacaagacctttgtggtcaaagacaagaagacgcgcaagaaaaagacgattgacgcggtcaaagggatcacttttcaagtaaagccaggcgaaatatatggcctcttgggtccaaatggggctggtaagtcaacgacgcttagaatgatagcggggctcatggaaccccagcaaggctcaatcgaagttttcggcaatgacacaaaaaaatcatccgaaaaagtccgtaaaaacataggcttcctttccaccgacttaggtgtctatgggcgtttttcgccccgcgagctattaaagatttttggcgaatttcaaggcgtagaaccccaagtggccgagaggcgcggaacctatttgctagaaatgcttggcttatcggattttttggacgtgaagatggaatccttttcatcggggcaaaagcagaaagtttctattgccagggccctgctgcacgacccaaaggcgattctttttgacgaacccacgacagggctggacgtgctgaccgcaaaaactgtccttgacctgataaaaatcatgaagggcgaggatcgcgcggtgatagttagcacccatgtcatgcccatggccgaacaaatatgcgacagaattgggataatctttgacggtaaacttcatggggatgccccaccaaaggaaatactggcacagttcggcgtcggcacgctggatgaagtattcttcaagctggctgcgagcggaggcaatgtatga

SEQ ID NO: 54058 - protein, 291 aa, Unknown
  Obtained from environmental sample
  DOMAIN (76)...(257): ABC transporter
  misc_feature (1)..(291): Xaa is any amino acid
MSWAQRSLHSIGGCPLRGSKKPLPATLQKNCHAPLSGGAVIHVVDVHKTFVVKDKKTRKKKTIDAVKGITFQVKPGEIYGLLGPNGAGKSTTLRMIAGLMEPQQGSIEVFGNDTKKSSEKVRKNIGFLSTDLGVYGRFSPRELLKIFGEFQGVEPQVAERRGTYLLEMLGLSDFLDVKMESFSSGQKQKVSIARALLHDPKAILFDEPTTGLDVLTAKTVLDLIKIMKGEDRAVIVSTHVMPMAEQICDRIGIIFDGKLHGDAPPKEILAQFGVGTLDEVFFKLAASGGNV

SEQ ID NO: 54059 - DNA, 1239 bp, Unknown
  Obtained from environmental sample
  misc_feature (1)..(1239): n is a, c, g, or t
atgaggggcgtttggctggtgttcaaaaaagaggttttggaactttccaaagatcgcaaaaccttgtttgtgacgttgttattgccgattattctatatcctatgctctttggcttcataggcaagatggtgaaaagggaagagcagcaggcgcgttcttcccagacgcggatcgccctgatagacccttcgggggcaatcgagcagttgattaaatccaaacctcttgatttcgagctagtgccgccccccgagtacgacgccaagcaggcgatcaaagacgaaaagctggagatgctcgtcaccctagaacccaacgccgcccaggacattgtagaacataagaccgttgctattgacgtgctctataaccgagtggaaaaatcggggcgcgttgggatgcagaggctagaagaagccattcaagagatggacaaaacaataattcaggaaaggctgaagaagctgggagcctctgcccaactggcctcgccgactgaaatccagtcaaggcaggttggcggccaggaaatgatgctggcgaagcagcttgggacaatgctgccatacatgttgatgctcatgctttttgcaggctctatgcagctgggtatatatgtgacagcgggcgagagggagcgcgggacgctgataaccttgctggccactggacttccacgccacgagatagtttgggggaaattgtgctacatcttttttatgggtatcgtcaactcggcgataaacatagccgctatggcattttcgatgggttccatggttgggcagatcagtgaagccgctgcggaggcagccgcagtcaatggtgcggtcgcggccccaccgctggccggtctagccgcagtcgccgaccctgctgtgattgttttgactctgttgctgatgattccactgggcctgaccttttccaacctgataatttttgtcgggatacaggcaaagaactcccaggaggcagggacttggatgatgccgatatttttgccgataatctttcttgcgattttttctatgatgccaggaatagaaaaaatgacctttttgacgtatgtgccaatcctcaacgtaagcttggtcatccgcaagctgtttgcacagcaggccagcgcatttgaatacctgatagccttttggatgacggtgggccttgctgcattgttgactttgctctcaacaaaatttctcaacagggaatcagcgcttttcaaaaatacctga

SEQ ID NO: 54060 - protein, 412 aa, Unknown
  Obtained from environmental sample
  misc_feature (1)..(412): Xaa is any amino acid
MRGVWLVFKKEVLELSKDRKTLFVTLLLPIILYPMLFGFIGKMVKREEQQARSSQTRIALIDPSGAIEQLIKSKPLDFELVPPPEYDAKQAIKDEKLEMLVTLEPNAAQDIVEHKTVAIDVLYNRVEKSGRVGMQRLEEAIQEMDKTIIQERLKKLGASAQLASPTEIQSRQVGGQEMMLAKQLGTMLPYMLMLMLFAGSMQLGIYVTAGERERGTLITLLATGLPRHEIVWGKLCYIFFMGIVNSAINIAAMAFSMGSMVGQISEAAAEAAAVNGAVAAPPLAGLAAVADPAVIVLTLLLMIPLGLTFSNLIIFVGIQAKNSQEAGTWMMPIFLPIIFLAIFSMMPGIEKMTFLTYVPILNVSLVIRKLFAQQASAFEYLIAFWMTVGLAALLTLLSTKFLNRESALFKNT

SEQ ID NO: 54061 - DNA, 420 bp, Unknown
  Obtained from environmental sample
  misc_feature (1)..(420): n is a, c, g, or t
gtgttgatgccaacaaaaaccaagacagcccagccagccaagacagcggccgaggactccaagacagcgaagaaggccacggaagccaaggacaccaaggctaccaagaaggccgaagcagccaaggacaccaagaaactcgaagcactcaaagtagagaaggccaccaaaggcgcaaagaaacctgaagcgcccaaggtggacaaggctatagagaaacacgaagcaccagaagcagccaaggacaccaagaaaacagaagcgtccgagccgcacgagccacaagtcaagcaacacgaagctcctaagattgccaagccagtcattgtggaatcgcccgacccccccaagattcctaagccgccccgggaggctggcgcactggaaaaaccagttgaaccgcgcnncatcgaganntga

SEQ ID NO: 54062 - protein, 139 aa, Unknown
  Obtained from environmental sample
  misc_feature (1)..(139): Xaa is any amino acid
MLMPTKTKTAQPAKTAAEDSKTAKKATEAKDTKATKKAEAAKDTKKLEALKVEKATKGAKKPEAPKVDKAIEKHEAPEAAKDTKKTEASEPHEPQVKQHEAPKIAKPVIVESPDPPKIPKPPREAGALEKPVEPRXIEX

SEQ ID NO: 54063 - DNA, 1770 bp, Unknown
  Obtained from environmental sample
  misc_feature (1)..(1770): n is a, c, g, or t
ttgtggtggcccaacggttggggggcacaaccgctctacagcgttgaagtggaactgagggacgcagcctcttcagcagcactagacacatggcagcggcgcattgggctcaggtcgatgaatatcagcaccgaagaagaccaatggggaagggagtttgcccttacggtaaatggcgtgaaggtctttgccatgggggccgactacattcctgaagattctgtttttcccaggataaataaagagcgtacaaggcgccttcttgaagactgcgtaaaagctaactacaacagcctcagaatttggggcggcggctattatcctgacgattatttttatgacgcttgcgacgagctggggctggtgatctggcaggacttcatgtttgcctgtaacgtttattgtttaaccgatgattttgccgccaatgtcgccgaagaagtacggcagaacatgatccgcattcgccaccatgccagccttggtctttggtgcggaaacaacgagatggaaacggcctgggttaactggcccacagtaacaaaccattccccggcccttagagctgattacatcaaactttttgagtcactaatcccggagatttggaaaaagacagacccccagacattttactggccttcttcgccgtcttcaggcgggggctttgacgcgcccaacgatcataaccgtggggatgtgcattactgggaagtctggcacgggctgaagcctttcagcgaatatagaaaatactttttccgttattgttctgaattcgggtttgaagccctgccggatttggaaacaatacagacttttgccaaaagcgaagacttaaatctcttttctcctgtaatggaatcccaccagcgtaatccgggcggaaacggaaaaattctctattacatttctgaactttaccgctacccgaaagatttgctttccctngtttacatctcccaggttttacagatggagagtatacagtcgggggtggatcactggaggcggaaccgcggccgctgcatgggcgctatttactggcaattaaacgactgctggcctgtgtgttcatgggcaagcatagattactttggccgctggaaggcgcttcactacggggcgcggcggttttatgccccccttcgcgttacgctgtttatcgacgaaaccgatgctgtgcctccgggatcgattgccgtcccgctcaagagaaccgtgcgggtttatgtacacaacgacacacttaaaccggcaaagggcaagataaagctgtaccttcgtgacatgaattttaaaactctggcggaagaagccattaacgcggagttaccgccattggcagcttcggaagtttttgttcgcgattacggcagcctgataaataccgttgagcttgagcgttcctgctttgtgacggcggagctttcagtaatttctgatgaatcgccaatttcaaaagaaaccgttttgtttgtaccgcccaagtatttttcttttaaaaagcctgaatacagtttcgacgtagttgaaaaaagtgattgctttgcaattaccgtaaaggcaaatacattttgccgttttgtccgcgtaaaaataccgggcgaagatccggttttttcggataactattttgacattaccggaagtcacggtacggaaataaaagctttcaaaaaggatttgaaaaatacctataccgcacagacattaaaagacttgcttaataatgcaggatcgagtatcggcgttaacgacagtttttaa

SEQ ID NO: 54064 - protein, 589 aa, Unknown
  Obtained from environmental sample
  misc_feature (1)..(589): Xaa is any amino acid
MWWPNGWGAQPLYSVEVELRDAASSAALDTWQRRIGLRSMNISTEEDQWGREFALTVNGVKVFAMGADYIPEDSVFPRINKERTRRLLEDCVKANYNSLRIWGGGYYPDDYFYDACDELGLVIWQDFMFACNVYCLTDDFAANVAEEVRQNMIRIRHHASLGLWCGNNEMETAWVNWPTVTNHSPALRADYIKLFESLIPEIWKKTDPQTFYWPSSPSSGGGFDAPNDHNRGDVHYWEVWHGLKPFSEYRKYFFRYCSEFGFEALPDLETIQTFAKSEDLNLFSPVMESHQRNPGGNGKILYYISELYRYPKDLLSLVYISQVLQMESIQSGVDHWRRNRGRCMGAIYWQLNDCWPVCSWASIDYFGRWKALHYGARRFYAPLRVTLFIDETDAVPPGSIAVPLKRTVRVYVHNDTLKPAKGKIKLYLRDMNFKTLAEEAINAELPPLAASEVFVRDYGSLINTVELERSCFVTAELSVISDESPISKETVLFVPPKYFSFKKPEYSFDVVEKSDCFAITVKANTFCRFVRVKIPGEDPVFSDNYFDITGSHGTEIKAFKKDLKNTYTAQTLKDLLNNAGSSIGVNDSF

SEQ ID NO: 54065 - DNA, 963 bp, Unknown
  Obtained from environmental sample
  misc_feature (1)..(963): n is a, c, g, or t
atggtctcagcaatacttttgatgattatatatctttcgttcattagtttgggtttaccggattcattgctgggatcggcatggccttcaatgtacggcggcttaaatgttccgctgcattgcgcnggatatgtttcaatgattattgcgggcgggactgtaatttcaagtattttcagcgaaagaattatcaggcggtttggaacgggtattgttacggctttcagcgttttaatgaccgccgctgcccttttgggattttctttttccggcgcttttgcgctattatgcttttgggcgattcctcttggattaggcgcaggctccgttgacgcggctttgaataattatgtagcgctgcactataaagcaaaacacatgagctggcttcattgtttctggggtgtcggcgcttctatcggaccgattatcatgtcgtattttttgataaataaaaattcatggaatttggggtatcgctcaattggattgtttcagtgttgtcttgtagtgatattatttataactatatcattatggggaaaaaataaatctcagacgaacattcaaaaaaatgaaacttctaaaggaataaaatttaaagaacttttttctattgccggagtaaaacaaattctaatcgcgtttttttgttattgcagtcttgaaactacaaccggattatggggaagcagttttttggttatggaaaaaaatgtatcccccgaaatagccgcgcaatggatttcgttttattatatcggtataacatcaggcagatttatttccggttttttgaccatgaagttaaataaccgccaaatggttcgtttggggcaggcttttgtcgcctgtggaattattacgttaatgctgccatttggcaaactgttattgttgccgggcttttttataatcggactggatgcgctcccatatatcccagcctctcggccgatctga

SEQ ID NO: 54066 - protein, 320 aa, Unknown
  Obtained from environmental sample
  SIGNAL (1)...(18)
  DOMAIN (10)...(319): Major Facilitator Superfamily
  misc_feature (1)..(320): Xaa is any amino acid
MVSAILLMIIYLSFISLGLPDSLLGSAWPSMYGGLNVPLHCAGYVSMIIAGGTVISSIFSERIIRRFGTGIVTAFSVLMTAAALLGFSFSGAFALLCFWAIPLGLGAGSVDAALNNYVALHYKAKHMSWLHCFWGVGASIGPIIMSYFLINKNSWNLGYRSIGLFQCCLVVILFITISLWGKNKSQTNIQKNETSKGIKFKELFSIAGVKQILIAFFCYCSLETTTGLWGSSFLVMEKNVSPEIAAQWISFYYIGITSGRFISGFLTMKLNNRQMVRLGQAFVACGIITLMLPFGKLLLLPGFFIIGLDALPYIPASRPI

SEQ ID NO: 54067 - DNA, 876 bp, Unknown
  Obtained from environmental sample
  misc_feature (1)..(876): n is a, c, g, or t
atgtcccttcggcgcgatgatggacaaagccagctggttgacgtgatcaagcatattatgaacaaaaagaacgtggtcgcgatgtacgcgcccgccatagctgcccagttccgggttgagcccggaaagcttgagggggctctgctcgcggcgggcttctcaaacgtgcttgaagtcgccctgggcgcggatattacggcggacaaggagaccgcggaatttattgagcgcatggaaaaaggcgaaaagatgatgaccacttcctgctgccccgcctttgtgcgggctgtccgccgccatgtaccggaacttgccgactgtatttcagacacccgcacccccatgagttacaccgcggaagtcgcaaaaaaagaatacccagactgtgtcaccgttttcatcggcccctgccttgccaaacggcgggaaggaatggacgacgagtttgtagattacgttatttccattgaagagttgggcgcgttgtttgtcgcgaaggagatcgatgtcgcgcaggcggccccgaagccggggaacaagctgccaacttcctcggggagaaatttcgccaaatccggcggcgtagcccaggctgttaaggcgcggctcgaagatccttcgatactgaaagaaacggtcattgacggccttgataaggcgggcatgaaactcctcgccgaattcggcaagataaacacaggcaaacttcccaaaactgaaagcacgcccaatcttatcgaagtaatgtcatgtcagggcggctgtatcgccgggccttcggtaattaccaatccgaaagtcgccctgacacagttggcaaaatacgcggaatccggagagccggtgaacaatagggacaataccggtaaaacctga

SEQ ID NO: 54068 - protein, 291 aa, Unknown
  Obtained from environmental sample
  DOMAIN (13)...(259): Iron only hydrogenase large subunit, C-terminal domain
  misc_feature (1)..(291): Xaa is any amino acid
MSLRRDDGQSQLVDVIKHIMNKKNVVAMYAPAIAAQFRVEPGKLEGALLAAGFSNVLEVALGADITADKETAEFIERMEKGEKMMTTSCCPAFVRAVRRHVPELADCISDTRTPMSYTAEVAKKEYPDCVTVFIGPCLAKRREGMDDEFVDYVISIEELGALFVAKEIDVAQAAPKPGNKLPTSSGRNFAKSGGVAQAVKARLEDPSILKETVIDGLDKAGMKLLAEFGKINTGKLPKTESTPNLIEVMSCQGGCIAGPSVITNPKVALTQLAKYAESGEPVNNRDNTGKT

SEQ ID NO: 54069 - DNA, 582 bp, Unknown
  Obtained from environmental sample
  misc_feature (1)..(582): n is a, c, g, or t
gtgaaaaatcttgacccccaggacaagataaacctccgaagcaggatacaggacaagcatcctggcttcaagtttattgacagcatggaaaaacgtacctcccaggggcttaccgttacaaggactaaattcgaggaaaaacaaagacagcttgtcaacatcatggacgttgaaattccggcgaattccaaagagattgaagcggcccggctgcacggcgaccttaaggaaaacgccgaatacattgccgccaaggaaaaacaggttctgctcaatactaccgcggaaaggctcaaggaagatattgaccgcgcccagttgtttgatccgggagccgttgattcttccaaagtctcattcggaacctgtgttatattacacaaccacagcaaagacagaaaagaggaatacaccattctcggtccctgggaatctgaccctgataacaatgtcatctcctatctggctccatttggaaaaacaatgatgggtaaaacccagggcgaacaattcaattttaccagcgacggcgagaagatttcgtatacggtggaaaatataaaagcggccgttataaattag

SEQ ID NO: 54070 - protein, 193 aa, Unknown
  Obtained from environmental sample
  DOMAIN (113)...(189): Prokaryotic transcription elongation factor, GreA/GreB, C-terminal domain
  misc_feature (1)..(193): Xaa is any amino acid
MKNLDPQDKINLRSRIQDKHPGFKFIDSMEKRTSQGLTVTRTKFEEKQRQLVNIMDVEIPANSKEIEAARLHGDLKENAEYIAAKEKQVLLNTTAERLKEDIDRAQLFDPGAVDSSKVSFGTCVILHNHSKDRKEEYTILGPWESDPDNNVISYLAPFGKTMMGKTQGEQFNFTSDGEKISYTVENIKAAVIN

SEQ ID NO: 54071 - DNA, 2133 bp, Unknown
  Obtained from environmental sample
  misc_feature (1)..(2133): n is a, c, g, or t
ttgaccctggttaaaaacgtaagggaaatgctgaatgaagaaaaatggaccagggccgccctgagtaattattcaaccggccagttcaaggaattggattctttgttgaaggaagcgagggaactgcgggtggttgatgaaatgaaaaaagactgcgatgagcatcttgcccattccaagaacagcattatcgccctgtacctttccggcatgatcgccctgtcgcgccagataattgacgacgccgccatgattaaccttgtgacgatcttcgcggataaccacaaatgggcgatcgtaaaatacctttgcgagcggatccttgaccacggcgaatccaaatacgcgctgcgttcccttatcgagtgctgcaagaatgaaaacaacgaagacgccctctacgggatatgggagcgccttgtaaaagtggactacgaggaagcggagctggcaaagtccctcgcggagcattatgaaaaactgggaaacgacgaagcggctgttgactactataaaaaagccctgcaccgctttatcaacaaatcgctttttgccaatgtaaaggaaatatgggaaaaacttcttgtctattgcccggacgacatcgactttttcttccatgtgcagaagaaggtcgccaaaactatcagcgaggagagggccgtcgacctgttaaaactcgtgtacgcctcctgcaaggatcgcgatgttgacacctccatagccatactaaaacttgtcctgcagtacgatgaaaaggattaccccgcccgcaaggaaatcgttgaatgttataaaaagaaatttgcgggccacagccaccttgatgattatatccgcatttcaaaccttacccagagttaccgcaacgtccatgaggccatcaccgattttgaaaagcatatcgcttttgacaagggaaactacgtattccaccgcacatggggcgtcggcagaatcgcgggcatagaaggcgacgacatcaaaataaacttttccaaaaaagccaaccatacaatgtcgctgaaaatggcggtcagcgccctgcagattctgtccaaagagcatatttgggtaatcagggcgacatggagcaaggaaaaactccaggaaaaagtcaaagcggatatcccctgggcgctgaagaccattattaaaagctcgggaaattcctgcgatctgaaaaaaataaaggcggaactgtgccccggcgtgctgtccgaaaaagaatggtcgtcatggagcggcaaagcgagggatattctgaaatccgatccgaatttcggggtaagcccggacaatatcgacattttcaccgtccgcgagcgccccataagcatatcggaaaaactctacaatgaattcaaggccgaacggaatttctttgcccgcacggacattatacgcaattttatcagtcacaagaaagccgaaattgattcggactactttgcggaaatgctgctcttttttacttcttttttaaagaccgcgaatcaggggggcgaacaacagatagccgcgtatttgctggttaaggatattgccgcgaaattcccccatctgggcgtcagcattaatttcaattttgccgatgttttcaaaaacattaccaatgttgcggagctttacagcaacctgaaagacagccggttcagggaagaattcctgaagaatatacagatccatataccggactgggctgacatttttattcagatatttcccaaaaccatggacgcggcaatcattgacaaacttgaggaagaacacggcgaaaaactcaccacgctgaccattgactgttttgaaaatttcaaggaataccgcgaggcggtagtgtggcttttcaaaatgtactccaaagccaaggctgaagcaaaagcgaagtcaaagtccagggccaaacccgaagacgatgcctcgtctgctgccgtagcggcagcctcggctgccgacgcgactctttccaaagccaaagcggaggccaggataaaatggtacgaagccgccgggataagcgaggaacgccagcttattaccctgatccacatccttgatctgacctaccgggatattgaaaaccagcgggaaacccacggaggcccgcaagatcaacaaacaggtttataa

SEQ ID NO: 54072 - protein, 710 aa, Unknown
  Obtained from environmental sample
  misc_feature (1)..(710): Xaa is any amino acid
MTLVKNVREMLNEEKWTRAALSNYSTGQFKELDSLLKEARELRVVDEMKKDCDEHLAHSKNSIIALYLSGMIALSRQIIDDAAMINLVTIFADNHKWAIVKYLCERILDHGESKYALRSLIECCKNENNEDALYGIWERLVKVDYEEAELAKSLAEHYEKLGNDEAAVDYYKKALHRFINKSLFANVKEIWEKLLVYCPDDIDFFFHVQKKVAKTISEERAVDLLKLVYASCKDRDVDTSIAILKLVLQYDEKDYPARKEIVECYKKKFAGHSHLDDYIRISNLTQSYRNVHEAITDFEKHIAFDKGNYVFHRTWGVGRIAGIEGDDIKINFSKKANHTMSLKMAVSALQILSKEHIWVIRATWSKEKLQEKVKADIPWALKTIIKSSGNSCDLKKIKAELCPGVLSEKEWSSWSGKARDILKSDPNFGVSPDNIDIFTVRERPISISEKLYNEFKAERNFFARTDIIRNFISHKKAEIDSDYFAEMLLFFTSFLKTANQGGEQQIAAYLLVKDIAAKFPHLGVSINFNFADVFKNITNVAELYSNLKDSRFREEFLKNIQIHIPDWADIFIQIFPKTMDAAIIDKLEEEHGEKLTTLTIDCFENFKEYREAVVWLFKMYSKAKAEAKAKSKSRAKPEDDASSAAVAAASAADATLSKAKAEARIKWYEAAGISEERQLITLIHILDLTYRDIENQRETHGGPQDQQTGL

SEQ ID NO: 54073 - DNA, 1353 bp, Unknown
  Obtained from environmental sample
  misc_feature (1)..(1353): n is a, c, g, or t
ttggcgggctacataaaaggtgaaccgctggacattgagctgagggaaaactataccgattccggcgaaaagtttacgctcagagattaccaaaaggatgccgctcagatattttacgcatccggctcggaaatgggcggttcgggcgttatagtgctgccgtgcggttctggcaaaaccattataggaatggcggctatggctttggtgaaagctcacaccttgattttaaccccaagcgtaacagccgctcgccaatggataagggaaattctgcaaaagacaaatctgaaaaaagaacaggtaaaggaatattcaggcgatttaaaggaaattggcccagtaactattgcgacttaccaaatattaactcagcggaaaaggaaatccaaaaaacaagatgaagcgaatacagcagtgaacactacggttaacaccgcagcaaatacagcaacgaacccagcagttagttctccgagcaaacaattgagcgaagcgaaccgtttgcgaggagaagctaactgctgtgcagaatgcgaaagtaatgaactggaattagaggaattcaccaatttttctttgtttagcgcgcaaaaatggggcttgatgatttacgatgaggtgcatttattgcctgcccctgtgtttcgtttttccgcagatatgcaagccacaagacgccttgggttaaccgcaactttaatcagggaagaccacaaagagacggaggtgttttctcttataggtccaaaaaaatttgacataccctggcgaactttggaagctcagggctggattgcgcaggcaaaatgccacgaactcagagtgccgatggataccgagcttagaatggcttacgccgttgccccgcctcgcgaaaaaattgccatagctggctgcaactcagaaaaattcgctgtggtaaaaaaattattggaaaagcacaatgaagaaggcgataggattttgataatagggcaatacattgagcagttggaaaaccttgtaaaggaaatagacactcccttaataacaggcaaaacgcccaacaaagagcgcgatgtaatttacgagaaatttcgcaaaggcgagattagaattttaaccgtgagcaaagttgggaattttgccatagacctgccagacgcaagcgttttaattcagatttccggcacgttcggcagccgtcaagaagaggctcaaaggctgggcagaattttacgccccaaaaaagacggcaggcaggctctgttttactccattgtcacaaaagattcccgcgaacaggaatttgctatgaaccgccagctctttttggcggagcaaggctatgaatacgaaatccaattctga

SEQ ID NO: 54074 - protein, 450 aa, Unknown
  Obtained from environmental sample
  DOMAIN (28)...(242): DEAD/DEAH box helicase
  misc_feature (1)..(450): Xaa is any amino acid
MAGYIKGEPLDIELRENYTDSGEKFTLRDYQKDAAQIFYASGSEMGGSGVIVLPCGSGKTIIGMAAMALVKAHTLILTPSVTAARQWIREILQKTNLKKEQVKEYSGDLKEIGPVTIATYQILTQRKRKSKKQDEANTAVNTTVNTAANTATNPAVSSPSKQLSEANRLRGEANCCAECESNELELEEFTNFSLFSAQKWGLMIYDEVHLLPAPVFRFSADMQATRRLGLTATLIREDHKETEVFSLIGPKKFDIPWRTLEAQGWIAQAKCHELRVPMDTELRMAYAVAPPREKIAIAGCNSEKFAVVKKLLEKHNEEGDRILIIGQYIEQLENLVKEIDTPLITGKTPNKERDVIYEKFRKGEIRILTVSKVGNFAIDLPDASVLIQISGTFGSRQEEAQRLGRILRPKKDGRQALFYSIVTKDSREQEFAMNRQLFLAEQGYEYEIQF

SEQ ID NO: 54075 - DNA, 861 bp, Unknown
  Obtained from environmental sample
  misc_feature (1)..(861): n is a, c, g, or t
ttgaatgtacctacagaggcttgggggcagtggaataatcctgctggttttgtgaaattcgggcgatttaaacctgaaatttcccctacacctaactccataattctgggcggtgcacctcaccacgacgctattcattggaaattcaacgcaggtgttgctagatacgatttgctactcatctccctaaacgcatggctttccgaagatgaaagaaaagaacagcatgatattcaaattccaaatgcgagaaagagaatttacgaggagcctgcaaaaaatctgcttttgcacaaagttggcatagacgggggttttggctatttctccatcattgagcagagtttaataggtggaaaaaatttggagttcagagatttttccccgtttgtcgcttggcataataatttcagctatggctacagcaaaatgagcgtggctttggaagcggggcttaggcccataaaaaaatccgagttttattggcagttcgttatggaagacattcaaagccctgtaggcgaggtagaaggggataaaggctatacaacgcttgcttttttggcaggctacaagcaaaaaattccccttgggatttatggcgatattgagagcagaatagatgcggttcgcacagacccgcaattcaacaacaacaaggtgcctctgcaaaanatgacgagcagaaaagtttataacagcaatttcagggagcaaggcaaacctaattttgcagatatgtacatcgtggattacccgctcggctatcgcagagggccagatgccgttgaattatggtggaacataaaatacacccctgcaagcaaaaaattccacggcgaggctgaaacgcatatttaa

SEQ ID NO: 54076 - protein, 286 aa, Unknown
  Obtained from environmental sample
  misc_feature (1)..(286): Xaa is any amino acid
MNVPTEAWGQWNNPAGFVKFGRFKPEISPTPNSIILGGAPHHDAIHWKFNAGVARYDLLLISLNAWLSEDERKEQHDIQIPNARKRIYEEPAKNLLLHKVGIDGGFGYFSIIEQSLIGGKNLEFRDFSPFVAWHNNFSYGYSKMSVALEAGLRPIKKSEFYWQFVMEDIQSPVGEVEGDKGYTTLAFLAGYKQKIPLGIYGDIESRIDAVRTDPQFNNNKVPLQXMTSRKVYNSNFREQGKPNFADMYIVDYPLGYRRGPDAVELWWNIKYTPASKKFHGEAETHI

SEQ ID NO: 54077 - DNA, 426 bp, Unknown
  Obtained from environmental sample
  misc_feature (1)..(426): n is a, c, g, or t
ttgatatttccgcactgggacggaaatttgataaaggaaattgtccgccagactcttgcgagtttggttcagccttccagtgaagcaatgggcgacaggatttttaccgtagagattcttaacggaacaaccgttaatggccttgccgggcgtactgctgaacttttcgggggctttggctatgatgtcatttccataggaaacgctgatcgtaatgattacgaaaacacggtaataataaacagaacaggtttacaagatatggtattggcttttggagaagtgatacgttgcagcaatgttcgttccgattcaccgactgcggacgatgatgaaattgatcttaacattcaaaatttaaattatcaggctgacattacccttataatcgggaaggacttcaatgggcgatacgttacaaattaa

SEQ ID NO: 54078 - protein, 141 aa, Unknown
  Obtained from environmental sample
  misc_feature (1)..(141): Xaa is any amino acid
MIFPHWDGNLIKEIVRQTLASLVQPSSEAMGDRIFTVEILNGTTVNGLAGRTAELFGGFGYDVISIGNADRNDYENTVIINRTGLQDMVLAFGEVIRCSNVRSDSPTADDDEIDLNIQNLNYQADITLIIGKDFNGRYVTN

SEQ ID NO: 54079 - DNA, 750 bp, Unknown
  Obtained from environmental sample
  misc_feature (1)..(750): n is a, c, g, or t
atgaggaaaacaaaaattgacgccagcgcttttcttctgatactcattgttttgcttctcgtgggcggtgttgtttttgcggcgtcatatctccgctcggatccaataatggaatctctggaagaagacaaggtgatcaatatcctttttgtcatcgaaaacagggagaaaccgctgtgttcctatgtgcttatgtattatccggccacaaagcgggcggcaatttttgacattcccggctctttgggcctgataattcagcgtattaaccgcgtagaccggattgacaggttatatgatccccgcagaatcacgccttatgcggacgaggtagaaaaacttttggggattgatattcccttttccatagttattacccttgaaaatctgggcaagataacagatctgattgaaggggtagaactttttattcctttggcggtggatgaatttcatgatgaatacattatgtttccttccggaataagctgtctggacggagataaagccagagtttacatcacctacgaactgcctgaggaaagcagtgaaatggcggtatatcgcaggcagcgcttttttgtgggtttaatcaagcgtttgggagaacaaaacggcctttttaaaaacccccaggtcgccggagttttcattcacttcttaaaacaggaatcaaggcgcgggcgcaaaacgcgctttttgggaaacttgccgggattgatactgacaggatcaatattcaatctgtaa

SEQ ID NO: 54080 - protein, 249 aa, Unknown
  Obtained from environmental sample
  SIGNAL (1)...(27)
  misc_feature (1)..(249): Xaa is any amino acid
MRKTKIDASAFLLILIVLLLVGGVVFAASYLRSDPIMESLEEDKVINILFVIENREKPLCSYVLMYYPATKRAAIFDIPGSLGLIIQRINRVDRIDRLYDPRRITPYADEVEKLLGIDIPFSIVITLENLGKITDLIEGVELFIPLAVDEFHDEYIMFPSGISCLDGDKARVYITYELPEESSEMAVYRRQRFFVGLIKRLGEQNGLFKNPQVAGVFIHFLKQESRRGRKTRFLGNLPGLILTGSIFNL

SEQ ID NO: 54081 - DNA, 1215 bp, Unknown
  Obtained from environmental sample
  misc_feature (1)..(1215): n is a, c, g, or t
gtgaagtatgcgattcttgggggcagctttaatcccgtacacatcggccatctttttctggctgatgctgcgcttgcaaagtttggttacgaccgaatcatccttattccggcttttcaatctcccctgaaagacagcccgcagggctcttcacccaaagaccgcctggatatgctctctgcttcaatcgcgggcgatcccaggctgactattgacgactgcgagcttaaccgcgaaggcatttcttacacaattgataccataaaggaaataatttcccgttacgaaatcgaagggaagccaggcttaattattggggatgatcttgtttcatcttttaaaaactggaaagatccggaggaaatagccaagcttaccgacattattattgccggaaggcttggttccggggcagatatagccgcctttccttatccacataaaactctggacaatgtgctgatgaatgtggcgtcggtacagatacggcaaaaaataaactctggtggagcatggcgttatcttgttccacccggcaccaggtgtattattgaggacaggtctctttacggatttatggggagtgaaggcgaaggaaaagcggcagaggctttgaaaaaccttatagaaaacggcatcaattcggaaaccattgttaatattgagaatgacgctcgtacctgccttgaccctgagagatttaaacacagtagaaatactgccctgctgtcatgggatctctgccgccgtttcggatttgatcctcaaaagggatatttggcggggatagcccatgacatctgcaaggatctggaagaaagcgagcttgtgcgcctggcccgacaggatagcggcggcatttcaaagctggaacaaaaaaaaaccggcctgcttcacgcgcgggcggcggcagtttatgttaacaaaaaatacggtgtaagggacaaagacatccttgaggcaatcaggtatcataccaccggaattcgcgaaatgggacccattgccaaggtcgtttatatagcggacaagattgaaatgtccagaaccgcagtggatcccattttgaggaagatgagccaggaaagcgatctggatactctttttacggaagtcttaagcgatgccgtgaactatctgaaatcccgccatgtggatatttcctatggtacaagaaggctgctggcggcaatgcgtaaaaaaaacaagccatga

SEQ ID NO: 54082 - protein, 404 aa, Unknown
  Obtained from environmental sample
  DOMAIN (233)...(348): HD domain
  misc_feature (1)..(404): Xaa is any amino acid
MKYAILGGSFNPVHIGHLFLADAALAKFGYDRIILIPAFQSPLKDSPQGSSPKDRLDMLSASIAGDPRLTIDDCELNREGISYTIDTIKEIISRYEIEGKPGLIIGDDLVSSFKNWKDPEEIAKLTDIIIAGRLGSGADIAAFPYPHKTLDNVLMNVASVQIRQKINSGGAWRYLVPPGTRCIIEDRSLYGFMGSEGEGKAAEALKNLIENGINSETIVNIENDARTCLDPERFKHSRNTALLSWDLCRRFGFDPQKGYLAGIAHDICKDLEESELVRLARQDSGGISKLEQKKTGLLHARAAAVYVNKKYGVRDKDILEAIRYHTTGIREMGPIAKVVYIADKIEMSRTAVDPILRKMSQESDLDTLFTEVLSDAVNYLKSRHVDISYGTRRLLAAMRKKNKP

SEQ ID NO: 54083 - DNA, 453 bp, Unknown
  Obtained from environmental sample
  misc_feature (1)..(453): n is a, c, g, or t
gtgattccggttgtcgtgggttcaaatcccatcattcacctacttttatttactatatttctatctagtatgggtaacggttattggattctcttgatttttttgtttctaggcgcatttatagccgctgctgccatattggttggcaaaatactgggtttcccctcaaaagagggaaaagccaagttcaaggcttatgaatgcgggatggaaacttttggcaatgctagggtgcaatttaaggttggctatgtggtatttgcccttatattcctagtgtttgacgtggaggctctgttcctttttcctatagcggttcattggcgaggcgttgtggacggaacgcttggcattccagtttggctcgcattcgtggacttaggcatattttttggtgttttggtaataggcctcgcgtattcatggaaaaagggttggctcaagtgggaataa

SEQ ID NO: 54084 - protein, 150 aa, Unknown
  Obtained from environmental sample
  DOMAIN (40)...(149): NADH-ubiquinone/plastoquinone oxidoreductase, chain 3
  misc_feature (1)..(150): Xaa is any amino acid
MIPVVVGSNPIIHLLLFTIFLSSMGNGYWILLIFLFLGAFIAAAAILVGKILGFPSKEGKAKFKAYECGMETFGNARVQFKVGYVVFALIFLVFDVEALFLFPIAVHWRGVVDGTLGIPVWLAFVDLGIFFGVLVIGLAYSWKKGWLKWE

SEQ ID NO: 54085 - DNA, 618 bp, Unknown
  Obtained from environmental sample
  misc_feature (1)..(618): n is a, c, g, or t
ttgcgtaaaggcaaatcccccgcagaggtattaaaagccaacagcggaacctatgtagattctcgcgatagcagaaaatacaagaccatcaaaataggcaaccaaacttggatggcggagaatttgaattacaatgcaaatggctcaaaatgcagctcttcagcaggttgcgacaaatacggacgtctttacgattggaaggccgcgatgacttcctgcccaagtgattggcacttgcccaccgatttggaatgggatgttttgatggcaaccgtaggcggtgctgccaccgctggcgaaagattaaaagcaaaggaagggtggaatggcggcggcaatggcgatgacgacttcggttttaaggcattgccgggcggtagcagtgtctcaagttacggaggctctggcaacttcggcaatttttggagtgccaccgaaagcaaagacaacaccaaagccaactatcggcatattcttaacacaggcaaaaatgtggttagcaaagatgacccaaaaacgcacttattctccgtccgttgcctccaaggagaaccgggagcagatgcaaaggcgaagatatcaaaaatagaagcggaagcaaaagggcagtcaaagtaa

SEQ ID NO: 54086 - protein, 205 aa, Unknown
  Obtained from environmental sample
  misc_feature (1)..(205): Xaa is any amino acid
MRKGKSPAEVLKANSGTYVDSRDSRKYKTIKIGNQTWMAENLNYNANGSKCSSSAGCDKYGRLYDWKAAMTSCPSDWHLPTDLEWDVLMATVGGAATAGERLKAKEGWNGGGNGDDDFGFKALPGGSSVSSYGGSGNFGNFWSATESKDNTKANYRHILNTGKNVVSKDDPKTHLFSVRCLQGEPGADAKAKISKIEAEAKGQSK

SEQ ID NO: 54087 - DNA, 3321 bp, Unknown
  Obtained from environmental sample
  misc_feature (1)..(3321): n is a, c, g, or t
atgtatataaagaactgttataacacgggcaatattaccgccaacgaagcaatcgaaagctccatggcaggaggcattgccgggcttaaccaatcaggcgcaacggtagaatactgctacaataccggcaatgttaccgctttaactaacaacgttggcggcatagtgggaagcaactccggaagcaccgtgcgatactgcgtatcactcggcgcaagggtaaccggcggaaataatacctgccgtgtagtgggaattatgtcgggaacaacaactctcaccaacaacaaagcccgcgcggatatgaaagtcggcgcaagcggatcggaagcattaccaactataaatataggagcaaatgaaagagaaggcgagagtgtcagtttgggtgcggcacagaattctgttttcagcagtttctttactaccacaatttggactttaggcagtactttgacagtaggcggcaatttgcccatactccagatgaacacgcaaagccccgctcccacgcttccggcggcgtactccgcgcccggcacggcggaaaatcccttcctcgttaccaacgaaaccgatctccgcaaagtcggcaaagaaaccacagccggaggctggacgcttacggcgtactacaaacagacggcgaacatcacgctgacaacaggcagttttacgccgattggcacaaacagcaccaactcattcacaggctcgtatgacggggacggaaaaaccattaccggattgagcatgaccggcactgccaataatctgggattattcggctatatcggtgcaggcggcacggtgaaaaacgtgaacgcttccggcacaataacccaaaacggaaccacaaatgccggaggcattgcgggcgcaaacgcaggcacgattgacaactgttcctttagcggaaccatcagcggcggcgcaagctccaatcagttcggcggtattaccggatataatctcgacacgataaaaaacagcagaagcagcgcaacaataagcggcaataattatgtcgggggcattgccggagtgaataacggcactatcgacaacagttacaacaccggagccgtcagcggaaaccagtcagtcggcggtatcgccggatcaaataccggaagcggtaattacataaagaactgctataacacgggcaatattaccgccagcgcaacctcaaacacctatgccggaggcattgtcggggctaatcaatcaaacgcactgatagaatactgctacaatatcggcaacgtttccggtccggctagtgtcggcggcatagcgggaaccaacgacactggatgcaccgtgcaaaactgcgtatcgatcggcgcaagaataaccggaacaggcacttccagtataggtatcagtcgtgtgtcaggaacttatggaagcggaagcactctcatcaacaacaaagcccgcgcggatatgaaagtcggtttaagcggcgcagaggcaacagcaacaggcgcgtcaaataacggaaacggcgcagatattactgtaggcagtactacgacacatacctctgttttcagcgggtgggatattggcggctggaatacatctacgatttggactctaaatgccactttacttttaagcggtagcgatttacccacgttcaaatcgcctaatcagcaaagccccgctcccacgcttccggcggcgtactctccgctcggctcggcggaaaatcccttcctcgttgccaatgaagccgatctccgcagggtcggcagaccaaccgccacagacggctggccgcttacggcgcactacagacagacggcggacatcaatatgacaggcggctactttatgccgattggcaatatcactgacagattcttcggatcgtatgacggagacggatataccatcaccggcttttcccaagttacctcaagcagtaatgtcggttttttcggatatatcggctcaggcggcacgttgaaaaacatgaacgtaaccggcacggtaactaataacggaaccaacacttcgtttaccggcggcattgccggatataatatcggtacgattgacaattgttcatttagcggaaccataaatgtcggcacaaccaacgatcaagtcggcggcattgtcggacagaataacggcacggtgataaacagcagaagcaacgcaacgataagcggcagaacttctatcggtggcattgccggagtgaataacggcacgattgaaaacagttacaacacgggaaacattaccggcacaaaccaagtcggcggtatcgccggagctaattccggcactggcagttttataaagataaggaacagttataacacgggcgatattaccgccactactacctccaccgccaatgccggaggcattatcgggatgaaccaatcaagctcaacagtagaatactgctacaattcaggcaacgtatccagcgcaggcacaaatattggcggtatagcaggacaaaatcaaagcggaagcaccgtcaaagactgcgtatcgctcggcgcaagggtaaccggtactggtgatgtcggtcgcatagccggaagcagtaacggcacactcggcaacaactacgcccgttcagatataaaaatcggcgcaagcggcgcagaagcggcagtatcacccgcaggagctaacacccctaacggcggaactgtcaatttgagtacggcacttaccgtcgttttcagcggctggaataccgcactttggaatatcagcggcaatttgactataggcggcgcattgcccacactcaaaacaaacacgcaaagcccagctcccacggttccggaggcgtacaatccgcccgctaacggcacggcaagcagtcccttcctcgttgccaccgaagccgatctccgcaaagtcggcacaggcaacgacggctggtcgctctcggcgcattacaaacagacagcgaacatcacgctgtcaaacaactttacgaggattggcaatagctccaccaaatttaccggaacgtatgacggtgacgggaaaaacattacaggcttgaatatgagcacttcatctccctctttctttctggggctttttggctatatcggcgcaggcggcacggtaaaaaacgtgaatgttatcaacggcacggtaactaataacggaaacgagagtaccggcggcattgctggtgcaaacgaaggcacgattgacaacagctcctttagcggaaccgtcagcggatcagcctgcgatcaggtagacggacttgtcggatataattacctcggcacggaacataaaagcagaagcagcgcaacgtaa

SEQ ID NO: 54088 - protein, 1106 aa, Unknown
  Obtained from environmental sample
  DOMAIN (313)...(338): The GLUG motif
  misc_feature (1)..(1106): Xaa is any amino acid
MYIKNCYNTGNITANEAIESSMAGGIAGLNQSGATVEYCYNTGNVTALTNNVGGIVGSNSGSTVRYCVSLGARVTGGNNTCRVVGIMSGTTTLTNNKARADMKVGASGSEALPTINIGANEREGESVSLGAAQNSVFSSFFTTTIWTLGSTLTVGGNLPILQMNTQSPAPTLPAAYSAPGTAENPFLVTNETDLRKVGKETTAGGWTLTAYYKQTANITLTTGSFTPIGTNSTNSFTGSYDGDGKTITGLSMTGTANNLGLFGYIGAGGTVKNVNASGTITQNGTTNAGGIAGANAGTIDNCSFSGTISGGASSNQFGGITGYNLDTIKNSRSSATISGNNYVGGIAGVNNGTIDNSYNTGAVSGNQSVGGIAGSNTGSGNYIKNCYNTGNITASATSNTYAGGIVGANQSNALIEYCYNIGNVSGPASVGGIAGTNDTGCTVQNCVSIGARITGTGTSSIGISRVSGTYGSGSTLINNKARADMKVGLSGAEATATGASNNGNGADITVGSTTTHTSVFSGWDIGGWNTSTIWTLNATLLLSGSDLPTFKSPNQQSPAPTLPAAYSPLGSAENPFLVANEADLRRVGRPTATDGWPLTAHYRQTADINMTGGYFMPIGNITDRFFGSYDGDGYTITGFSQVTSSSNVGFFGYIGSGGTLKNMNVTGTVTNNGTNTSFTGGIAGYNIGTIDNCSFSGTINVGTTNDQVGGIVGQNNGTVINSRSNATISGRTSIGGIAGVNNGTIENSYNTGNITGTNQVGGIAGANSGTGSFIKIRNSYNTGDITATTTSTANAGGIIGMNQSSSTVEYCYNSGNVSSAGTNIGGIAGQNQSGSTVKDCVSLGARVTGTGDVGRIAGSSNGTLGNNYARSDIKIGASGAEAAVSPAGANTPNGGTVNLSTALTVVFSGWNTALWNISGNLTIGGALPTLKTNTQSPAPTVPEAYNPPANGTASSPFLVATEADLRKVGTGNDGWSLSAHYKQTANITLSNNFTRIGNSSTKFTGTYDGDGKNITGLNMSTSSPSFFLGLFGYIGAGGTVKNVNVINGTVTNNGNESTGGIAGANEGTIDNSSFSGTVSGSACDQVDGLVGYNYLGTEHKSRSSAT

SEQ ID NO: 54089 - DNA, 1092 bp, Unknown
  Obtained from environmental sample
  misc_feature (1)..(1092): n is a, c, g, or t
atgactcttacttttatgatagaggagggaaacagatatacctttgacggggtaacatttgaaggcaatataattttttccacagcgcaccttgaaaaacttatttattcaagagaaggcgaagtaataaatttttcaaaaataatggcggatttacagcgggtttccgacctttattatgaaaacgggtatatttttaacactatagagcggacaacgcaaaaagacgatcaatcaaacactgtttcctacaaggtttttattgttgagcgcggacgcgcctacatagaagacataataatcgtgggaaacgaaaaaacaaagaccgatgtaattctccgtgaaattccccttgagcccggagatgttttttccaagacaaaagtaatggacgccatgagaaacctgtataacctgcaatttttttctacggttatgccggatacgcagatgggaagcgcggaaaacctgatggttttggtattcaatgttgaagaacagccgacgactgatgttcaattcggtcttactttttccggaagctcggatccggaaagtttccccgtatcaggaatgattaaattgaatgacagaaaccttgcaggcacgggaaaccaaataggagtggaaataaactcatcggtagtggatacgacgaccgtatcattgaattacctgcaccgctggattttcggactgccgctttccggcggcgtggatttaacggccgatttttccaaacgtttcgccaccatgaataatacgcctccgttttttaacggcgatgaaacaaattacgcttttccggatggttttcagtcatgggaagaatatgtcgctcatgacaagctgcccccaaaggattacctaatggaattcaaacaatggtatatttctcttgggttcagcacaggttaccgctggaacacgtttatgggtattttcagcttaaacggaggaacccgttttggtatagtcagaaataattatgataataccttatacaggccgtttgatccggctcttagggacggaaatacgaatggatgccgaagattctttctggtttgcatcttctctggaacagcgtga

SEQ ID NO: 54090 - protein, 363 aa, Unknown
  Obtained from environmental sample
  DOMAIN (13)...(91): Surface antigen variable number repeat
  misc_feature (1)..(363): Xaa is any amino acid
MTLTFMIEEGNRYTFDGVTFEGNIIFSTAHLEKLIYSREGEVINFSKIMADLQRVSDLYYENGYIFNTIERTTQKDDQSNTVSYKVFIVERGRAYIEDIIIVGNEKTKTDVILREIPLEPGDVFSKTKVMDAMRNLYNLQFFSTVMPDTQMGSAENLMVLVFNVEEQPTTDVQFGLTFSGSSDPESFPVSGMIKLNDRNLAGTGNQIGVEINSSVVDTTTVSLNYLHRWIFGLPLSGGVDLTADFSKRFATMNNTPPFFNGDETNYAFPDGFQSWEEYVAHDKLPPKDYLMEFKQWYISLGFSTGYRWNTFMGIFSLNGGTRFGIVRNNYDNTLYRPFDPALRDGNTNGCRRFFLVCIFSGTA

SEQ ID NO: 54091 - DNA, 369 bp, Unknown
  Obtained from environmental sample
  misc_feature (1)..(369): n is a, c, g, or t
gtggacgcggcggcggcggacatcgcggcccactatgagagcggcgactttaagcttgtggtggagaggatacagtcgctgggtagcgtgggaaacaagtactttcaggattgcaagccgtgggaggcgattaagaagggcgataaagacggggcggcggaggttattgtcacttgcgtcaatttgataaaggcgcttatagtctttctgaagcctatcacgccgaagatgtgcgcggtgtttgagaggcagataggggcggagctgtggtgggaggactacaagtttaatttgaaagggaaaaagatcgggagcggggataagctggcgttgccgcttgaggtggggcatatgagcgagttgttttaa

SEQ ID NO: 54092 - protein, 122 aa, Unknown
  Obtained from environmental sample
  misc_feature (1)..(122): Xaa is any amino acid
MDAAAADIAAHYESGDFKLVVERIQSLGSVGNKYFQDCKPWEAIKKGDKDGAAEVIVTCVNLIKALIVFLKPITPKMCAVFERQIGAELWWEDYKFNLKGKKIGSGDKLALPLEVGHMSELF

SEQ ID NO: 54093 - DNA, 1428 bp, Unknown
  Obtained from environmental sample
  misc_feature (1)..(1428): n is a, c, g, or t
gtgaagtgggaaacagtaatcggtcttgaaattcacaccgagctttcgacaaaatcaaaaattttctgcggatgtacaaccgcttacggcggagaaccgaacacccacgtctgccctgtttgttcaggaatgccgggcactctgcctgtgctgaaccgagccgtacctgaatacgcgatgaggctcgggcttactcttaactgcgaaattacaaggctcagcaagttcgacagaaaaaattatttttaccccgatcttccaaacgcttatcaaatatcccagctttacgccccgatatgcagaaacggttatcttgaaattgaggttgatggaaagaaaaaaaaaatcggcattcacgagatacacatggaacaggacgcggggaaacttgtccacgatccgaagggaaacaattctttcatggattttaacaggtgcagtgttccgcttttggaaattgtatccgagcccgatttacgaagcgcagccgaggtaatcgcctaccttgaaaaaatgcgcgagacacttttgtaccttgacataagcgactgtaaaatgcaggaaggctcgattcgcgccgatgtcaatttgtccattcgtccatttggaggagagcttggcacacgcaccgagacaaagaacatgaactcgtttaaggcgatagcgcgcgctattgaatatgaaactgaacgccagattgaaatacttgaggacggcggaaaaattgttcaggagacccgacgctgggacgatgaaaaaggcatttcctacggaatgcgctccaaagaaaacgcgcaggactaccgctactttccagagcctgatctttgccaaatggagattgacgacgcctggctgcaaagcatcaaggcaaagctgccggaactggcgtatcaaaaaagagaacgctactgccgcgactttaagatacccgaatccgaggccgttgttcttaccgttcacaaaaatatctgtgaaatattcgagacactagcccggaaaagcggccaggcagttgaggcggcgcatctcttaacaggcgaaatcatgcggctgatgaacaatgccaatattttgcctgaggatttatcgcttaacgccgataaattttcaacgctcattacccttgttacgggcgggaaaatcaaccggggcgcgtataaagaaaccgttgaggcggtattcacgcgcgacgttgatccggaaagctacatcgccgaaaaaggcctgatgatgatcaacgatgacaacgccgttatcgaagctgtacgcgcggttataacagaaaaccaggactcggtcgcggattaccgcgccggaaaggaaaaagtgttcgggtttttaatgggacaggttatgaaaaaactgggcgggaaggggaatccggacatggcaaagaagatattaacatatatgcttactatgtaa

SEQ ID NO: 54094 - protein, 475 aa, Unknown
  Obtained from environmental sample
  DOMAIN (256)...(324): PET112 family, C terminal region
  misc_feature (1)..(475): Xaa is any amino acid
MKWETVIGLEIHTELSTKSKIFCGCTTAYGGEPNTHVCPVCSGMPGTLPVLNRAVPEYAMRLGLTLNCEITRLSKFDRKNYFYPDLPNAYQISQLYAPICRNGYLEIEVDGKKKKIGIHEIHMEQDAGKLVHDPKGNNSFMDFNRCSVPLLEIVSEPDLRSAAEVIAYLEKMRETLLYLDISDCKMQEGSIRADVNLSIRPFGGELGTRTETKNMNSFKAIARAIEYETERQIEILEDGGKIVQETRRWDDEKGISYGMRSKENAQDYRYFPEPDLCQMEIDDAWLQSIKAKLPELAYQKRERYCRDFKIPESEAVVLTVHKNICEIFETLARKSGQAVEAAHLLTGEIMRLMNNANILPEDLSLNADKFSTLITLVTGGKINRGAYKETVEAVFTRDVDPESYIAEKGLMMINDDNAVIEAVRAVITENQDSVADYRAGKEKVFGFLMGQVMKKLGGKGNPDMAKKILTYMLTM

SEQ ID NO: 54095 - DNA, 1308 bp, Unknown
  Obtained from environmental sample
  misc_feature (1)..(1308): n is a, c, g, or t
ttggccgagagttcatcgcagatcgataagggcgaggcgctttccccgctcgcgggcgtgccaatagcgattaaagataatatttctaccacgggaatcgaaaccacctgcgcgtcaaaaatgctaaaagggtacacgcccgtgttcaatgcggcggttatcgaaaagctggaaaaagccggcatggttgtcatcgggaaagccaacatggacgagtacgcgatgggcggctccagcgagaccggggctcttggcccggtgcataacccctgggaccttgcgcgggtcgcgggcggttcgtcgggtggcagcgccgccgccgtcatcgcgggggaggcgcctatagcgctcggttcagacaccgggggcagtatacgccagccctgcgccttctgcggcgttacaggcgtcaagccgacctacggttccgtgtcgcgctacgggcttgtcgcttatgcgtcatccctcgatcagatcgggcccatcgggcaaaacattgacgactgcgccgcattgctttcgatcatttcagggcccgatgcaagggacagcacctgcgttatagaaaagccttttgaattcggcgaagcaaaaacaaaacttgaaggcgttaagatagggcttccccgcaattactatggaagcggtattgacgacgaagtgaaaaacgcagtctttgccgttgtcaaagagcttgaggcggcgggagcaattatagaagaatttgaaatgcccctgatggattacatgatcccaacttattacataatcgccgccgccgaagtgtcgtctaacctttcaaaatacgacggtcttaaatacggctaccgcagcccgaacgcgaaaacgctctccgaagtttaccgtctttccagaagcgaagggttcggaatggaagcgaaaagaagaatcatgctcggctcgttcgtgctctcctcgggatactacgacgcctactataaaaaagccctgcaagcccgcgcgcttcttaaagattcttacagtaaattgttcgggcgctttgacataatactctcccccacagcgccaaccacggcatacaagttaggcgacaatatcggagaccctgtaaaaatgtacatgggagacatctacacggtttcgatcaatcttgcgggactccccgccgccgccctgccctgcggctttgacaaacagggcttgccaatcggcttccagttaatcggagacgctttttcagaaaacaagataataaacgcggctcgtgtttttcaaaaccttactgattatcataaaaagaaaccttctataaacggaggcgcatag

SEQ ID NO: 54096 - protein, 435 aa, Unknown
  Obtained from environmental sample
  DOMAIN (2)...(412): Amidase
  misc_feature (1)..(435): Xaa is any amino acid
MAESSSQIDKGEALSPLAGVPIAIKDNISTTGIETTCASKMLKGYTPVFNAAVIEKLEKAGMVVIGKANMDEYAMGGSSETGALGPVHNPWDLARVAGGSSGGSAAAVIAGEAPIALGSDTGGSIRQPCAFCGVTGVKPTYGSVSRYGLVAYASSLDQIGPIGQNIDDCAALLSIISGPDARDSTCVIEKPFEFGEAKTKLEGVKIGLPRNYYGSGIDDEVKNAVFAVVKELEAAGAIIEEFEMPLMDYMIPTYYIIAAAEVSSNLSKYDGLKYGYRSPNAKTLSEVYRLSRSEGFGMEAKRRIMLGSFVLSSGYYDAYYKKALQARALLKDSYSKLFGRFDIILSPTAPTTAYKLGDNIGDPVKMYMGDIYTVSINLAGLPAAALPCGFDKQGLPIGFQLIGDAFSENKIINAARVFQNLTDYHKKKPSINGGA

SEQ ID NO: 54097 - DNA, 1176 bp, Unknown
  Obtained from environmental sample
  misc_feature (1)..(1176): n is a, c, g, or t
ttgactattacctgcgtccgtgaaagcgggaacatgaaggtgacaatcgccgatgacggaaaaggcatcaatttggagggaatccgtaaaaaaattgttgaaaaaggtttggccgctccggaagccgccgctgcccttggcgatgaagaacttataaattttattttccagagcggattttcaaccaaacaggaggtttccaatgtttccggacgcggagtcggaatggacgctgtcagaaacaacatcgaacgcatgaagggcagtatcgccatacaaaccaaaaccggggaaggaacgacatttactatttccgttccattgtctctggccgcccttatgggattccccatttcctcaggcagcatgaaatttattatccccgccaactttgtggatacggtcatgcttatcaacacaaaagacatcatcaccgtggtagatcgtccgggcattaaatacaacggacgcatcatcaaacttttctatctgcaccatgtcttaaaaatccccatacccatagaagaaaaaaagaactcgggcgattcgatctttgtggctatagtccaggcttatgaggaaacagtagccatcgcggtaaaccaggtaagcagcatgaggcaggtaatacttaaaaacctgccctctttcatggaaaagatggaagttttctccggcgtagtgctaagcgaggactatgaaatgataccggctcttcacattcctacggtgatcagaatggcgcggcgcacaaaaaccattgacatgaaaaaacgccatgttgattacgagcgtatgcgtaaatctattctggtagtggacgattcccttccgacgcggaatatagagcgtgatattctggaagccgaaggctacaaagttgacatcgccgcggacggttccgaagcgctggcagcggcaaaaaacaaccaatacgatttgatctgcaccgatattgtaatgccgaatatggacggatttatgctagcggaaaacatccgcaaaaacgaccggttaaaaaatatccccattgtcgccatttcatccaaaagcgacgagaaagatcaaaacagggccgcgcttcttggtattaaccgctttatcgccaagaattcgtttaatgtccacaatttaacggccattgtgcgggaattaatcggagaagccaatggataa

SEQ ID NO: 54098 - protein, 391 aa, Unknown
  Obtained from environmental sample
  DOMAIN (112)...(249): CheW-like domain
  misc_feature (1)..(391): Xaa is any amino acid
MTITCVRESGNMKVTIADDGKGINLEGIRKKIVEKGLAAPEAAAALGDEELINFIFQSGFSTKQEVSNVSGRGVGMDAVRNNIERMKGSIAIQTKTGEGTTFTISVPLSLAALMGFPISSGSMKFIIPANFVDTVMLINTKDIITVVDRPGIKYNGRIIKLFYLHHVLKIPIPIEEKKNSGDSIFVAIVQAYEETVAIAVNQVSSMRQVILKNLPSFMEKMEVFSGVVLSEDYEMIPALHIPTVIRMARRTKTIDMKKRHVDYERMRKSILVVDDSLPTRNIERDILEAEGYKVDIAADGSEALAAAKNNQYDLICTDIVMPNMDGFMLAENIRKNDRLKNIPIVAISSKSDEKDQNRAALLGINRFIAKNSFNVHNLTAIVRELIGEANG

SEQ ID NO: 54099 - DNA, 912 bp, Unknown
  Obtained from environmental sample
  misc_feature (1)..(912): n is a, c, g, or t
gtgagcagcattattagcaaggaacatcgtctcgccggacagggcgctattttgttatgcgcttttttttggagcacctcggggcttttcataaggctggtagactgccaccctatggttatcgccggctccaggagttttttcgcggttttgtttttgctggcgctcaggctttttttccctttcaaaaaaagcgccgcaaactcaaaagcgcttatattaaaaacgctgtttaaagatacgcccgcgttggctgcctgcggccttggctatgccgccacaatgatcttctttgtcatagccaacaagctgaccgcttcggcaaacgccataatactgcaatacgcggctcccgtgtgggccgcgctgcttggctggatttttcttagggaaaagccccggacagaacattgggcggcgatggttcttgtcggactggggatgtttcttgtgtttcagggcggctttgcgtccggttcttttttgggcgacatattagcgctggtatccggcatcacattcggggcaaaccctgtgatattgcgcgccagggaagacaaaaaccctgccgacatcatgttgttttcccatataacctgcgcggttatttccgtcccgttcttctttgtataccccccggccccggaggcaaaatattttttgtctgttatctttatgggtatcttccagcttggattggcttccgccctgtttgcctacgggatcaggcgcatacctgccgtacaggcaatgctgaccgctacggttgagccggttctcaaccctgtctgggtgctgctcgcccttggggaaaaaccatcgttatctgtaattataggcggcggcattattatcagtgccataatcttttcctctatattttccaatgtcaacaagtttagaaagcgctaa

SEQ ID NO: 54100 - protein, 303 aa, Unknown
  Obtained from environmental sample
  DOMAIN (168)...(293): Integral membrane protein DUF6
  misc_feature (1)..(303): Xaa is any amino acid
MSSIISKEHRLAGQGAILLCAFFWSTSGLFIRLVDCHPMVIAGSRSFFAVLFLLALRLFFPFKKSAANSKALILKTLFKDTPALAACGLGYAATMIFFVIANKLTASANAIILQYAAPVWAALLGWIFLREKPRTEHWAAMVLVGLGMFLVFQGGFASGSFLGDILALVSGITFGANPVILRAREDKNPADIMLFSHITCAVISVPFFFVYPPAPEAKYFLSVIFMGIFQLGLASALFAYGIRRIPAVQAMLTATVEPVLNPVWVLLALGEKPSLSVIIGGGIIISAIIFSSIFSNVNKFRKR

SEQ ID NO: 54101 - DNA, 477 bp, Unknown
  Obtained from environmental sample
  misc_feature (1)..(477): n is a, c, g, or t
atgaggaaaccccnggccttataccgatttaccgtaaccctgccggccggcggcgaactcacagtccctgtccgcgagtcccacccaaccatggaacgcgtaaccctgctgcaactcaggcctgacgcgtttctgtcatacacaagcagtaaagaacttcccgcgaacgtgaaggaagcttttcaacaggcggtgaacctgcgctcatcgcttaacgcttcgcaggccgcggtcacggaagcggaaaggcagagaaccagttttgtttcggagcaagacagaataaggaaaaaccttgaagcagcgggcggccaaacccagcagggacaggaatacctgaaaaggcttatatcgcttgacgacagcattgacaaaattgacaaggaactgcaaacactgagggaaaacgccagggccgcgcagaaggcgtatgaggattaccttggcaatttgcaaatagggacaaatgagaaatga

SEQ ID NO: 54102 - protein, 158 aa, Unknown
  Obtained from environmental sample
  misc_feature (1)..(158): Xaa is any amino acid
MRKPXALYRFTVTLPAGGELTVPVRESHPTMERVTLLQLRPDAFLSYTSSKELPANVKEAFQQAVNLRSSLNASQAAVTEAERQRTSFVSEQDRIRKNLEAAGGQTQQGQEYLKRLISLDDSIDKIDKELQTLRENARAAQKAYEDYLGNLQIGTNEK

SEQ ID NO: 54103 - DNA, 1143 bp, Unknown
  Obtained from environmental sample
  misc_feature (1)..(1143): n is a, c, g, or t
ttgtttgcctgcgaggttaaggatatggctcaggtggaaaatgctattaaagaacaattttttcgctttcgggaagacaaaagcaaggaaatatatttttgcaaccctcacctatttaatgattatgtccaatttattaaatcttacaaattgtttatgaaagaaatttatatcaaggaggaagataaaaagcatatagtgaaaattgtaaagaaaacaacgccgtctcttgatgatagggggctgactagaaaagacgtgatgcaaaaagcacagaaggcaaaaaatgacgagttttatactagatatgaagatgttgaaaaggaattatcaatgtatagtaaaagtatttggagaaacaaagttgttttttgtaattgcgatgatgctgttgatacagacaatagaaatacatctgcgtttgttttgtactttttgcggaattttaaagaacttggattggaaaaactgatttgtactcattatggaggtggattggatatatttaatcagggtgcgaaaggttatgtattcacttatatatttacaaaaaacgggttcaaggaaataaaagaataccctagaggttatactggcagttttgacgacccgttgtcaataaaaatacttaaagaagagtcggacatagtatgcaccaacccgccattttcaaaaatggctgattattggaaacttgtcattgaaagtggaaagaaatttttaattatttcaaatattacaaatgtaaaaaaccagccatatatgacatatttcaaaactaataaagtttgggcagggtataacagaatagattattttttaagtccaaaaaaagaacttgtggaagcatcaggtcattggtttacaaatattcccataaaaaccagaccgaaatataaacacttaaagatagttccattgaaagaaatacctgaaaaatataaaatatatgacgattcaaaaatattatctgttgaaaatggatttattcctagtgactacaaaaagccttttgccgtatctattagaccaatactaaacggcttattggaaaagaaatatgagcttgtcactgacaaagaatatgtcccttatgtaaacggcaagcgttgttttggaaaagtgttggttcaaaaaatataa

SEQ ID NO: 54104 - protein, 380 aa, Unknown
  Obtained from environmental sample
  misc_feature (1)..(380): Xaa is any amino acid
MFACEVKDMAQVENAIKEQFFRFREDKSKEIYFCNPHLFNDYVQFIKSYKLFMKEIYIKEEDKKHIVKIVKKTTPSLDDRGLTRKDVMQKAQKAKNDEFYTRYEDVEKELSMYSKSIWRNKVVFCNCDDAVDTDNRNTSAFVLYFLRNFKELGLEKLICTHYGGGLDIFNQGAKGYVFTYIFTKNGFKEIKEYPRGYTGSFDDPLSIKILKEESDIVCTNPPFSKMADYWKLVIESGKKFLIISNITNVKNQPYMTYFKTNKVWAGYNRIDYFLSPKKELVEASGHWFTNIPIKTRPKYKHLKIVPLKEIPEKYKIYDDSKILSVENGFIPSDYKKPFAVSIRPILNGLLEKKYELVTDKEYVPYVNGKRCFGKVLVQKI

SEQ ID NO: 54105 - DNA, 1203 bp, Unknown
  Obtained from environmental sample
  misc_feature (1)..(1203): n is a, c, g, or t
atgggcaatcccgagaattatcccgtgtactttgataaaatgctgttaaacgcctcgcaggttaccaacccgtccatagaccccctgcgcgagcctatggagacaaggatatccctcggcgcgaagccgaagcacatagaacgtgacaagagcggacgcatcaaaaacaatctgccgcctcagttgcacctgtcaatgccggttatgttttcggcgatgagttacggttccataagttacaacgcccacgagagtctggcgcgggccgccgaggaacttggcattttgtacaacaccggcgaaggcggactgcatgaagatttttataaatacggcaagaacaccatcgtgcaggttgcgtccggacgtttcggcgttcatcccgattacctgaactcgggcgcggcggttgagataaaaatggggcagggagcgaaacccggtattggggggcatctgcccggagcaaaaatcgtaggcgacatttcccgcaccagaatgatccccgaaggctccgacgcgatttctcccgcgccccatcacgatatttattctattgaagacttgcgccagcttgtcttttccctgaaagaggcgacgaattatcaaaagcccgttattgtcaaaatagcggcggtgcataacgtcaccgccattgcaagcggcattgccagaagcggcgcggatattatagccattgacggctttcgcggcggaacgggagccgcgcctacgcggatccgcgaccatgtcggcatcccaatagagcttgcccttgccggcgttgacaaacgactgcgcgacgaaggaatccgtgacagggtgtcaatcgtcgcgggcggcagtatccgctcaagcgccgacattgtaaaagcgctcgctctgggcgcggactgcgtgtacatagccacctccgcccttgtcgcgcttggctgccacctgtgcagaagctgccacggcggcaaatgcaactggggaatagcgacgcaggttcccgaactggtaaaacgcctgaatccggacatcggatataagcgcctgattaatttactgacggcttggcagcacgaaataaaagagatgatgggcggcatgggaattaattcaattgacggacttaaaggcaaccggcttatgctgcggggcgttgggttaaacgaaaaagaacttgatattctgggcattaaacacgccggagagtag

SEQ ID NO: 54106 - protein, 400 aa, Unknown
  Obtained from environmental sample
  DOMAIN (5)...(368): Conserved region in glutamate synthase
  misc_feature (1)..(400): Xaa is any amino acid
MGNPENYPVYFDKMLLNASQVTNPSIDPLREPMETRISLGAKPKHIERDKSGRIKNNLPPQLHLSMPVMFSAMSYGSISYNAHESLARAAEELGILYNTGEGGLHEDFYKYGKNTIVQVASGRFGVHPDYLNSGAAVEIKMGQGAKPGIGGHLPGAKIVGDISRTRMIPEGSDAISPAPHHDIYSIEDLRQLVFSLKEATNYQKPVIVKIAAVHNVTAIASGIARSGADIIAIDGFRGGTGAAPTRIRDHVGIPIELALAGVDKRLRDEGIRDRVSIVAGGSIRSSADIVKALALGADCVYIATSALVALGCHLCRSCHGGKCNWGIATQVPELVKRLNPDIGYKRLINLLTAWQHEIKEMMGGMGINSIDGLKGNRLMLRGVGLNEKELDILGIKHAGE

SEQ ID NO: 54107 - DNA, 621 bp, Unknown
  Obtained from environmental sample
  misc_feature (1)..(621): n is a, c, g, or t
gtgggtgatcgctggtcgctggcttggcgctgcctggccgcccaatacttcggtgttccccaacgtcgtaaaagaatctaccttgtcgcaaattttggaaatcaatgtgcaggagaaatactttttaagccggaaagcttgtcggggaataataaaaagggcaaagagaaggaggatagttttaccggaaatgttaaagaaagccctaaacaatacaccgtagatataggttattcatcaaacgcaattcaaatgaaccctcaatcatcggtaacgcttcgggctaacggtgggggttgcggggcaaaaacaggtctatattgtctacctgtaaatcaatgtaatgtcccttttgtttgtaatggtttcggagattataaacaaggaaatataggcaaaacattactgtcaagagatgatataacttctggtgatttgattgtttccgggtattcagttcggaaattaacgccacttgaatgtgaacgcttgcagggctatcccgataactggacgaaatacggacatgacggaaagctaatttctgacaatcaaaggtataaagcattgggaaacagcgtagcaataccatgtgttgaatttgtgctttctggatgctaa

SEQ ID NO: 54108 - protein, 206 aa, Unknown
  Obtained from environmental sample
  misc_feature (1)..(206): Xaa is any amino acid
MGDRWSLAWRCLAAQYFGVPQRRKRIYLVANFGNQCAGEILFKPESLSGNNKKGKEKEDSFTGNVKESPKQYTVDIGYSSNAIQMNPQSSVTLRANGGGCGAKTGLYCLPVNQCNVPFVCNGFGDYKQGNIGKTLLSRDDITSGDLIVSGYSVRKLTPLECERLQGYPDNWTKYGHDGKLISDNQRYKALGNSVAIPCVEFVLSGC

SEQ ID NO: 54109 - DNA, 972 bp, Unknown
  Obtained from environmental sample
  misc_feature (1)..(972): n is a, c, g, or t
ttggataaatatcaaaagacggcatcggcgcaatgccaggttagcggcaataaacataccgagcaggcgtatcgtctttacactctggctctgcggggtgaagccgatcttggatcgatgaaccgcctgcgaagccataaattgccgtttcaggcaagctggcgtcttgccgcggcgtattggcttgcgggacagcgtgatacagcccgaaacatgataaaaggtttggctttgcctgaaaaagattaccgagagctttccgcgacattcggttcaactctcagggataaggcaatgattcttgaaactctcattttgttaaattctccggaagaaataggaagaaccaaacagctttttgaagaaatagcaaacacgctttctcaggaaaaatggctttccactcaggagacagcttacgcccttatcgccttagttccgtatatgtcaggtaatgccggaagcggtacgctgactttggattattccgtagccggaaaaaccggaaatatctcttttacaactcctgtcgcggaacgctcttttgaaaatgtaacaggaaccagcgccgttttgtcggtgactaaccgttcatcttctcctgtttatgtaaggtatacggcaaaaggactgcccgttgaagggaaagaacccgctctctccgaaggtctttcgcttaccgttgaataccgtgacaccaacaaagtattaattactcctgaaaatttaaaactgggcgatgatatggaaatctctgtccgtgtgcgtaatacattttctcagtctgtagaagaagccgcgcttattattcctattcccgcgtcatgggaaatcgtcaacacacggctcggcggaagcgcgtcttcgtcaaatttccgttatcaggacataagggacgacagagtaatgacatactttaatcttaacaggggcgaagaaagaacgataactttcagggtaaacaaagcttag

SEQ ID NO: 54110 - protein, 323 aa, Unknown
  Obtained from environmental sample
  misc_feature (1)..(323): Xaa is any amino acid
MDKYQKTASAQCQVSGNKHTEQAYRLYTLALRGEADLGSMNRLRSHKLPFQASWRLAAAYWLAGQRDTARNMIKGLALPEKDYRELSATFGSTLRDKAMILETLILLNSPEEIGRTKQLFEEIANTLSQEKWLSTQETAYALIALVPYMSGNAGSGTLTLDYSVAGKTGNISFTTPVAERSFENVTGTSAVLSVTNRSSSPVYVRYTAKGLPVEGKEPALSEGLSLTVEYRDTNKVLITPENLKLGDDMEISVRVRNTFSQSVEEAALIIPIPASWEIVNTRLGGSASSSNFRYQDIRDDRVMTYFNLNRGEERTITFRVNKA

SEQ ID NO: 54111 - DNA, 960 bp, Unknown
  Obtained from environmental sample
  misc_feature (1)..(960): n is a, c, g, or t
ttgcgcctacaaagaacattgatcaatgtgcccgatatgtacaatattccgcctgaaatgccgtataaattcttttccgactttgacgtaatcacagggtacaaaacggtttccactctgactattccgctggtcgccacagataaacggcttatgggcgttattcaggttattaactccaaagatgaaaatgataatattgttcccttctcgtcttccgacgaacttatgcttacgcactttgccaccaacgcgactatggttcttcaaagggcgtatcttacaagggcgatgattttacgcatgataaaaatgtccgaacttcgcgacccgaaagaaacaggcacgcatgtaaaccgcgtcgccggttactcggtagagatttatgacagatgggcttttcatcacaagatatccgtcgatgaaagagaaaaatacagagacacgctgaaaataagttccatgctgcatgatgtcggcaaggttgcgatttccgacgcgatccttaaaaagcccgcgcgctttacgccggaagaataccagataatgcagaaccatactgtttacggcgcgagtcttttcagcgatacaaactcttatatagaccagcttgccaaagatatcgctctgacacaccatgaaaattgggacggcacaggttatcccggctggatagatccatacacgggtaaaacagagagagaaaatgaaaacggaaaaccgctggggaaaaagggcgaagaaattccgcttggcggcaggattgtcgctattgccgacgtatatgacgcgctttgctcaagacgcgtatacaaagacccatgggacgaaaaagacgtacttgatgaaatgcgtaaactttcaggctcaaaatttgatcctgagttaatagaaattttctttgaagtactgccgaatatcaagcaggcgcagaaccaataccccgagttcgtaaaatag

SEQ ID NO: 54112 - protein, 319 aa, Unknown
  Obtained from environmental sample
  DOMAIN (114)...(265): HD domain
  misc_feature (1)..(319): Xaa is any amino acid
MRLQRTLINVPDMYNIPPEMPYKFFSDFDVITGYKTVSTLTIPLVATDKRLMGVIQVINSKDENDNIVPFSSSDELMLTHFATNATMVLQRAYLTRAMILRMIKMSELRDPKETGTHVNRVAGYSVEIYDRWAFHHKISVDEREKYRDTLKISSMLHDVGKVAISDAILKKPARFTPEEYQIMQNHTVYGASLFSDTNSYIDQLAKDIALTHHENWDGTGYPGWIDPYTGKTERENENGKPLGKKGEEIPLGGRIVAIADVYDALCSRRVYKDPWDEKDVLDEMRKLSGSKFDPELIEIFFEVLPNIKQAQNQYPEFVK

SEQ ID NO: 54113 - DNA, 552 bp, Unknown
  Obtained from environmental sample
  misc_feature (1)..(552): n is a, c, g, or t
atgttccgtgtttcggcaaagacgctcctcttttaccggaaggaaatttttccctgtttgccgcctgtgtacgggagtaaaatgaaaatccttgtagacgccgattcatgtccaaaacccgtaagagacttgttgctcagaagggcggcgaaacttaagctcagaataatattcgccgctaacaggcagattcccgaatcagacggggcggagatgatcatttgcccggcaaaagataattccgccgatgacagaattgtggagttatctgaaacaggcgatcttgctataaccagagacgttccgctcgcaaagaggctcgtggaaaaaaacgtatccgtaattgacgaccgcggacgggtatttacccaagacaacataaatgaatatctttccatgcgtaattttaaagtagggcttgcggacaacggacttgaaattgtaaggataccgaattacggtaagaaagaactaaaatcgttagctgacgctctggacagaacattaaccgctattttacgaactcggggtattggttctgcgcctgcttga

SEQ ID NO: 54114 - protein, 183 aa, Unknown
  Obtained from environmental sample
  DOMAIN (28)...(171): Uncharacterized BCR, YaiI/YqxD family COG1671
  misc_feature (1)..(183): Xaa is any amino acid
MFRVSAKTLLFYRKEIFPCLPPVYGSKMKILVDADSCPKPVRDLLLRRAAKLKLRIIFAANRQIPESDGAEMIICPAKDNSADDRIVELSETGDLAITRDVPLAKRLVEKNVSVIDDRGRVFTQDNINEYLSMRNFKVGLADNGLEIVRIPNYGKKELKSLADALDRTLTAILRTRGIGSAPA

SEQ ID NO: 54115 - DNA, 990 bp, Unknown
  Obtained from environmental sample
  misc_feature (1)..(990): n is a, c, g, or t
ttggcgatgataaaaatacataaacttcaaaatcaaataaaacattatgaatggggttccacgcggatactgccagaatttttaggattgctaaaaaatggggatagtgatttaaaagagccttatgcggaaatgtggctgggtacgcacccgctcgccccgtcgcaggtacgggtaaacggaaacgacataaacctgaaagagatttcaggggagcttccatttttactaaaactgattgccgtagaaaagccgctttcaatacaggttcacccgaacaaggaacaggcgaaagacgggtttttgcgggagaatgaaatggggcttgaaatagactctcccgtaagaaattacaaagatcagaacaataagagcgaaataatatgcgccattacgccttttacccttatggcgggatttaaagagccaaaagaaatatacgcttccttaggcgcggtttcaggcgggcaaatggatcttattaaaaaattaacctccctttatcctggggacaccggaattttttcgcccctttacctaaacttaattacattacagcccggacagggactttttattccggcgggaacgcctcatgcgtatatcagcggttttggcgtggaattgatgaccaattccgacaatgtagtccgcggcggacttacgagtaagcatgttgacagcgacgagttaaaaaaaatatcaaaaccgattccttttgttccgcaaattattacnccttccgatgatccgctgacttgttatccgcttaccggagaaaacttttctctttatcacattcgcggcggtaaagacgtatcttttccgcagggcggtcatgctgtctgcatagtaacggaaggagagttaaaaacagaatcccaaatttttaaaaaaggcgagtctttttatgttccgtgtttcggcaaagacgctcctcttttaccggaaggaaatttttccctgtttgccgcctgtgtacgggagtaa

SEQ ID NO: 54116 - protein, 329 aa, Unknown
  Obtained from environmental sample
  DOMAIN (6)...(295): Phosphomannose isomerase type I
  misc_feature (1)..(329): Xaa is any amino acid
MAMIKIHKLQNQIKHYEWGSTRILPEFLGLLKNGDSDLKEPYAEMWLGTHPLAPSQVRVNGNDINLKEISGELPFLLKLIAVEKPLSIQVHPNKEQAKDGFLRENEMGLEIDSPVRNYKDQNNKSEIICAITPFTLMAGFKEPKEIYASLGAVSGGQMDLIKKLTSLYPGDTGIFSPLYLNLITLQPGQGLFIPAGTPHAYISGFGVELMTNSDNVVRGGLTSKHVDSDELKKISKPIPFVPQIITPSDDPLTCYPLTGENFSLYHIRGGKDVSFPQGGHAVCIVTEGELKTESQIFKKGESFYVPCFGKDAPLLPEGNFSLFAACVRE

SEQ ID NO: 54117 - DNA, 516 bp, Unknown
  Obtained from environmental sample
  misc_feature (1)..(516): n is a, c, g, or t
ttggctgagaaagatttacgtgtaaacgaacagattcgttccagagaagtccgtctattccgggatgacggcgatcagggaattatgtctgtttcgcaagcattggaaattgccagagatgtgggtcttgaccttgtggaagtagcgccaaatgcggtgccccccgttgtcaagatattggattacggtaagttcaggtttgagaacgagaagaggctgagggattccaaaaaaaagcagaaacttttaaagcttaaggaaatccgaatgcagcccaaaatcgacgatcatgatcttgactttaaatcgaagcatattaaggaattcttaaccgaaggcaataaggtaaaagtaacgatccgtttccgaggtcgtgaacttgcccatacggaacttggttttgacgtaatgaaggacgttctttcccgcattgagggagagtatgtcatggaaaaaccgccggcgatggaagggcgttttatgtccatggtgctgagtcctaaaggcaaaaaataa

SEQ ID NO: 54118 - protein, 171 aa, Unknown
  Obtained from environmental sample
  DOMAIN (3)...(77): Translation initiation factor IF-3, N-terminal domain
  misc_feature (1)..(171): Xaa is any amino acid
MAEKDLRVNEQIRSREVRLFRDDGDQGIMSVSQALEIARDVGLDLVEVAPNAVPPVVKILDYGKFRFENEKRLRDSKKKQKLLKLKEIRMQPKIDDHDLDFKSKHIKEFLTEGNKVKVTIRFRGRELAHTELGFDVMKDVLSRIEGEYVMEKPPAMEGRFMSMVLSPKGKK

SEQ ID NO: 54119 - DNA, 360 bp, Unknown
  Obtained from environmental sample
  misc_feature (1)..(360): n is a, c, g, or t
atgtcaagagcagttgacggttccaaaagaaagaaccatcgaaaaaaaatattaaaactggctaagggttattggggaagacgcggaaccaactataaaacggcaaaagacgcggtagccaaatctttaacttacgcgtaccgcgacagaaaagacagaaaagcgcaattccgcaaattgtggattgtaagaattaacgcggcttgcagggaaaacggactttcctattcgcggcttatcgcgggtcttaacaaagcgggcataattatcgaccgcaaagcgcttgcgtggcttgcttcggaagatacagccgcgttcaaggctgtagccgaaaaagccaaagcggcgcttggagcgtaa

SEQ ID NO: 54120 - protein, 119 aa, Unknown
  Obtained from environmental sample
  DOMAIN (2)...(109): Ribosomal protein L20
  misc_feature (1)..(119): Xaa is any amino acid
MSRAVDGSKRKNHRKKILKLAKGYWGRRGTNYKTAKDAVAKSLTYAYRDRKDRKAQFRKLWIVRINAACRENGLSYSRLIAGLNKAGIIIDRKALAWLASEDTAAFKAVAEKAKAALGA

SEQ ID NO: 54121 - DNA, 468 bp, Unknown
  Obtained from environmental sample
  misc_feature (1)..(468): n is a, c, g, or t
atgataagccttgagcaggttcaggaacttgaaacaaaggtcgctaaaacaattgagtatgtgcagcgcgtgaacgctgaaaacgccgctctcttatccgagagggcgggtttacagcagaaactggaagcgaatcaaaagcggctagacgagctggaactgcttgttatgcgctttaaagaagatcaggggcggattgaagacggcatagtcgcggctttggacaggttaaatcagtttgaagaagcgtttgaaaaaagcctgaatgaaaaaagcttaaaagaaaaaacagcgcctaaaaaaactcacgcaaaaaaagagaaaccggctgaatctgaatccgaatcagattcaaatgagttttttgaaatttcggcaaataaaacaaaagaaaacgccgaacttgcggacagcgattcattggataccgagcttgatccgcaagataaagatttggatattttttag

SEQ ID NO: 54122 - protein, 155 aa, Unknown
  Obtained from environmental sample
  misc_feature (1)..(155): Xaa is any amino acid
MISLEQVQELETKVAKTIEYVQRVNAENAALLSERAGLQQKLEANQKRLDELELLVMRFKEDQGRIEDGIVAALDRLNQFEEAFEKSLNEKSLKEKTAPKKTHAKKEKPAESESESDSNEFFEISANKTKENAELADSDSLDTELDPQDKDLDIF

SEQ ID NO: 54123 - DNA, 348 bp, Unknown
  Obtained from environmental sample
  misc_feature (1)..(348): n is a, c, g, or t
atgaccaatgaaattcgtttggatattcttggaacttcctttacaataaccgccgatgaggacgaagaataccttaaaaaagtattatcccaataccgcgcggctgtaaccaatacgcaaaatatttcagggattaaagacccgctaaacgtcgctatcttaaccggttttatactgtgcgatgaatataacaaagtaaaacaaaaattagacgaagaaacggaagccggaagaatcgttaaaagtgaaaacaaatgggaagagcaggaagttgaagatcgcacccttcggcttatatcgaaactggaacacgcgttaaatatgtttggcgatgacaagaattcatag

SEQ ID NO: 54124 - protein, 115 aa, Unknown
  Obtained from environmental sample
  misc_feature (1)..(115): Xaa is any amino acid
MTNEIRLDILGTSFTITADEDEEYLKKVLSQYRAAVTNTQNISGIKDPLNVAILTGFILCDEYNKVKQKLDEETEAGRIVKSENKWEEQEVEDRTLRLISKLEHALNMFGDDKNS

SEQ ID NO: 54125 - DNA, 420 bp, Unknown
  Obtained from environmental sample
  misc_feature (1)..(420): n is a, c, g, or t
ttggcgatgacaagaattcataggcttcaaaatcaaataaaacattatgattggggttctgcaaaactaatccccgatttattgggaataaaagataacgatccccaaaaaccttacgctgaaatgtggatggggacgcatccgtccgctccgtcgtatgcgccggacagcggcgtaaaccttaaagaaatttccggggagcttccctttttgttaaaactgattgccgtggaaaagccgctttcaattcaggttcaccccgacaaagagcaggcggcggaaggttttaagcgcgaaaatgaggcggggatagcaattgattcgcctttaagaaactacaaagaccaaaaccaaaagaacgaattaatctgcgctattacgccttttacgctcattgccggattcatggaacccgaataa

SEQ ID NO: 54126 - protein, 139 aa, Unknown
  Obtained from environmental sample
  misc_feature (1)..(139): Xaa is any amino acid
MAMTRIHRLQNQIKHYDWGSAKLIPDLLGIKDNDPQKPYAEMWMGTHPSAPSYAPDSGVNLKEISGELPFLLKLIAVEKPLSIQVHPDKEQAAEGFKRENEAGIAIDSPLRNYKDQNQKNELICAITPFTLIAGFMEPE

SEQ ID NO: 54127 - DNA, 1332 bp, Unknown
  Obtained from environmental sample
  misc_feature (1)..(1332): n is a, c, g, or t
ttgcgccaatcagggcactcccgagaagcgttacacggcgttgaacaggcggtgcgcacggtctacgccagcacaatgaacgaagacgcactggcctacaggcagaacaggggccttaccaatctggatgagcagatggccatacttgtacagcgcgtttccggaaaccactacggagatttattctttccacatctggccggcgtcgggaattcatctaacctttatgtgtgggacaaaaccatgaacccggacgccggaatgttacggatcgtcttcgggcttggaacccgcgccgtggatcgcgtgtcaggcgattacgccaggctggtttttctggatcaaccggaaaaaacgccgcccgtcagccacaacgatgaaagaagattctcacagcataacgccgacgtccttaacctgtccggcaaccagttggaggaagttcccctggacaagttgtcgaatcttgatttaaaaacggacggaagtatttttttcagcgtagacaccgaaacgataaaccgtttggaggaactgggacgcacttatcagtacactcctaaaatttctgattttaaaaagttgttaagcgaaacaggctttccgaaattcacgcagacggttttatcaacgcttgtttccgcctatagttatcccgtggatatagaatttaccgttaatttcgatcccaacggcgagttcaggtttaatcttctgcaatgccgacccctgcaaacaaaggggcttgggcgggcaatcaagattccggatctcaaacaggaacagatattcttctcctcaataggaaattttatgggcggcaatgtccggttaggcttcgattacgcggtatgcgtcaggacaacggaatacctcgcgcttcccgagcaggaaaaatacagtgtcgcgcggactataggcgtaattaaccaaaaatataaagataaaaccatgctactgctgggcccgggcagatggggaacgaccacgccgtctctgggagttccggttcatttcagcgaactttgcaacatggccgcaatgtgtgaagtttcgtatccaaaagcgggcatactgccggacctttctttcggcagccattttttccaggacatcgtggaatcagatgttttttacgcggcgatttttaacggagaacctgacgttgtattctgccccgagcaaattctggagagggaaaatctgtacggaaaattactgccgggagaaaagaaactggatgcgattatacatatcgctgaaacacccggcctgattttacattccgatattacaaaccagaaattactgatttattgggaacaggtataa

SEQ ID NO: 54128 - protein, 443 aa, Unknown
  Obtained from environmental sample
  misc_feature (1)..(443): Xaa is any amino acid
MRQSGHSREALHGVEQAVRTVYASTMNEDALAYRQNRGLTNLDEQMAILVQRVSGNHYGDLFFPHLAGVGNSSNLYVWDKTMNPDAGMLRIVFGLGTRAVDRVSGDYARLVFLDQPEKTPPVSHNDERRFSQHNADVLNLSGNQLEEVPLDKLSNLDLKTDGSIFFSVDTETINRLEELGRTYQYTPKISDFKKLLSETGFPKFTQTVLSTLVSAYSYPVDIEFTVNFDPNGEFRFNLLQCRPLQTKGLGRAIKIPDLKQEQIFFSSIGNFMGGNVRLGFDYAVCVRTTEYLALPEQEKYSVARTIGVINQKYKDKTMLLLGPGRWGTTTPSLGVPVHFSELCNMAAMCEVSYPKAGILPDLSFGSHFFQDIVESDVFYAAIFNGEPDVVFCPEQILERENLYGKLLPGEKKLDAIIHIAETPGLILHSDITNQKLLIYWEQV

SEQ ID NO: 54129 - DNA, 1107 bp, Unknown
  Obtained from environmental sample
  misc_feature (1)..(1107): n is a, c, g, or t
atgacggaagacgagccgtccgttctatataaactggatacctccgaaggttttgagatttttgccgcgaaaatgcatgaaattattgaccgcgaggggcttgaggctttttatgtgttcgattgtctgagcgacctgttaaaaagctggaggtcggacatgatggtgggcaatttttttcgcgtaacgtgcccctttctgtttgtgcttgatactgtcgcgtacttcgcccttatccgtgggacgcatacccatgatacaatagccagaatacgcgagacaacgcagcttttactggatgtgtacattgttgacaataaaatttacattcatccgcttaaagtgtgggaacgttattcgcccaccatgttttttccgcatttgatagaagaaggcggggcaatctcgattacttccagcgcagacacggcgactctgttctcgcaggtcagcggcagcggacagcccagtgattattggaatataaccctggatcacgcgcgcaccctgcttaacgggaataaagaagatcaggaggagatgaaaaagctccttatcagcctggtaataggcaaagagttacgcataaccgaacttgcgcttaaatatttcacgctaagggatgtccttgacatagcgcggcgggaaataggaacgggctttatcggcgggaaaagcgtcgggatgcttctggcgagaaaggtgctggagaccgacgctcaggatgccatgcggggccattgggagccgcatgattcatattatcttggttcggatattttctatacatatattgtacaaaacggctggtgggatctgcggatgaggcagaagacaaccgagggatattttacccttgccaaagagctgcatgaaaaaatgttacagggaaaattccctgataccataagagagcaatttaagcagatgctcgaacactttggccagtcgccgattatagtcaggtcaagctcactgcgtgaggataatttcggcaatgccttcgcgggaaaatatgaaagtgttttttgcgccaatcagggcactcccgagaagcgttacacggcgttgaacaggcggtgcgcacggtctacgccagcacaatga

SEQ ID NO: 54130 - protein, 368 aa, Unknown
  Obtained from environmental sample
  misc_feature (1)..(368): Xaa is any amino acid
MTEDEPSVLYKLDTSEGFEIFAAKMHEIIDREGLEAFYVFDCLSDLLKSWRSDMMVGNFFRVTCPFLFVLDTVAYFALIRGTHTHDTIARIRETTQLLLDVYIVDNKIYIHPLKVWERYSPTMFFPHLIEEGGAISITSSADTATLFSQVSGSGQPSDYWNITLDHARTLLNGNKEDQEEMKKLLISLVIGKELRITELALKYFTLRDVLDIARREIGTGFIGGKSVGMLLARKVLETDAQDAMRGHWEPHDSYYLGSDIFYTYIVQNGWWDLRMRQKTTEGYFTLAKELHEKMLQGKFPDTIREQFKQMLEHFGQSPIIVRSSSLREDNFGNAFAGKYESVFCANQGTPEKRYTALNRRCARSTPAQ

SEQ ID NO: 54131 - DNA, 528 bp, Unknown
  Obtained from environmental sample
  misc_feature (1)..(528): n is a, c, g, or t
gtgccgccggatttgccattatggaggcattttatgaacaatctcaacagcattcttatcgaggggaacatggtgcgcgacccacagtaccgcacaactaccagggggacgccggtctgccacttcagcctggcttcaaaccgttatttaaggcgggacaacggctatgaagaagaagtagccttctttgatgttgaaacctgggcgaaactcgctgatcaatgcaacaatctgggcaggaaagggcgcggagtaagggtggtaggccgcctgaaacaggacagatggacagacaatgacggcaagcagcgttcacgcgtttccatagtcgcggagcatgttgaattccgccctgaattcaaaaaagagcaaaaccatgagaatggcagcgctgaaaagggcaaagattccgtttacagcgacagtcttgccgatgaagcctcggcttccgaagaagccgccgaagtggcacaggattatgaagacacggctgtaatgacggaatacgaggaagcggcggtattttaa

SEQ ID NO: 54132 - protein, 175 aa, Unknown
  Obtained from environmental sample
  DOMAIN (15)...(117): Single-strand binding protein family
  misc_feature (1)..(175): Xaa is any amino acid
MPPDLPLWRHFMNNLNSILIEGNMVRDPQYRTTTRGTPVCHFSLASNRYLRRDNGYEEEVAFFDVETWAKLADQCNNLGRKGRGVRVVGRLKQDRWTDNDGKQRSRVSIVAEHVEFRPEFKKEQNHENGSAEKGKDSVYSDSLADEASASEEAAEVAQDYEDTAVMTEYEEAAVF

SEQ ID NO: 54133 - DNA, 1671 bp, Unknown
  Obtained from environmental sample
  misc_feature (1)..(1671): n is a, c, g, or t
gtgtttccagggttgtgctggcgcgggagctggcgcggaanactaaagtcgatccgggccgacacaaatgttgaattggaagttttcgtgcacggcgcgttatgcgtcagcgcttccggcctctgccttttttcaagctatcttggcggcaagtccgccaacaggggaatgtgcgcccaggcttgccgccgcctgtacagccacggacagacaggtggctattatttcagcacggcggatcttcagcttctggaacagcttcccgatcttgccgccatcgggataaacgcgataaaaatagaaggccgcatgaaaagcgcggattacgtcggcgctgttacaagcgcctaccggctcgtacttgacgcgattgccgcccgtggtggcgccgccgaaggcggcggcgaagaaggaatcgcgcgcagcattgccagggcgcaggaaattctgcgcggtgattttgcccgcagcaagaccaaattttattttttttcaacaacccagtccccagtccccagtacccagtctctgatccctgatccccagtctccaattgactggctgaacccggagcaggacggcggcacgggcattgcccttggcgttatacgcaaggtacgcggcggcgccttaaatgacggaggcaggcaggggcttgccgtatctgacaatattcaggcaatcgttaaattatccataggtgattcgatacngctgcaccgcagcgacgattccgagcgcgtgtcgcacaagctgacttatgccgaaagtcaggattcagacgccgcccacggcgccgctggcgcttactggctttccattcccggcggcttcggtgttggcgaccgcgtgtaccttatccagaacaaggccatgtcaaagcgttacaggccggtaatcaacggcgctgtttccacaggcaaaagggggcctgcttttgaaaaggctccggctccaaaaataccggaattacataaaaacaagctcgtaaagaccggcagccgggacaaacacctgagccttccagaggggatatacgtagctgtttcaagcatcaatgatctattcattgtacagtcttcgcggcccgcgaaggcgatgcttaatcttaaccgcaaaaattcagcttacattttggcggaggacagagaacccctcccctttcggcccggcgatacaatactcgtactgaacccgtatttccctcaggccgcggcagaacaaatggcatccgatattattcagcttatcgatcaaggttacaggcaatttgtgattaacaacttgggacatctatccctttttcgcgatttccggcaggaactgcagttgattgccggcccctggctgtatatgttcaacacatgggcgctgtcgtttatagcgtcactgggaatcatcgacggctttgtttcaccactggaaaacaaccggcagaatttagagcgcacctttggacaggaaaatctccgccgcctgcgcgagtttgtatttgtgcctgtttttgcatggcctgttcttttccgcatccgcgccgaccttggaaagatttacagctttaaatcatttcaagacaacaagggcgaattattctccctttgccgcgagcgggaggagacgcttgttatccccgaacggccattctcaataacggacaaaatcccgttctaa

SEQ ID NO: 54134 - protein, 556 aa, Unknown
  Obtained from environmental sample
  DOMAIN (3)...(168): Peptidase family U32
  misc_feature (1)..(556): Xaa is any amino acid
MFPGLCWRGSWRGXLKSIRADTNVELEVFVHGALCVSASGLCLFSSYLGGKSANRGMCAQACRRLYSHGQTGGYYFSTADLQLLEQLPDLAAIGINAIKIEGRMKSADYVGAVTSAYRLVLDAIAARGGAAEGGGEEGIARSIARAQEILRGDFARSKTKFYFFSTTQSPVPSTQSLIPDPQSPIDWLNPEQDGGTGIALGVIRKVRGGALNDGGRQGLAVSDNIQAIVKLSIGDSIXLHRSDDSERVSHKLTYAESQDSDAAHGAAGAYWLSIPGGFGVGDRVYLIQNKAMSKRYRPVINGAVSTGKRGPAFEKAPAPKIPELHKNKLVKTGSRDKHLSLPEGIYVAVSSINDLFIVQSSRPAKAMLNLNRKNSAYILAEDREPLPFRPGDTILVLNPYFPQAAAEQMASDIIQLIDQGYRQFVINNLGHLSLFRDFRQELQLIAGPWLYMFNTWALSFIASLGIIDGFVSPLENNRQNLERTFGQENLRRLREFVFVPVFAWPVLFRIRADLGKIYSFKSFQDNKGELFSLCREREETLVIPERPFSITDKIPF

SEQ ID NO: 54135 - DNA, 672 bp, Unknown
  Obtained from environmental sample
  misc_feature (1)..(672): n is a, c, g, or t
ttgcggtacgcgtctccgcgcaatattcggcatacattgatcgtttttagggcttccgcctgccgtgtaaatcaaaaaacacggctcgccattcgccctcggcgtccccactccccactccctacttcctacttcactacttcctgcttcctactcccttttcttactttattatttattagttattggttattatttatcatgcctgttgaattgcttgcgcctgccggctctcccgaggctctggatgccgccattggagagggcgcggatgccgtttaccttggcctgaaaaacttcaacgccagaatgcgaagcgctaattttacatatccccgttttgaggccgccctgcgctcgctcaggcgcatggggaaaaaaacctatgttacagtgaatacggtttttgaacagcgcgaggccgacagaatgtaccagcttctcaaatatctttcgtcgcttgggcctgacgcgctgatagtacaggactttggcgttctcgcaatggtcaattcggaatttccaaaattgaaaatccacgcctccacccagatgaatatcgcttncagcaggggggcaaacgcgctgtcacggtacggtgtttccagggttgtgctggcgcgggagctggcgcggaanactaaagtcgatccgggccgacacaaatgttga

SEQ ID NO: 54136 - protein, 223 aa, Unknown
  Obtained from environmental sample
  misc_feature (1)..(223): Xaa is any amino acid
MRYASPRNIRHTLIVFRASACRVNQKTRLAIRPRRPHSPLPTSYFTTSCFLLPFLTLLFISYWLLFIMPVELLAPAGSPEALDAAIGEGADAVYLGLKNFNARMRSANFTYPRFEAALRSLRRMGKKTYVTVNTVFEQREADRMYQLLKYLSSLGPDALIVQDFGVLAMVNSEFPKLKIHASTQMNIAXSRGANALSRYGVSRVVLARELARXTKVDPGRHKC

SEQ ID NO: 54137 - DNA, 1455 bp, Unknown
  Obtained from environmental sample
  misc_feature (1)..(1455): n is a, c, g, or t
ttggcgtttcgcaatattatcagaaacaaaaaaaacagctttattattattttacttatcgcgattattactttttttttctttatggggaacagtgtcattgggatgatagatcgcggtattcgccatgcgtatattgaaagccttacaggcgacgtagtactggaaaaaacagcggatcttaccatgaaccttttcagcgcaaacgctcctgttatcagttctttttttaatataccgattcttcccgcttataattcagtcatggaaatcgcagccgccgaatccggagttgacggaataacaagccagatatcgggcaaggcttttcttgatctcttaaatgtccgggagccggttttactgtgcggcattgacgcagaatcatatttccggcttttccccggaattattctggaagaaggacgatttttgcgcgccggtgaatacggcgcaatgattacggaagaacgggcgcaaagaattgaaaagttcagcggacagcgtcccaatatcggcgcgccattgcttttaacgtccggcggcgctatggggtttaaaatcagggaagttccgttagttggtatttacaagtacgaaaaccccggacaatttatgaatgaaattgtcgttatcgatcctcaaactgtaagagcgcttaactcaatacaggttgcaggcagcgccgccaaaaccgatttcattaacgccgcaggcggcgaaaactctattcgcctgcttacagccgatccggatgatattttcggcgaagaatttgcggctaatgacgaaacaaaagacgacggcttttccgtaaatctgttggagaattatttaagagattccaaagcgaacaagaatgtacaggaaaccgggggggattggaattttattattctgcgtctgaaaaaaggagtgtccgccaaagcttttatttcatctttgaataaaaaaatacaaccctacggcataaccgcggtaaactggagaatagcggcgggaaattccgccattctttctctattgcttcagataatgtttaattcgggaatatttttggtatgcgtcgcgggcattattaccgtaattaatatccttttaataactgtttttcgccgaacaagagaaatcggcacgctcagagcaatcggcgcatcggatgtttatatccgttcgcttgttttttccgagaaccttattatcgccgtagtttcagcttttgcgggacttatagccggcatattatttattttctggattaacagtcttgggattaacatctcaaacgaactaattgtttcaattcttggcggcaatatattaaagctggaatttattccgcaaaccgcagtcttttcatttttaattgcggtattattttctttggcggcgtctttgtatccggtagaagtaacagtgcggattgagccaattgtggcggtacagaggggataa

SEQ ID NO: 54138 - protein, 484 aa, Unknown
  Obtained from environmental sample
  DOMAIN (295)...(477): Predicted permease
  misc_feature (1)..(484): Xaa is any amino acid
MAFRNIIRNKKNSFIIILLIAIITFFFFMGNSVIGMIDRGIRHAYIESLTGDVVLEKTADLTMNLFSANAPVISSFFNIPILPAYNSVMEIAAAESGVDGITSQISGKAFLDLLNVREPVLLCGIDAESYFRLFPGIILEEGRFLRAGEYGAMITEERAQRIEKFSGQRPNIGAPLLLTSGGAMGFKIREVPLVGIYKYENPGQFMNEIVVIDPQTVRALNSIQVAGSAAKTDFINAAGGENSIRLLTADPDDIFGEEFAANDETKDDGFSVNLLENYLRDSKANKNVQETGGDWNFIILRLKKGVSAKAFISSLNKKIQPYGITAVNWRIAAGNSAILSLLLQIMFNSGIFLVCVAGIITVINILLITVFRRTREIGTLRAIGASDVYIRSLVFSENLIIAVVSAFAGLIAGILFIFWINSLGINISNELIVSILGGNILKLEFIPQTAVFSFLIAVLFSLAASLYPVEVTVRIEPIVAVQRG

SEQ ID NO: 54139 - DNA, 330 bp, Unknown
  Obtained from environmental sample
  misc_feature (1)..(330): n is a, c, g, or t
atggctttagaagctgttatgagcagccaggaaaaagcggctaccgcccagtgggtggatgcggcaaataaaaaactcagtcttgagctcaataaaagcaatatcacgacaggtcagaaccttgggaaggatgattttttgaagctccttttggcccagttggcccatcaggatccgtctgcgccaatggaagataaggaatttatcgcccagatggcccagttttcaagccttgagcagatgacggccatggcaaggattttgccaaatttaccgccatgcttaccggaaccgaggcttcctcggcgctgggcaaaaacgtggaactga

SEQ ID NO: 54140 - protein, 109 aa, Unknown
  Obtained from environmental sample
  DOMAIN (17)...(109): Flagellar hook capping protein
  misc_feature (1)..(109): Xaa is any amino acid
MALEAVMSSQEKAATAQWVDAANKKLSLELNKSNITTGQNLGKDDFLKLLLAQLAHQDPSAPMEDKEFIAQMAQFSSLEQMTAMARILPNLPPCLPEPRLPRRWAKTWN

SEQ ID NO: 54141 - DNA, 996 bp, Unknown
  Obtained from environmental sample
  misc_feature (1)..(996): n is a, c, g, or t
gtgaaaaccgaaaccatttccgctgaattagtacaggatgaagggcgcaatcagtcccttaccgccaattccgcggcaatggcagccgaagaatcggctgaaaacatccaggtaaccaccgaaaaggcgagaaaccgcctgaattccgctgtagctggcgcaaaaaacaagtcgaatgctgcggaaaacacggtgggaacagccgctgaataccagcaagccggggcgcagaaagccgtttccggtgaaaaagacgggcggaacaaactggaagaggcacggaacaaacggcggggcgtcaacattgaagtgcgtgatttccgcagtgacggaaccgtgaccgaaggcgttgccagagacggcggcgttcaattaagaacaagcgccgaaacccgcttatccggtgaaaacaacagcaaagacattgttcttgaactgcgcctgcccgaccagggccgggaagccgcttcggcgacaaccgcctgggaagccaaggcgggacaggcatttgaagatctgctggcgcgggaactgcaccagaatttcaataacgatattgtacgccatgcctctgtcgccctgcgcgacggcaacgaaggcaccatacggcttgcccttaaaccgganagcctgggcaatgtaaagatacaccttgaaatggccgaaaacaagattacggggcatatcgttgttgagagcagtgaggcgcttcgggcttttgaacgggaacttcctgttttggaaaaggcttttaaagattcgggcttcagcgagaccaatcttgaaatgtcccttgcctcggatgattccgcaaacggaggggcttttgcccggcaggaagagaggcgggaaagggatttcctgattcgctcgctggctgtgtccagctatgaggcagaatctgagcaatcggcgataagccgcctggacgcgcccattcatggcgaaatgctttttacttcaccgggaagaattccggtaaatttgtttgtttag

SEQ ID NO: 54142 - protein, 331 aa, Unknown
  Obtained from environmental sample
  DOMAIN (128)...(267): Flagellar hook-length control protein
  misc_feature (1)..(331): Xaa is any amino acid
MKTETISAELVQDEGRNQSLTANSAAMAAEESAENIQVTTEKARNRLNSAVAGAKNKSNAAENTVGTAAEYQQAGAQKAVSGEKDGRNKLEEARNKRRGVNIEVRDFRSDGTVTEGVARDGGVQLRTSAETRLSGENNSKDIVLELRLPDQGREAASATTAWEAKAGQAFEDLLARELHQNFNNDIVRHASVALRDGNEGTIRLALKPXSLGNVKIHLEMAENKITGHIVVESSEALRAFERELPVLEKAFKDSGFSETNLEMSLASDDSANGGAFARQEERRERDFLIRSLAVSSYEAESEQSAISRLDAPIHGEMLFTSPGRIPVNLFV

SEQ ID NO: 54143 - DNA, 717 bp, Unknown
  Obtained from environmental sample
  misc_feature (1)..(717): n is a, c, g, or t
ttgggaacaaacaacagcggcgtaatcaggattgacgctgtgggcggaagagtcagcgtgaaagggagcgcttcaggcggttttaacagtgaattccgcgaaaacggaaggttccgtttttctgatatgtctgaaatgaacttttttatccgctcgaatcaaaacccgtaccttctgaacacaagtccttggattagttttactccgggaacaaatatatccggcatcagcggacgttatgtgcaaatagcggttgatttttatccgtccgccgacggtgagacgagtccctacctaagcgaattgcgtataatttacaagccgggagaaccgccccttcctccggggaatttaacagccaccgcggttgacgggggagtgctccttcgctggaagcgcagccctgactcaaatacaaccggttaccttatatattacagctcagtccgaggggagcttttcggcaatgattctttattgggcgcttcacccattgacgccggaaacaggaacagcttgtttattgacggattaaaaaacggaacgctttattatttcagagtagccgcttatgactatatttcaggaacggttaatcacaatgtcggagaattctcaagggaagtaacggcaaggcctcttgccgggctgacgctttcggaaatgtttccgcaagtgtcggacgctgtatctgcaggcagcatgaatggattctga

SEQ ID NO: 54144 - protein, 238 aa, Unknown
  Obtained from environmental sample
  DOMAIN (112)...(197): Fibronectin type III domain
  misc_feature (1)..(238): Xaa is any amino acid
MGTNNSGVIRIDAVGGRVSVKGSASGGFNSEFRENGRFRFSDMSEMNFFIRSNQNPYLLNTSPWISFTPGTNISGISGRYVQIAVDFYPSADGETSPYLSELRIIYKPGEPPLPPGNLTATAVDGGVLLRWKRSPDSNTTGYLIYYSSVRGELFGNDSLLGASPIDAGNRNSLFIDGLKNGTLYYFRVAAYDYISGTVNHNVGEFSREVTARPLAGLTLSEMFPQVSDAVSAGSMNGF

SEQ ID NO: 54145 - DNA, 864 bp, Unknown
  Obtained from environmental sample
  misc_feature (1)..(864): n is a, c, g, or t
atgaaacaaaataaattaaacgcaaaaatagaatcttacataagagaaataccaagtcttccggtatctgcaaaaaaggtaatggagatttgtaacaatccttccgccagcccaagtgacctaaataaggtaatttcacttgatccggttttgacaggccgcttacttcagcttattaattcggcatattacggattaaataaccgtgttacatcgcttataaaagcaattaccatgctggggataaatactgtaaaaaacttgacattgtcaaccgcaatacttggcactttaccgaaaaacaggaaattacacgggcttgatatggaaggtttttggcggcattgcttgtgtgtcggcgttacatctaaacttattgcgattaaacagggggttgatctcaggaatcaacaggaatattttacagccggtttgttacatgatatagggaaagtaccccttaatgcggtgctgtcaattgattatatgaatacggtttcatctgcggataatgaacataaaacgcttatcacggcggaagatgaaagttttggaataaatcattgtttttcaggtgagttgataacacaattatggaaacttgagagtcctgtttctgatgttattatctggcatcataatacagataaatattacggtcagtacctgcatattttatacgatgttatggcagcggattatttttcaattatctatgacgttggtttttcaggaaataaaaatcccgtaaagcctgataatgagatatggaaaattatcggcttgaatgaaaatttttttgaagacataaaggaaaaagtctttaaagaaatagaaaaagccaaaattttccttaaagtatag

SEQ ID NO: 54146 - protein, 287 aa, Unknown
  Obtained from environmental sample
  DOMAIN (112)...(238): HD domain
  misc_feature (1)..(287): Xaa is any amino acid
MKQNKLNAKIESYIREIPSLPVSAKKVMEICNNPSASPSDLNKVISLDPVLTGRLLQLINSAYYGLNNRVTSLIKAITMLGINTVKNLTLSTAILGTLPKNRKLHGLDMEGFWRHCLCVGVTSKLIAIKQGVDLRNQQEYFTAGLLHDIGKVPLNAVLSIDYMNTVSSADNEHKTLITAEDESFGINHCFSGELITQLWKLESPVSDVIIWHHNTDKYYGQYLHILYDVMAADYFSIIYDVGFSGNKNPVKPDNEIWKIIGLNENFFEDIKEKVFKEIEKAKIFLKV

SEQ ID NO: 54147 - DNA, 636 bp, Unknown
  Obtained from environmental sample
  misc_feature (1)..(636): n is a, c, g, or t
atgatcccctgccgccacctggagaacagcaggcgcggccaggtggttaaacatccgctcagggcgattgccgcctaccgcctgatgcttcgctggtacgcggttaaaaatatagccgttttctttgatgaaaagacctttttggactttcctgacctttgctcgcttttgagcggagggggaaaaagggtaagcgattgggttaacatgggcgggcagattgtccccgctttcagggtagacgagctgcgccgggaaattgcccagggcaactgtaaaagctgggacaatatccaccgtgtgtacgcttcctggcaggaagaatacctcctggacaaggcccgccacgcctgggccgtgtttgccctgttgaacggtgaaagaaatattgaaaacaaggcttttcttaagcaggaattcgccgccgccgtggaaaccaggcgctggatgagcgaacagatatataaatccagggaaaaggaccacttaaactctttcaagaaagcgactttccgcaatgacgccgagatggaacgggttttaggcaagccaggagatgattcttttgtccgcctggccctccaggaggggaaaatttttgaagaattggcccacagggttatggctcgcctgtaa

SEQ ID NO: 54148 - protein, 211 aa, Unknown
  Obtained from environmental sample
  misc_feature (1)..(211): Xaa is any amino acid
MIPCRHLENSRRGQVVKHPLRAIAAYRLMLRWYAVKNIAVFFDEKTFLDFPDLCSLLSGGGKRVSDWVNMGGQIVPAFRVDELRREIAQGNCKSWDNIHRVYASWQEEYLLDKARHAWAVFALLNGERNIENKAFLKQEFAAAVETRRWMSEQIYKSREKDHLNSFKKATFRNDAEMERVLGKPGDDSFVRLALQEGKIFEELAHRVMARL

SEQ ID NO: 54149 - DNA, 324 bp, Unknown
  Obtained from environmental sample
  misc_feature (1)..(324): n is a, c, g, or t
ttgcgaataacaggcgggactctgtgcggcaggctggtgcaggttccggcggggattgtcaggcccagcatggatcagatgagggaatcggtttttgcctgcctcggcgatctttcagataaatctttccttgacattttttccggctctggcgtaatcgcccttgaagcggcttcgcgcggggcttcccttgttgaagcggttgaaaacgatccgcttaaacgaaaaacgcttctggaaaatgtttcaatctcgcctgtcagaatacactgccgctttatcagcgccgaactgtacgtcaaaaggggcaaaacaagcgtttga

SEQ ID NO: 54150 - protein, 107 aa, Unknown
  Obtained from environmental sample
  DOMAIN (1)...(106): Conserved hypothetical protein 95
  misc_feature (1)..(107): Xaa is any amino acid
MRITGGTLCGRLVQVPAGIVRPSMDQMRESVFACLGDLSDKSFLDIFSGSGVIALEAASRGASLVEAVENDPLKRKTLLENVSISPVRIHCRFISAELYVKRGKTSV

SEQ ID NO: 54151 - DNA, 378 bp, Unknown
  Obtained from environmental sample
  misc_feature (1)..(378): n is a, c, g, or t
ttgaagcggcttcgcgcggggcttcccttgttgaagcggttgaaaacgatccgcttaaacgaaaaacgcttctggaaaatgtttcaatctcgcctgtcagaatacactgccgctttatcagcgccgaactgtacgtcaaaaggggcaaaacaagcgtttgattttatttttctggatcccccttttccctaccagtacaaatgggaactgatggcccgcatagcggcttccccgctggtctcggcggaaaccctgatactgctgcaccgtccgcgtcaggattaccaaaaagaagaaattgacgctttaataaaacaggactcccgtgaatacggacgctcgatagttgatttttttaaggtgaaggctgcggaatga

SEQ ID NO: 54152 - protein, 125 aa, Unknown
  Obtained from environmental sample
  misc_feature (1)..(125): Xaa is any amino acid
MKRLRAGLPLLKRLKTIRLNEKRFWKMFQSRLSEYTAALSAPNCTSKGAKQAFDFIFLDPPFPYQYKWELMARIAASPLVSAETLILLHRPRQDYQKEEIDALIKQDSREYGRSIVDFFKVKAAE

SEQ ID NO: 54153 - DNA, 438 bp, Unknown
  Obtained from environmental sample
  misc_feature (1)..(438): n is a, c, g, or t
atgggctattacaaagtaaaccaaatctacccttggctttatagcataaaagatccccaaaatgtgttttgttatttggcggtgggaaacgagagcgccctgctttttgatacggtatacggtataggcaacctgccaaagaccatcagaacaataacggacaagcccgtatgcgtagtgctggggcatggccatcttgatcacgcaaacggcgcctgccagtttgaagaggcctgggtgcatgaggcggattttgaggtgtgccgcagggatacgtcggaagaaatacgcagagaaactttgaggcagttgaaggaatggggatcggcgctaccggaggattttgctcccgaggtatatgtaaagggcggcacgggtaatctaaaaaaattgcccgtgggcaaggtctttgatctgggcggcctgcattggaagtaa

SEQ ID NO: 54154 - protein, 145 aa, Unknown
  Obtained from environmental sample
  misc_feature (1)..(145): Xaa is any amino acid
MGYYKVNQIYPWLYSIKDPQNVFCYLAVGNESALLFDTVYGIGNLPKTIRTITDKPVCVVLGHGHLDHANGACQFEEAWVHEADFEVCRRDTSEEIRRETLRQLKEWGSALPEDFAPEVYVKGGTGNLKKLPVGKVFDLGGLHWK

SEQ ID NO: 54155 - DNA, 1077 bp, Unknown
  Obtained from environmental sample
  misc_feature (1)..(1077): n is a, c, g, or t
atgagaaatgataacgttaatccaaatcccgctccaatccaacaagctgtaagcgccgacgaactgctcctgcgctcaccgcgcagccgtgcctttattaccggcagcgaggctgtgtccgaggctgtgaagcgggctaatattgacatgtcgatagcctatccgattacgccgcagagcgagagtatgcatcttatcggcgacctttacgcgcagggttacgtacgcgactactaccgtgccgagaacgagttcgccgtgatggcggcgattcacggcgcggcgctgggcggcggacgcgtctttaccgccacaagcggtcccggaacgctgcgggctatggagatgttcccggtatgggcgggttcccgccagcccatcgtatgcgccttcatgtgccggggcgtggcgttgccgccgtccatacagccggagaatattgaaatggcgtttctccttgacacggggatgctgatgttccacgctgagaacgctcaggattttttcgatatgatattggccggctacgcgatagcggagcaaccggaggtgcacctgcctgtcggcgtatttgccgacggcttcttcgtaacgcatacacgcgaagtggcaatgctgccgccggacgacataaaattgcgcgcctattcgccggacattgcgccgatacagccgtttgacatggatcacccgccggtgcgccagactagagatccgctgatgaacaagagcaacttcacctcctacgccgccagcgccagctggcaccaagaggtactggcggcggcggaacgggcgcgaaagcatatcaataatttcatgggcgggttgatagaggtatccaatcccaacgccgaaataatgataatcgcatccggcacagcggcgtcgcaaagcaaggaggcgataagaatcttagagaaagagggaataaccgtcggctttacaaaagtgaaatccgttcgtccgttccgacaaagaataatcgcggcgacggaaaagccagttgatagcggtaccggagttcaacgctggcgggtggctggcgagagaagtcaaggcgtcgctaaacaataa

SEQ ID NO: 54156 - protein, 358 aa, Unknown
  Obtained from environmental sample
  DOMAIN (41)...(266): Pyruvate flavodoxin/ferredoxin oxidoreductase, thiamine diP-binding domain
  misc_feature (1)..(358): Xaa is any amino acid
MRNDNVNPNPAPIQQAVSADELLLRSPRSRAFITGSEAVSEAVKRANIDMSIAYPITPQSESMHLIGDLYAQGYVRDYYRAENEFAVMAAIHGAALGGGRVFTATSGPGTLRAMEMFPVWAGSRQPIVCAFMCRGVALPPSIQPENIEMAFLLDTGMLMFHAENAQDFFDMILAGYAIAEQPEVHLPVGVFADGFFVTHTREVAMLPPDDIKLRAYSPDIAPIQPFDMDHPPVRQTRDPLMNKSNFTSYAASASWHQEVLAAAERARKHINNFMGGLIEVSNPNAEIMIIASGTAASQSKEAIRILEKEGITVGFTKVKSVRPFRQRIIAATEKPVDSGTGVQRWRVAGERSQGVAKQ

SEQ ID NO: 54157 - DNA, 720 bp, Unknown
  Obtained from environmental sample
  misc_feature (1)..(720): n is a, c, g, or t
atgaatatagcggcgcatcatcttaatttcaaggaactgaacaaaaggataagaactgccacggaggccgtctgcatagacggctgcttcgggcagaggtttatcgccagtggcatgaccggcaaaaacctgacgattaacggaacgccggggaacgcgttaggcgcttactttaacggcggaaccattatggtaaacggcaacgcgcaggacgccgtaggtgacacgatgaatgacggtaaaataatcattcacggcagcgccggcgacgcgctcggttacgccatgaggggcggggaaatttatgtccgcgataatgcgggatacagaaccggaattcacatgaaggaatacagggaaaaaaaaccggtaatcgtcattggcggtaaagccggcagttttttgggtgaatacctcgccggcgggctcattgtggttcttggcataggctgcaaccatgaaatcccggtctggtattttacgggtacgggaatgcacggcggaaaaatctttatcagaaccgacaaggaactctcttcactcccggcgcaggtcattgaggaagtggccgccgatgatgatcttcgggagattgcgccgtatgtcggcgagtttgcgaaatatttcggcatggacgcgcagcagcttttgaaagacaggtattacgtgttgaagcctaacgcaaggaacccgtataagcagttatatacggccaattag

SEQ ID NO: 54158 - protein, 239 aa, Unknown
  Obtained from environmental sample
  DOMAIN (1)...(209): GXGXG motif
  misc_feature (1)..(239): Xaa is any amino acid
MNIAAHHLNFKELNKRIRTATEAVCIDGCFGQRFIASGMTGKNLTINGTPGNALGAYFNGGTIMVNGNAQDAVGDTMNDGKIIIHGSAGDALGYAMRGGEIYVRDNAGYRTGIHMKEYREKKPVIVIGGKAGSFLGEYLAGGLIVVLGIGCNHEIPVWYFTGTGMHGGKIFIRTDKELSSLPAQVIEEVAADDDLREIAPYVGEFAKYFGMDAQQLLKDRYYVLKPNARNPYKQLYTAN

SEQ ID NO: 54159 - DNA, 324 bp, Unknown
  Obtained from environmental sample
  misc_feature (1)..(324): n is a, c, g, or t
atgtgcggcatttttggctatgttggaaatcaggacgctgttcctattattgtcgaaggattaaaaaaacttgaataccggggctacgactcggccggcatcgcggttttcggtcagaacggtcttggcgttgtaaagcagaaggngcgcctcgccgcgctggaggcgcgtctttcggaacagccgtttgcgggcccgccattggcggggcgcatagggataggccatacccgctgggccacgcacggggagccctcggatgtaaactcccatccccatggtaggggaataaaaacaaaatcgccgttgttcacaacggtataa

SEQ ID NO: 54160 - protein, 107 aa, Unknown
  Obtained from environmental sample
  DOMAIN (2)...(107): Glutamine amidotransferases class-II
  misc_feature (1)..(107): Xaa is any amino acid
MCGIFGYVGNQDAVPIIVEGLKKLEYRGYDSAGIAVFGQNGLGVVKQKXRLAALEARLSEQPFAGPPLAGRIGIGHTRWATHGEPSDVNSHPHGRGIKTKSPLFTTV

SEQ ID NO: 54161 - DNA, 489 bp, Unknown
  Obtained from environmental sample
  misc_feature (1)..(489): n is a, c, g, or t
atgagtgagtatgaagaaggcttaaaattacttgaagaaaagtttggcaatggcaaagacaatgctatctcgcttgcgactatcgctcaggagccgaacgctgacggaccccaacctgttgtacgtgatgttgacgcatattatgaggacgggactttttatgttacaacatacgccaaatcaaacaagatgcagcaaattgccaaaaaccctgccgtttcaatcgcggtttgcttggaatggtttaccgcaattggaataggtgaaaatctcggttgggtattagaccagaaaaacgccgaattaaggactaaactccgtaaagcttttgcgggatggtacgacatggcaaacaatgaaaaagacgagaattgctgtattttggcaatccatcttaaaaaaggaacgttaaatataaaccattgggaaaaattatatcacatggattttgtgaataagacaattatggagaatggtggagtgttttaa

SEQ ID NO: 54162 - protein, 162 aa, Unknown
  Obtained from environmental sample
  misc_feature (1)..(162): Xaa is any amino acid
MSEYEEGLKLLEEKFGNGKDNAISLATIAQEPNADGPQPVVRDVDAYYEDGTFYVTTYAKSNKMQQIAKNPAVSIAVCLEWFTAIGIGENLGWVLDQKNAELRTKLRKAFAGWYDMANNEKDENCCILAIHLKKGTLNINHWEKLYHMDFVNKTIMENGGVF

SEQ ID NO: 54163 - DNA, 360 bp, Unknown
  Obtained from environmental sample
  misc_feature (1)..(360): n is a, c, g, or t
ttgcctattgctgattatttcggcaataaggaaggatattcaaaagataaaatgaatgttgatgtggaaattgaaaaggggcatgttcttgatgttccggttttaacaaaaagcccgtggatatttgaattggaagttaatagaacaataactttaaagaatagcaacatttttttatgtaatataaggaatgttttagctgaagaatatttgtgtgatgaaacattaagcgttgaaaaatgtataaaaataattctacctgtacacaccgtaagtcaaaaatatttttcatggaatggaaatgaagtttgtaattggggagaagcaatgaaggaaataataaattatagtaaaacttag

SEQ ID NO: 54164 - protein, 119 aa, Unknown
  Obtained from environmental sample
  misc_feature (1)..(119): Xaa is any amino acid
MPIADYFGNKEGYSKDKMNVDVEIEKGHVLDVPVLTKSPWIFELEVNRTITLKNSNIFLCNIRNVLAEEYLCDETLSVEKCIKIILPVHTVSQKYFSWNGNEVCNWGEAMKEIINYSKT

SEQ ID NO: 54165 - DNA, 1296 bp, Unknown
  Obtained from environmental sample
  misc_feature (1)..(1296): n is a, c, g, or t
atgatagctttacatatcgtagctctgtttttaatggtattggcaaatgccatattggttctcatagaaattgcggtagtttctgcaaggccatctcttttgcggcaaatggagcaagagggtaaatggggagcaacaagggcaatagccattttggaagacccaaacgtatttttgtccactgcacaaataggcataaccctagttggggttttatccggtgcctatggtggggcaacccttgaaaaaccgcttgaagccttcttatcacaattgccgataatagaacaatatgcaagcatgatagccttgcctataatagttataacagtatcgtatttttctctgatagttggcgagcttgtcccaaaaaggctggctctgcaatttgcggaaaaaatttcctgcatatccgccccgccaatgcacgccctttccataatcttgaagcctctcgtttggttcttcgatttttctggcgatatactgctccgcccatttaatctgcacgaaagcaaaaaacgccccgtaacagccgaagagcttcaacaaatggcaaaacaagggcatcaagaaggcagcatagaaaaagacgaactgaccatggtgaatagggtgttcaatttatcggatagaacgctcgcttccgttatgaccccaaggcttttggttgaatggataaagctggatatgagcaaagaggagcttcgcggaatagttatgctcagcgaattcacgcaatttcccgttgcaaaggagagtttggaaagcccaataggaaccatagactctcgcgacttgctgtgccagcttgccgcaggtggcgaattgaatatgcaggctatgctcaggcagccgctttttctgccagaatccataaatgccttagacgctttgcacaaaatgcaaaagctagaagacccaatggtgcttgttatagaccaatacggagtttgcagcggcatagccaccatagaagatataacttccgtgctagttgaagaaaccgagctaactcagttgcctgttgacaatttgaaaatgcagaataacgcttgggtagcagatggcttaacggatattcattccataatggaaatgttttcttttactgaattgccaggagaaaatcccgattcttacaacactcttggcggaatggctatgtgcgttttgaacaaagttccacagcagggcgatatttttgagtggaaaaatttgcagtttgaaattttgagcatgaacggccaaagagtggataaggttaagataagcaaaatgcatagcgaaaaatga

SEQ ID NO: 54166 - protein, 431 aa, Unknown
  Obtained from environmental sample
  SIGNAL (1)...(17)
  DOMAIN (346)...(428): Transporter associated domain
  misc_feature (1)..(431): Xaa is any amino acid
MIALHIVALFLMVLANAILVLIEIAVVSARPSLLRQMEQEGKWGATRAIAILEDPNVFLSTAQIGITLVGVLSGAYGGATLEKPLEAFLSQLPIIEQYASMIALPIIVITVSYFSLIVGELVPKRLALQFAEKISCISAPPMHALSIILKPLVWFFDFSGDILLRPFNLHESKKRPVTAEELQQMAKQGHQEGSIEKDELTMVNRVFNLSDRTLASVMTPRLLVEWIKLDMSKEELRGIVMLSEFTQFPVAKESLESPIGTIDSRDLLCQLAAGGELNMQAMLRQPLFLPESINALDALHKMQKLEDPMVLVIDQYGVCSGIATIEDITSVLVEETELTQLPVDNLKMQNNAWVADGLTDIHSIMEMFSFTELPGENPDSYNTLGGMAMCVLNKVPQQGDIFEWKNLQFEILSMNGQRVDKVKISKMHSEK

SEQ ID NO: 54167 - DNA, 717 bp, Unknown
  Obtained from environmental sample
  misc_feature (1)..(717): n is a, c, g, or t
ttgaattctttggtgtatatccgacgcttcttagctactgacataataggactccttagaggttattgtgtcttaacttacaatactttttttctaggacggttcatgcttatttacatgggtagaaactatgaaaagatagttgacaaggatggtctttacagcacgaaaaagatgttcataccaaatccagaattcatagtgctgtacaatggagacgatgagtgtcctgacaaacaggttttaaaactttccgatatgttcagcgaaccgctaccaaaaagccttgccaaacttgagcttgtggtgaacgtttacaacataaacaagggcaggaacgaggaatttgcaactcgcagtgaaaaattgaaaggctatgaaatttttatatatttaataaaagagtatgttaagttgatggatagggacagtgctataaagcgagccattggtgattgcatacgtcaagatgtgcttagggattttttgaaggaacatggatcggaggtacataatatgttgttgagcgaatggaactgggatgatgccaagcgtgtttggcagaaagaagccagagaggatggtctggaagaaggtattggtaagggcattggcattggtcgcaatgcggagcgaggagaaattctcaatcttataaagcaaggctataatctagcggatattgaaaatatgcttaaagcacagctcgaatgctga

SEQ ID NO: 54168 - protein, 238 aa, Unknown
  Obtained from environmental sample
  misc_feature (1)..(238): Xaa is any amino acid
MNSLVYIRRFLATDIIGLLRGYCVLTYNTFFLGRFMLIYMGRNYEKIVDKDGLYSTKKMFIPNPEFIVLYNGDDECPDKQVLKLSDMFSEPLPKSLAKLELVVNVYNINKGRNEEFATRSEKLKGYEIFIYLIKEYVKLMDRDSAIKRAIGDCIRQDVLRDFLKEHGSEVHNMLLSEWNWDDAKRVWQKEAREDGLEEGIGKGIGIGRNAERGEILNLIKQGYNLADIENMLKAQLEC

SEQ ID NO: 54169 - DNA, 309 bp, Unknown
  Obtained from environmental sample
  misc_feature (1)..(309): n is a, c, g, or t
atgtcagtagctaagaagcgtcggatatacaccaaagaattcaagcaagacgcattgaatttatcagagcagcccggctatacagcagttcttgcggccaaaaacctcggcattcccgagggattactatataaatggcgaagcgcggctgcgaaatccggtcctctagccttccctggaaacggcaaagaagcactcacagatgcagaaagagagaatagggagctgcggaaacgccttaaggatgttgagatggagagggacatcttaaaaaaagcagtgggcattttctcaaaagtaccgcaatga

SEQ ID NO: 54170 - protein, 102 aa, Unknown
  Obtained from environmental sample
  DOMAIN (7)...(90): Transposase
  misc_feature (1)..(102): Xaa is any amino acid
MSVAKKRRIYTKEFKQDALNLSEQPGYTAVLAAKNLGIPEGLLYKWRSAAAKSGPLAFPGNGKEALTDAERENRELRKRLKDVEMERDILKKAVGIFSKVPQ

SEQ ID NO: 54171 - DNA, 555 bp, Unknown
  Obtained from environmental sample
  misc_feature (1)..(555): n is a, c, g, or t
atgcacctgtccggcgtggccaccttgacggcccgctatgtcgaggccgtgggccgggcccgggcccccgcggtggtggtggatacccgcaagaccaccccgggcctccggtttttggaaaaggcggccgtgcgccacggcgggggccgcaaccaccgcttcgccctttacgacggcctgctcatcaaggacaaccacatcgccgccgtgggctcaatcacccgggccgtggacctggcccgggccgccgcgccccacaccctgaaaatagaagttgaggtggataccttggaccagttgaaggaagccttggccgctggggccgaggtggtgcttctggacaacatgaacccggagatgctccgactggccgtggccctgaccgaggctttttacgcgccaggggcccgccggactaagctggaggcttccggaggcgtcactttggcgaccatcggcgaggtggcgaaaaccggggtggacctgatttccgtgggcgccatcactcattccgcccccgcggcggacctgggcttggattgggaatgttcctga

SEQ ID NO: 54172 - protein, 184 aa, Unknown
  Obtained from environmental sample
  DOMAIN (6)...(180): Quinolinate phosphoribosyl transferase, C-terminal domain
  misc_feature (1)..(184): Xaa is any amino acid
MHLSGVATLTARYVEAVGRARAPAVVVDTRKTTPGLRFLEKAAVRHGGGRNHRFALYDGLLIKDNHIAAVGSITRAVDLARAAAPHTLKIEVEVDTLDQLKEALAAGAEVVLLDNMNPEMLRLAVALTEAFYAPGARRTKLEASGGVTLATIGEVAKTGVDLISVGAITHSAPAADLGLDWECS

SEQ ID NO: 54173 - DNA, 1071 bp, Unknown
  Obtained from environmental sample
  misc_feature (1)..(1071): n is a, c, g, or t
gtgaatatgaaaaaagttctcttttttctcgccttcttgttgttccttgtcgtttcttgttcaaatgaaaacaacagcggacaaaacgggcaaaatggactgggtgattcttcatcctctgattttgatttaattagcagttctagcgcagtagcttcttctagctcccgtgttagcagttccagcagtgcaatgcagagcagttctagcattgaaatgcagagcagttccgatggcggcgatgcaatgcatagtagttccagcagtgcaatgcagagcagttctagcattgaaatgcagagcagttccgatggcacaacgcagggcggcggtggcttaacatgccaagacccagtaaatgccgcagccacagattattcagatcctaagaactggagtgtttataccgatgccgacaaactcaccaaagacgttgatatattcttgctatatcccacatcaatacagagttctgccgcagaagattgtccttatgccaacataaacaattcctcaatgcgcaggatggtagatcaatggtatagtggggttaaaacagtagtcacatctcatgcaaacgtctatttgccgtattaccgacaagctaatgtattcggctctggatgttctggtgctaatatgactggcggggctgctatggaagacgttattgcatcgttccaatattacttaacccatataaacaagggtcagcgtccttttatgacgttaggcttttctcagggttcatctccattatgggagctggctgaaaaccgttttgaaaaaatctgtggcactgaatttggtgctgctacccgcaaaaatcacatagttacgtatgcagcgggcatacctgggcgccaaacaatttcagcaagcaagccagtcaagttctctacaagctacaacgacatcaacgttatcacatcttggaatccctaccaggaagcagatactgcctgtgctacgaatcaattgggtgtgagggcaatgagcggtcccactacgaacccgatcacgtggacaatagaggaagactatcacttaatgcgggaaatccgaagttga

SEQ ID NO: 54174 - protein, 356 aa, Unknown
  Obtained from environmental sample
  SIGNAL (1)...(25)
  misc_feature (1)..(356): Xaa is any amino acid
MNMKKVLFFLAFLLFLVVSCSNENNSGQNGQNGLGDSSSSDFDLISSSSAVASSSSRVSSSSSAMQSSSSIEMQSSSDGGDAMHSSSSSAMQSSSSIEMQSSSDGTTQGGGGLTCQDPVNAAATDYSDPKNWSVYTDADKLTKDVDIFLLYPTSIQSSAAEDCPYANINNSSMRRMVDQWYSGVKTVVTSHANVYLPYYRQANVFGSGCSGANMTGGAAMEDVIASFQYYLTHINKGQRPFMTLGFSQGSSPLWELAENRFEKICGTEFGAATRKNHIVTYAAGIPGRQTISASKPVKFSTSYNDINVITSWNPYQEADTACATNQLGVRAMSGPTTNPITWTIEEDYHLMREIRS

SEQ ID NO: 54175 - DNA, 834 bp, Unknown
  Obtained from environmental sample
  misc_feature (1)..(834): n is a, c, g, or t
gtgctgccggcccgtgtccgtgcccccaaggacaaagccactgtggaagggaatgccggcgttatctcaacctggattaccgccgcattacgaaaccagcagtttctttccctgcgggaactcaataccgctatccgctctaagctggcggagtttaataccaagccgtttcagaaaaaagagggctcatgggcaatggtgttcgaggaggaacgcctgtttctgctctccttgccggaatatccctatgaattggcggtatggaaaatcgccgccgtccaatttaattaccacataaccgtggaaggcgggaattattcagttccctatgagtatatcaagcaaaaggtcaatgtccgcctcaccacgcggcttgtagaggtgtttttctcagaaaacaggattgcaagccacccgcgcttatacggaagacccggtcagtacagcacttacgaggaacatatgcctaagaaccaccgggaatatatcacctggaacggtgaacgatttctttcttgggccgggaaaataggggaacatacaaaaactgttgttcggttcctactctcccgaaaccagatagaacagcagggctataaagtctgcatggccctgctgaaactatccgattcctattccgccttgcgcctggaacaagcctgtaaaagggctctctcgttcaccgagcgtcccagtcttaaaagcattcagattatcctcaaatcaggccaggatagtctgccccgcagtgagcccgctccaagtctcccagaaacatccgagcgcgccttcacccgcggcagggattatttcaaacggaaggaggaagaataa

SEQ ID NO: 54176 - protein, 277 aa, Unknown
  Obtained from environmental sample
  misc_feature (1)..(277): Xaa is any amino acid
MLPARVRAPKDKATVEGNAGVISTWITAALRNQQFLSLRELNTAIRSKLAEFNTKPFQKKEGSWAMVFEEERLFLLSLPEYPYELAVWKIAAVQFNYHITVEGGNYSVPYEYIKQKVNVRLTTRLVEVFFSENRIASHPRLYGRPGQYSTYEEHMPKNHREYITWNGERFLSWAGKIGEHTKTVVRFLLSRNQIEQQGYKVCMALLKLSDSYSALRLEQACKRALSFTERPSLKSIQIILKSGQDSLPRSEPAPSLPETSERAFTRGRDYFKRKEEE

SEQ ID NO: 54177 - DNA, 741 bp, Unknown
  Obtained from environmental sample
  misc_feature (1)..(741): n is a, c, g, or t
atgtttaccgaaaacaccttaacaaaattgcatgaaatccgtctaggcgttatggctgatcgtttccgccagcaaacgcttgaccctgctatgaacggcctggcttttgaggaacggttcggcctgttagttgacgccgaatggtccgcccgtaagtcaaaccgtctgaaacggatcattaagaacgccaattacgctatttcaggcgcctgtgtcgaagatattgcctaccattccgaccggaagctggataaaaccctgattgcaaggctcgcctgctgttcctatattcatgaaaaccacaacgtcattatcatgggagccaccggtgttggaaaaacttatcttgcatgcgcattaggcatagcagccaaccgtaatttctttgcaaccaagtatacgagactcccggatcttttcagcgacttggcaatcgcccgggcagacggaacataccgaaaagtgataaagcaatatacccaagcaaaacttctcattctggatgaatggctcttgtttcctcttacggaaatagaaagccgtgaccttctggaaattatcgaagcaaggaataaccaaggttccacggtcttctgttcccagtttgatgttggtgagtggtatccaaaaataggggaacctatattggccgaagcggtctgtgaccgcattgttcacaactcgtatacgatcgtactttctggggattctatgcgaaagagaaagggcatagctgagtaa

SEQ ID NO: 54178 - protein, 246 aa, Unknown
  Obtained from environmental sample
  DOMAIN (23)...(52): IstB-like ATP binding N-terminal
  misc_feature (1)..(246): Xaa is any amino acid
MFTENTLTKLHEIRLGVMADRFRQQTLDPAMNGLAFEERFGLLVDAEWSARKSNRLKRIIKNANYAISGACVEDIAYHSDRKLDKTLIARLACCSYIHENHNVIIMGATGVGKTYLACALGIAANRNFFATKYTRLPDLFSDLAIARADGTYRKVIKQYTQAKLLILDEWLLFPLTEIESRDLLEIIEARNNQGSTVFCSQFDVGEWYPKIGEPILAEAVCDRIVHNSYTIVLSGDSMRKRKGIAE

SEQ ID NO: 54179 - DNA, 318 bp, Unknown
  Obtained from environmental sample
  misc_feature (1)..(318): n is a, c, g, or t
atgaagtataattttgatgaagtaatagacagaagcaattcttacagtattaaatacgagcctacatggcgcgggaagcctgcggacgttcttcctttgtgggtcgcggacatggattttgctacaccgccttgcgtgcaggaggcgcttgtacagcgcgccagacatggaattttcgggtactcggagccggacgcggagtattttgacgttatacgcaagtggttcgaggagcgctttaactggtcgccgcagcgggaatggcttatgattacgccgggagtggtaaacgcgctgtatatcgcaatccgcgcgtaa

SEQ ID NO: 54180 - protein, 105 aa, Unknown
  Obtained from environmental sample
  misc_feature (1)..(105): Xaa is any amino acid
MKYNFDEVIDRSNSYSIKYEPTWRGKPADVLPLWVADMDFATPPCVQEALVQRARHGIFGYSEPDAEYFDVIRKWFEERFNWSPQREWLMITPGVVNALYIAIRA

SEQ ID NO: 54181 - DNA, 978 bp, Unknown
  Obtained from environmental sample
  misc_feature (1)..(978): n is a, c, g, or t
atggatataagcacaatatgcgtacatggttgtgaaaaaaaattcgatacaaccggcgcgatcgccgtcccgatattcgcgtcggcgacgttctcgcatcccggggtggggaagagcacgggtttcgactattcccgtacgctcaaccccaccaacgtgcacntggaagacaccgtagccgcactggaagggggcagcaacgtcggcagcattactgccgtggcgttttcttccggcatggcggcggtttcggctttgatggaactgttttcgcccggtgaccatattatcgcatccgatgacctatatggtggtactgtccgcctttttacgcatatatcccaaaaaaacggtgtaaaggtttcttatgccgctacacaggaagatatagaaagaaaaatcaccccatccacaaaagccgtatttgtggaaacaccatccaatccgatgatgcgcgtaactgacattgcggcggtcgcggctattacaaaaaaaaataacgcgcttcttatcgttgacaacacattccttacgccgtatttccaaaagccgttttctcatggggcggatattgttctgcacagcggaacaaaatatttaggcgggcataatgatactattgcgggcctgttggttgtaaaggatggcggccttgcggaaaaaatcaggttcatcgcaaaaacaaccggcggctgcctttcgccttttgacagtttcctgattattcgcggcatcaaaacgcttgccgttcgcatggaacgtcaacaggagaccgccctgaaaatcacgcactggcttttggaacaaagctcggtaaaaaaagtgtattaccccggattgaaggaacaccccgattacgaaatatcccgccggcaggcaagcggctttggcgccatgatttctttttctgtacacagcggacaaacagcgaaaaagatactggaaagcgtaaaagttataaaatacgccgaaagttag

SEQ ID NO: 54182 - protein, 325 aa, Unknown
  Obtained from environmental sample
  DOMAIN (21)...(320): Aminotransferase class I and II
  misc_feature (1)..(325): Xaa is any amino acid
MDISTICVHGCEKKFDTTGAIAVPIFASATFSHPGVGKSTGFDYSRTLNPTNVHXEDTVAALEGGSNVGSITAVAFSSGMAAVSALMELFSPGDHIIASDDLYGGTVRLFTHISQKNGVKVSYAATQEDIERKITPSTKAVFVETPSNPMMRVTDIAAVAAITKKNNALLIVDNTFLTPYFQKPFSHGADIVLHSGTKYLGGHNDTIAGLLVVKDGGLAEKIRFIAKTTGGCLSPFDSFLIIRGIKTLAVRMERQQETALKITHWLLEQSSVKKVYYPGLKEHPDYEISRRQASGFGAMISFSVHSGQTAKKILESVKVIKYAES

SEQ ID NO: 54183 - DNA, 630 bp, Unknown
  Obtained from environmental sample
  misc_feature (1)..(630): n is a, c, g, or t
gtggcagacagtcgacagtttcggcaacatgctctcgccggacaaataggcgcaccgcacagccatttccgtttcgggatagaggggactgcggaagtatcgagcgggccgtacacagaatccggcgaaccgccgcgcatactgctctaccagacagagttgacacgcgcacatcgcggacttatcgatttctacaatgatattaaccgttccgctccgaccgatgttttagatcgtatccaatatttcttacacactgtccacgccagtctgcgctacgagcgcggcgcaacctctaattcaacttcggcggcaaaagcgtttgacataggcgcaggagtctgccaggactatacacaaatattgctcgctatcctgcgccttgacaaaatcccatgccgctacgtcgccggtcttgcctccggttacggcgaaacccacgcatgggtcgaagcttggacaggaaaccggtattgtgccgcagatcccacgcgcgataaactcgtagacgaaggctatatcgccgtctcaaggggacgcgactttaccgacagttccatcgaacgcggaatattcacaggtatatgccgaggaacacagacagtaagtctgaatatggaaatttcgtaa

SEQ ID NO: 54184 - protein, 209 aa, Unknown
  Obtained from environmental sample
  DOMAIN (110)...(164): Transglutaminase-like superfamily
  misc_feature (1)..(209): Xaa is any amino acid
MADSRQFRQHALAGQIGAPHSHFRFGIEGTAEVSSGPYTESGEPPRILLYQTELTRAHRGLIDFYNDINRSAPTDVLDRIQYFLHTVHASLRYERGATSNSTSAAKAFDIGAGVCQDYTQILLAILRLDKIPCRYVAGLASGYGETHAWVEAWTGNRYCAADPTRDKLVDEGYIAVSRGRDFTDSSIERGIFTGICRGTQTVSLNMEIS

SEQ ID NO: 54185 - DNA, 1710 bp, Unknown
  Obtained from environmental sample
  misc_feature (1)..(1710): n is a, c, g, or t
ttggacaaggaaatccttgttccgccttctcccgaactgatgggatgtttcggcgtggcgcttcttgcaaagcgcaagaacgcggacggtctgcttgaagataaaagcatagttatagacgatattattacacgcgagatagggtacgaaagggtctttaagtgccagtcgtgcgaaaatttctgctcaattcaggtgttaaacgtaaacaacaacaagtatatgttcggcgggcgctgtaacaaatatacaaatatgcgcaagaaggtagcggatgtgcctgtttttgactatgtcgagaaacggcagaaaatgctttttgaagaatttgccgctcccaaatttacgccttccgaaacttcaaagaaattctccgttggcataccgcgcgccctttccacccatacgctgtatccgctttattcgtggtttttccacgagcttggaataaaaacgcttctttccacagaagttgcccatgagggagtcgcccgcgccgagtcaacctactgctttcccgcggaaatcgcccacggcgcggtgcaggactgtcttgataaaaatgttgactatgtgctgctgccgcacttcagggatatgcccagttacgaggaaaaagttcacgcaaacttttgcccgattacgcagggacttccgtattatatagaaaaggcgttcccggatattgataaaaaccgctggcttccgcttgttgtaagttttaagtacggcgaaggaaaagcactggaactgttttgcgaaatgacaaaacgccttgatattaacgaagaagagacaaagatcgcctttgacaaggcgtgggcaaaacagcaggcgtattttgatgccgttcagaaaatgggcgtagaggcgcttgaagaagcgcgaagatcaagccgcccgaatatttgtacgcttggaaggccctataacgcctttacgccggaagcgaacatgggcataccgcgcaagttcaccacgcgcggttattcgatcattccctttgatattctgcctttccacgacgaggttatattccccaatatgtactggtattacgggcaacaggatttgaaggccgcgaacctcttaaaaaaagaggataatatttatcttagctttattaccaatttttcctgcgcgccggattcatttatcctgcattacgttaaatggatgatgggccagaagcccttcctcgtgctggagcttgattcccattcagccgacgcgggcgtggacacgagggtggaggcgttcctcgacattattgacggctaccgcgccaagaaaaacgagcttgaggcggagcgttttgacaacggctggcgcttcatttccgagaaaaaggatgacgggaaattcgacctgcgtatcgacaacgtgaaaagcggagagaaggtttctgttatcgggagcaagcgggtgaaggtgcttctttccaatatgggcgccatttcaaccgagtatgtgggcgcggctctccgcagccagggcgtaaacggggaggcgcttcctgtggctaccgctaaaacgatacaaatcgcccgcgctcacgcttccgggaaagagtgcgtccccagccatctggtattgggcagcgccctggaattctttttcagcgataaataccgcaaggacgagttgtatctgctctttgtccccataacaaccggcccctgtagaacgggtcagactactcgtccataa

SEQ ID NO: 54186 - protein, 569 aa, Unknown
  Obtained from environmental sample
  misc_feature (1)..(569): Xaa is any amino acid
MDKEILVPPSPELMGCFGVALLAKRKNADGLLEDKSIVIDDIITREIGYERVFKCQSCENFCSIQVLNVNNNKYMFGGRCNKYTNMRKKVADVPVFDYVEKRQKMLFEEFAAPKFTPSETSKKFSVGIPRALSTHTLYPLYSWFFHELGIKTLLSTEVAHEGVARAESTYCFPAEIAHGAVQDCLDKNVDYVLLPHFRDMPSYEEKVHANFCPITQGLPYYIEKAFPDIDKNRWLPLVVSFKYGEGKALELFCEMTKRLDINEEETKIAFDKAWAKQQAYFDAVQKMGVEALEEARRSSRPNICTLGRPYNAFTPEANMGIPRKFTTRGYSIIPFDILPFHDEVIFPNMYWYYGQQDLKAANLLKKEDNIYLSFITNFSCAPDSFILHYVKWMMGQKPFLVLELDSHSADAGVDTRVEAFLDIIDGYRAKKNELEAERFDNGWRFISEKKDDGKFDLRIDNVKSGEKVSVIGSKRVKVLLSNMGAISTEYVGAALRSQGVNGEALPVATAKTIQIARAHASGKECVPSHLVLGSALEFFFSDKYRKDELYLLFVPITTGPCRTGQTTRP

SEQ ID NO: 54187 - DNA, 462 bp, Unknown
  Obtained from environmental sample
  misc_feature (1)..(462): n is a, c, g, or t
gtggttggggttgagctttgcggcagcattaaaaacatcatagccatagcaggcggaattatagacggtcttggaattggagttggcgacaacacaaaagccgcactgataacaagggggcaagcggaaattcgcaggcttggcgaggttcttggagcaaacccactaacctttgcgggtcttgctggcattggcgacttgattgtgacttgtatgtctcatcatagcagaaaccgttttgttggcgagcaaataggcaagggcaaaacattgaacgatattttgtcgcatataaaaatggtagcagaaggcgttccaacagcacgtagcacttatgcccttgctcaaaaagttggagttgaaatgcctatagtcaacgcggtttatgaggtgctttttgaacaaaaagaccctcgcaccgccattgaagagctaatgactagggagttgaagtctgagtaa

SEQ ID NO: 54188 - protein, 153 aa, Unknown
  Obtained from environmental sample
  DOMAIN (1)...(145): NAD-dependent glycerol-3-phosphate dehydrogenase C-terminus
  misc_feature (1)..(153): Xaa is any amino acid
MVGVELCGSIKNIIAIAGGIIDGLGIGVGDNTKAALITRGQAEIRRLGEVLGANPLTFAGLAGIGDLIVTCMSHHSRNRFVGEQIGKGKTLNDILSHIKMVAEGVPTARSTYALAQKVGVEMPIVNAVYEVLFEQKDPRTAIEELMTRELKSE

SEQ ID NO: 54189 - DNA, 1560 bp, Unknown
  Obtained from environmental sample
  misc_feature (1)..(1560): n is a, c, g, or t
atggacataaaacaaactccaaaaggattgctcctcgcttatgtgacataccaaaacagggataaaaaaggcaagccatattttgacatagccatagcagacacaaatggcaaatcgcatttagccacaaaattcgcagacgcggtttatcccgatatttccccagacggaaagcgagttgttttcgcaaggagagaagcaaatggaaccagattccacctctccatagcaaatacagactcattaagcgactacaaagacatagttgatccggtgacggcagaattcaatatcttcaatcccaaattctccccagacggagaaaaaataacattcagctattttgatggcaccaagcgacaaataggatttgcaaactttgatgcggaaggatgggagggtcgagacccttcttggagtgcagacggaaaaagcatttattattccagcgatgaaactggaattttcaatatatacaaaaaaaacttggaaactggcgaaacaaaaaaaataacaaatgtactaggcggtgctttttccccgcttgaaaaaaaagattctctattttacataaactacgacagagacggattttctatttatagaattgaaaataattcttttgcggcacaccccgtcagctacgctgccaccccactaaaagcggggacttttgcatcagacgaaatctcttttgcaaattcagagcgttcgtaccttcccattccacgaatgccaattcttgtgcctttatttgcttttgaagaccgttcgccagattttggtgcggtgaatacaggggttatggttccgaaagctgggcttgcttttgggttgaacgatcctttgaataaaaattttttccaagcggctgctttgcagcaaataggaaaatttggcgaagacagccagagtgatttgcttgcaagtttggaaaatcgcagttttccaattacactggacctagcatttacgcgaagcaacaccgtttcaaaagacacagtgcgctacgaagatccgcgcagccatgaggattctctggcgataagcgaatacgcatctgaactttacaatgcttcgctctctgcttcttattcgcttttcaaaaaaggagattctttaaccttattcacctcttacgactgggaagcctttaatctttatcaagacatttttagatgggattatcacaaaagatggcaggcgggtttaatagcgggtttaacagtattggatagccttttgaatttgcaaggtttatattctttttccaaatctaatttatttagacccggaacttttgccgagagtttttcggttagtgatgccggtgcaataattccgcattacaggcatttcaatttgcacgagtgggctggttttgcaaaaattaaaatcagcaaactttccttttctttttttggcagtggaattttggattggaaaagcaaggattcagatactttggataatttttatttgcatccgcttgttattgacggttatcctattttgaaaaacagcgagagttattttaggcaaggaacaggaaccatttag

SEQ ID NO: 54190 - protein, 519 aa, Unknown
  Obtained from environmental sample
  DOMAIN (123)...(160): WD40-like Beta Propeller Repeat
  misc_feature (1)..(519): Xaa is any amino acid
MDIKQTPKGLLLAYVTYQNRDKKGKPYFDIAIADTNGKSHLATKFADAVYPDISPDGKRVVFARREANGTRFHLSIANTDSLSDYKDIVDPVTAEFNIFNPKFSPDGEKITFSYFDGTKRQIGFANFDAEGWEGRDPSWSADGKSIYYSSDETGIFNIYKKNLETGETKKITNVLGGAFSPLEKKDSLFYINYDRDGFSIYRIENNSFAAHPVSYAATPLKAGTFASDEISFANSERSYLPIPRMPILVPLFAFEDRSPDFGAVNTGVMVPKAGLAFGLNDPLNKNFFQAAALQQIGKFGEDSQSDLLASLENRSFPITLDLAFTRSNTVSKDTVRYEDPRSHEDSLAISEYASELYNASLSASYSLFKKGDSLTLFTSYDWEAFNLYQDIFRWDYHKRWQAGLIAGLTVLDSLLNLQGLYSFSKSNLFRPGTFAESFSVSDAGAIIPHYRHFNLHEWAGFAKIKISKLSFSFFGSGILDWKSKDSDTLDNFYLHPLVIDGYPILKNSESYFRQGTGTI

SEQ ID NO: 54191 - DNA, 453 bp, Unknown
  Obtained from environmental sample
  misc_feature (1)..(453): n is a, c, g, or t
ttggccgaagacgctatccgcgccgggcttaacaacttacaaatccccgcccgctttgaaaaaatagggcctgattttataattgacggcgctcacacgtcggagagtcttgctcttgccatagaaaccttttgtctgctttacggcgaaggcggcgtacttgtcttcggctgcgccgccgacaaagacgcgacggcaatggcaaaaacagcgcattcccgttttgcgaaaatttttataactactccgggaacttttaaggcgagcaacccaccgcaggtttacgaagccttcgcgtcgcaagcaacgggtcaggaaaagacgcggctaatcgcggatacgagggaggctgtggaggaagcgatggaatttgcggcgaagaataaattgccgattttggggacaggttctttttatttggtctcagaaatacggaaaataattttaccttga

SEQ ID NO: 54192 - protein, 150 aa, Unknown
  Obtained from environmental sample
  DOMAIN (15)...(96): Mur ligase family, glutamate ligase domain
  misc_feature (1)..(150): Xaa is any amino acid
MAEDAIRAGLNNLQIPARFEKIGPDFIIDGAHTSESLALAIETFCLLYGEGGVLVFGCAADKDATAMAKTAHSRFAKIFITTPGTFKASNPPQVYEAFASQATGQEKTRLIADTREAVEEAMEFAAKNKLPILGTGSFYLVSEIRKIILP

SEQ ID NO: 54193 - DNA, 867 bp, Unknown
  Obtained from environmental sample
  misc_feature (1)..(867): n is a, c, g, or t
atggaatttttgacgcggatggcaggggagccgcacaaacttattccttccattcatattgcgggatctaaggggaaggggtctgtgacggggatgtcggcggctatgttatccgcggcggggtaccgtgttgggcgttatatgtcgcctcatgttgttgatatacgcgaaaggatttgctttaacgattcttattttagcgaagatgtttactgcgcggcgggtaatgaattgcgggatattgcggaaagactgcctttggcggcaaatcctctttttgacccttctgcccccgacgggtgcgagcctacttattttgaacttttaactctcttcttttttctttgcgccaaacacgggaactgtaacgtaatggttgtggagacgggtatgggcgggcggctggattctaccaatgtgctggatccgctgttaagcgtaataacattaatcgaattggaacatacgggctttttgggcgatacaatcgcgaagatagcggcggagaaagcggggatagttaaacagagcaagccgctggttttggctaagcagagcgaagaggcttttgaaatttttaagaagaccgtgaaagaaaaaaacagccctttaatttattttccggaagcgcttgaaatttccaacttaaaaatttctcccgaaggcacgaactttactctctgtttaaaaagtccgctcttccccgctccgctgtccctctttattcccgtgcccggaaaggtgcaggctgaaaacgccgctcttgccgttgccgccgtaaaaaccgccttccccgcagattggccgaagacgctatccgcgccgggcttaacaacttacaaatccccgcccgctttgaaaaaatag

SEQ ID NO: 54194 - protein, 288 aa, Unknown
  Obtained from environmental sample
  DOMAIN (18)...(260): Mur ligase middle domain
  misc_feature (1)..(288): Xaa is any amino acid
MEFLTRMAGEPHKLIPSIHIAGSKGKGSVTGMSAAMLSAAGYRVGRYMSPHVVDIRERICFNDSYFSEDVYCAAGNELRDIAERLPLAANPLFDPSAPDGCEPTYFELLTLFFFLCAKHGNCNVMVVETGMGGRLDSTNVLDPLLSVITLIELEHTGFLGDTIAKIAAEKAGIVKQSKPLVLAKQSEEAFEIFKKTVKEKNSPLIYFPEALEISNLKISPEGTNFTLCLKSPLFPAPLSLFIPVPGKVQAENAALAVAAVKTAFPADWPKTLSAPGLTTYKSPPALKK

SEQ ID NO: 54195 - DNA, 567 bp, Unknown
  Obtained from environmental sample
  misc_feature (1)..(567): n is a, c, g, or t
atgccaataccgattagacagattccggctaacctgttggttcccggacagtacaacgagatcgacaattcccttgcgggttcgcagggcgatgtcaaaaaggctttgatgataggctacaagcttgccacatcggaagccgaagacgggaagccggtcaacgtgctttcggcggcgaaggctcaccagcttttcggatacggaagccccgtcgcgattatggcggagacgttcctttctctcaacaaagttgaggaattgtacgtgcttcccattcccgaacctacggctggaaccgcatggaaaaaacggtttacggttagcggaactgcggcggctgccggagcatttcacattgcgataaacggccgcaattttgaagcggcaatttcagcaggagcaaacacggaagccgtagccgctgccataaccgccagaatcaactcggagatcactcttcctgttatcgcagatgcggatgccggaattgttacagtttcggctaacgtggaaaggagaggtagggaaatttcaacagtggtcttcattgcacccggtgggccttaa

SEQ ID NO: 54196 - protein, 188 aa, Unknown
  Obtained from environmental sample
  DOMAIN (3)...(187): Bacteriophage Mu tail sheath protein (GpL)
  misc_feature (1)..(188): Xaa is any amino acid
MPIPIRQIPANLLVPGQYNEIDNSLAGSQGDVKKALMIGYKLATSEAEDGKPVNVLSAAKAHQLFGYGSPVAIMAETFLSLNKVEELYVLPIPEPTAGTAWKKRFTVSGTAAAAGAFHIAINGRNFEAAISAGANTEAVAAAITARINSEITLPVIADADAGIVTVSANVERRGREISTVVFIAPGGP

SEQ ID NO: 54197 - DNA, 471 bp, Unknown
  Obtained from environmental sample
  misc_feature (1)..(471): n is a, c, g, or t
atggcaaaagaaataaagagcggcgtaacattatcgcttaaagatttattttcacagggcatgaacaaagccgccggcgcggcttcaggttttgccggcaagacgctcggctcgattgaaaaagtagacaaagctatttccggcactaccgcaaaacttgcggcctttggtttaacgctgtctgtcggcgctgccgctaaaggtgttattgagatggatcatcgcatgacacggcttggcttatcggtgaatgcttctgctgaaaaaatctcaaaaatgaaaaaaactatttttgatgtcgctcaagctgcggatgttaagattgatcccacaagcattttaagtgggattgaagttataatctcaaaaaccagtaatctaaaatatgccgaggataacataagaaatattgctctagcaattcaggcaacaggtgaatctcccgaatcaatagcggaacattttttctga

SEQ ID NO: 54198 - protein, 156 aa, Unknown
  Obtained from environmental sample
  misc_feature (1)..(156): Xaa is any amino acid
MAKEIKSGVTLSLKDLFSQGMNKAAGAASGFAGKTLGSIEKVDKAISGTTAKLAAFGLTLSVGAAAKGVIEMDHRMTRLGLSVNASAEKISKMKKTIFDVAQAADVKIDPTSILSGIEVIISKTSNLKYAEDNIRNIALAIQATGESPESIAEHFF

SEQ ID NO: 54199 - DNA, 360 bp, Unknown
  Obtained from environmental sample
  misc_feature (1)..(360): n is a, c, g, or t
atgaaacttgaaagagtacagcgcgttatttcggcgacgttaggtgaattgccgattcaggaaaaaggggcgactttcaaaccggccggagtgaaacgtgaaacaaaagcgggtgaagtgccggagaacaccggctacaccgaaagccagacctttgccgaattgaagctgaagctcaacgctacgggttcgctcggtgttgaagagctttctaaacaaggcgaagacacactcacaattttcactacaggcggaaaacagtacatgatgccccgcgcatgggtaaccgaacctggcgaacttggcgacgctgaaatggacatcacctacaattccggaaccagtccgaggttaaaatag

SEQ ID NO: 54200 - protein, 119 aa, Unknown
  Obtained from environmental sample
  misc_feature (1)..(119): Xaa is any amino acid
MKLERVQRVISATLGELPIQEKGATFKPAGVKRETKAGEVPENTGYTESQTFAELKLKLNATGSLGVEELSKQGEDTLTIFTTGGKQYMMPRAWVTEPGELGDAEMDITYNSGTSPRLK

SEQ ID NO: 54201 - DNA, 849 bp, Unknown
  Obtained from environmental sample
  misc_feature (1)..(849): n is a, c, g, or t
gtgatggcgagagcgttatttagccggagcaacgcggaggcggtagccgccgccatcaccgccagaatcaacgcggagattacccttccggttatcgccgaggctgaaaacggcattgttacagtttcagctaacgtgaagggggagacgggaaattacaacagcgtttttatcaactctatagcagccggtatttccatcgaggaaaccgcgtctacagccggaaccggcgttaccgacatcaaatcgtttcttaaagggcttggcgaagttcgctacaactttatcgcaagcgattttaacgacaccggaaatatccgtgcaagctccgatgagcttgaatcccgctacggcgcgatgaggcagatcggcggcagaatgtatatcgccctttccggtgagttgggaagcaaaaccgacgtaggtacaatgttggctaaagccggtgaagtaaattcacctcacattattcttattccaagaagcgttaatcccgaacttccatgcgtctgggcggcggcatggtgcgcggtcgcctgccgtattcttgccgatgatccctccgccaacacttacgacactaaaatacccggcttaatcggaggcgtagaatttaacgctgacgaacggcagaaactcctcgaagccggtattgtaacctaccgtttggatacaaccggcaatgtgcttattgaacggcttgtaaccagttacacagaaaactccgacggcggacgagatacaagttatctcgatgtgcaagttaccgaaacggtagacgctgttcgcacatacatcaacgccgaggcgaagaaacggttcaaaacatggaaaactggcaagtactga

SEQ ID NO: 54202 - protein, 282 aa, Unknown
  Obtained from environmental sample
  DOMAIN (2)...(280): Bacteriophage Mu tail sheath protein (GpL)
  misc_feature (1)..(282): Xaa is any amino acid
MMARALFSRSNAEAVAAAITARINAEITLPVIAEAENGIVTVSANVKGETGNYNSVFINSIAAGISIEETASTAGTGVTDIKSFLKGLGEVRYNFIASDFNDTGNIRASSDELESRYGAMRQIGGRMYIALSGELGSKTDVGTMLAKAGEVNSPHIILIPRSVNPELPCVWAAAWCAVACRILADDPSANTYDTKIPGLIGGVEFNADERQKLLEAGIVTYRLDTTGNVLIERLVTSYTENSDGGRDTSYLDVQVTETVDAVRTYINAEAKKRFKTWKTGKY

SEQ ID NO: 54203 - DNA, 588 bp, Unknown
  Obtained from environmental sample
  misc_feature (1)..(588): n is a, c, g, or t
ttgtttatacaannggtaaaaaatgtggcacccttgccggataatttgggcgtaaacgatgtgttcccatattttattgtgaacggcttgccaactggtttaacaggtcttttggttgccgcaatttacgctgcggcaatgagcagtatttccagcgcgattcacgcacttggaaacacaacggaaaaagatattctgtgcaaagcctctgggcaagaatccattgcaagaacaaagatatgtattgtgctttggggcattagcggaacccttgccgcttttatcgccgcctcgcaggcaggctcgcttttgaaaaacgccttgtttttcacaggtcttttcacaggtcccttgttagcattatttttgctgtctttttttgctcctcgtttgcgttcatcttctgttttaacaggagttatttgcggaatgctcagcttgcttttattcaataaaattccattccttaattatgtgcctccgctcacaaaatttatagtgttttcttggccctggaatccgcttatttcatgtacggtttctgtaggaatggcgtttttcgtggattttttccgctttaagcgatag

SEQ ID NO: 54204 - protein, 195 aa, Unknown
  Obtained from environmental sample
  misc_feature (1)..(195): Xaa is any amino acid
MFIQXVKNVAPLPDNLGVNDVFPYFIVNGLPTGLTGLLVAAIYAAAMSSISSAIHALGNTTEKDILCKASGQESIARTKICIVLWGISGTLAAFIAASQAGSLLKNALFFTGLFTGPLLALFLLSFFAPRLRSSSVLTGVICGMLSLLLFNKIPFLNYVPPLTKFIVFSWPWNPLISCTVSVGMAFFVDFFRFKR

SEQ ID NO: 54205 - DNA, 663 bp, Unknown
  Obtained from environmental sample
  misc_feature (1)..(663): n is a, c, g, or t
ttggcgattccggctttatcatcgcgcacatcacccggcccggcatcgacgtggcgcagggcaacacccgggcggaaggcatcgaagcgcccccggaggaatgagatgggccagaaaagcgccgtagatcgcctgccgaaaaagctccgcgacaaactgatcgaaatgctccacgaccccgccgtaacgcagttggaaattgtcgatgccataaacgccgaggcgggggagccgctcctttcgagggcgtcgattaaccgctacgcgcaaaaattcaagcgcttcgccgaaaagaaccgccaggctaaagaaatcgccgacgcgtacatcgacaaatacggcagcgacaatcgcgtaaaactcggcaaagtagtaaacgaacaaatacgcttggccgtgtttgatttgatcggcgatattgaagaaatacaggcagacccggaaaccagaaaaaccgaaattgccgacatgctgtataaattatcgcggggtcttaaagaactggaggcggcggaaaagctgaacgccgagcgcaccgaaagcatccgcaaggccgcccttgccgaggccgccgaggttatgtcaaaggaagcgaagtcagccggacttgacgatgacaaaattgagtttatcagacgcaagatgataggcctttgcacatga

SEQ ID NO: 54206 - protein, 220 aa, Unknown
  Obtained from environmental sample
  misc_feature (1)..(220): Xaa is any amino acid
MAIPALSSRTSPGPASTWRRATPGRKASKRPRRNEMGQKSAVDRLPKKLRDKLIEMLHDPAVTQLEIVDAINAEAGEPLLSRASINRYAQKFKRFAEKNRQAKEIADAYIDKYGSDNRVKLGKVVNEQIRLAVFDLIGDIEEIQADPETRKTEIADMLYKLSRGLKELEAAEKLNAERTESIRKAALAEAAEVMSKEAKSAGLDDDKIEFIRRKMIGLCT

SEQ ID NO: 54207 - DNA, 951 bp, Unknown
  Obtained from environmental sample
  misc_feature (1)..(951): n is a, c, g, or t
atgaaacttacctctatccttttttgtctctttgctctttcttgctcgtcttttgacgttgataaaaatatcagcgactcaggcgcgggcagccaaaaaaatatgggtattaatccggttctggtcttcccggacccggaagtcgtttttgttgaccgcccggtattcgtccctcctcaggaacaaccgcctaaagctcaaactccgggaaaaccgtccgtccaggacgccaacaacaagggcattattaaacctcaggattactcccatgccgcaattatctacatttataacccggatgatgtttacgaagtctacgctcagcctcttcgcgtctgtgatttggttttggaacctaacgaaagagttacggaaagaccttacgtctcggacagtgaacgctggttgctcggcgcgggcgtaagctatgaagacggccttcccatacagcacgtttacgttaaaccggaattttacgggatgtccgcttcccttatcatcaataccgacaggcgcgtttacaggattatcctgcgcagttaccaagacatacacatgccccttgtcagatggcgctacaattcaggaatgcccaataattttattccttctccccaaactcaaaccgcaggcaatgatacggggaactctattcccaacatcgacccgcgtttcctttctttcaactaccgcgttaaatacagcctttttaacaaacctgtttggcttcccaatctcgtcttcgatgacggcagtaaaactttcctacagtttcctgaccttgttttgcaaagagaatttcctgcggtttttgaaaatagaaaagatatactcaattatcgcgtaacaggcaacttgattgtcattgataaattaatcgaagaaattaccgttaaaatcgggcgtacagaagttaccattattaaaaagcggggcaaaaatggaagatga

SEQ ID NO: 54208 - protein, 316 aa, Unknown
  Obtained from environmental sample
  SIGNAL (1)...(17)
  DOMAIN (89)...(311): Conjugal transfer protein
  misc_feature (1)..(316): Xaa is any amino acid
MKLTSILFCLFALSCSSFDVDKNISDSGAGSQKNMGINPVLVFPDPEVVFVDRPVFVPPQEQPPKAQTPGKPSVQDANNKGIIKPQDYSHAAIIYIYNPDDVYEVYAQPLRVCDLVLEPNERVTERPYVSDSERWLLGAGVSYEDGLPIQHVYVKPEFYGMSASLIINTDRRVYRIILRSYQDIHMPLVRWRYNSGMPNNFIPSPQTQTAGNDTGNSIPNIDPRFLSFNYRVKYSLFNKPVWLPNLVFDDGSKTFLQFPDLVLQREFPAVFENRKDILNYRVTGNLIVIDKLIEEITVKIGRTEVTIIKKRGKNGR

SEQ ID NO: 54209 - DNA, 828 bp, Unknown
  Obtained from environmental sample
  misc_feature (1)..(828): n is a, c, g, or t
atgatgtcgcaatggtggaagaaatcggttgtataccaaatttatcctcgcagtttctgcgactccaacggcgacggcattggcgatataaacggcattatttttaaacttgattacataaaaaaactgggagccgatgtaatttggatttctccgatttacaaaagccctatgttcgacaacggctacgacatcagcgattacactgccattaatcccgagttcgggacgatggcggattttgatcgccttttaaaagacgcgcacgatcttggtttaaagattgtaatggacttggtcgtcaaccacacttccactcagcacccgtggtttctcgaaagccgaagcggcaaagacaaccccaaacgcgattattacatttggcgggacggcagggacggaagaccgccaaatgactggcaggcatggttcggcggtccggcgtggacgttagatgaaacaacaggtcaatatttccttcaccttttctcgccttatcaacccgacttgaactgggaaaaccccgctacgcgatccgccgtttacgacatgatgcgtttttggctggataagggtattgacggcttccgtatggacgcaatcagtcttatttccaaaccaaaagaatttattgacggcgatataaaaaaacttattcccaatggtccgcgtgtgcatgaatttttgcaggagatgaggcgcgaggtattatcaaaatatgacattatgaccgtaggcgaaacaggcggagtaactattgatgaggcaataaaatacgctaacgcggacggcacagagcttgacatggtgattcattttgacaaatag

SEQ ID NO: 54210 - protein, 275 aa, Unknown
  Obtained from environmental sample
  DOMAIN (13)...(272): Alpha amylase, catalytic domain
  misc_feature (1)..(275): Xaa is any amino acid
MMSQWWKKSVVYQIYPRSFCDSNGDGIGDINGIIFKLDYIKKLGADVIWISPIYKSPMFDNGYDISDYTAINPEFGTMADFDRLLKDAHDLGLKIVMDLVVNHTSTQHPWFLESRSGKDNPKRDYYIWRDGRDGRPPNDWQAWFGGPAWTLDETTGQYFLHLFSPYQPDLNWENPATRSAVYDMMRFWLDKGIDGFRMDAISLISKPKEFIDGDIKKLIPNGPRVHEFLQEMRREVLSKYDIMTVGETGGVTIDEAIKYANADGTELDMVIHFDK

SEQ ID NO: 54211 - DNA, 825 bp, Unknown
  Obtained from environmental sample
  misc_feature (1)..(825): n is a, c, g, or t
ttggacggcggagaatcatttaagtggaatgatcgtaaaatcaatctggttgaattaaaagaggtgttttcacgctggcagaccgtgttgtacggtcgcgcctggaacagcctgtactggtgcaaccacgaccaaccccgcattgtttcgcggcttggggacgaaggtgagtaccgggaaaaatcggcaaaaatgctcgctacctgcctgcactttatgcagggtacgccttatatttaccagggcgaggaacttggcatgaccaacactccttttgctgacataggcgactaccgtgaccttgaaagcatcaacgcgtacaacgagcttgtggtacaggaaaagcgcatcgccagggcggatatgcttcgctatatgcgcctgaaaagccgcgacacctcccgcacgccgatgcactggaacaacgggcctaatgccggattttcaacagggactccgtggattatggttaaccccaattttaaacaggttaacgtcgaaaaacaaacaagccgcagcgattcggtttttgcgtattatcaaaaacttattcaactgcgtaaaaaacttgacattatcacctttggtatttatgaattattactgcccgatgatcctgatctatatgtgtatacccgcaaatacaacaatgaggaactgcttgttatctgcaatttctcgcgcaaggaaaggacattcaccctgcctgaacgttttaccggcgcaaaacagcttatatctaacgagggggattgtaaatctccgctggttttaggaccattcggggctgtagtatactataatgaccaaggaggacaaaaatga

SEQ ID NO: 54212 - protein, 274 aa, Unknown
  Obtained from environmental sample
  misc_feature (1)..(274): Xaa is any amino acid
MDGGESFKWNDRKINLVELKEVFSRWQTVLYGRAWNSLYWCNHDQPRIVSRLGDEGEYREKSAKMLATCLHFMQGTPYIYQGEELGMTNTPFADIGDYRDLESINAYNELVVQEKRIARADMLRYMRLKSRDTSRTPMHWNNGPNAGFSTGTPWIMVNPNFKQVNVEKQTSRSDSVFAYYQKLIQLRKKLDIITFGIYELLLPDDPDLYVYTRKYNNEELLVICNFSRKERTFTLPERFTGAKQLISNEGDCKSPLVLGPFGAVVYYNDQGGQK

SEQ ID NO: 54213 - DNA, 1032 bp, Unknown
  Obtained from environmental sample
  misc_feature (1)..(1032): n is a, c, g, or t
gtgcagttccaccccgaaaccaaacacaccgagggcgggcgcgaaatactcagtaaatttttatacgatgtctgcaaagcttctggcgactataaacttgacgattacatagaaacgcaaacagcccttatgcgaaataaggttggcgacaaaaaggctctgctcgctttgtccggcggggtcgactcgtccgtctgcgcgagccttttatccctggcaatacccgggcagttgacctgcatttttgtcgatcacggcttcatgcgcctaaacgagggcgatgaaatagagcgcgttttttccaaacggaacctgcgctttatccgtgtcaacgctcaaaagcgtttccttgccaaagtgaaaggcgtaacggagcctgagaaaaaacgtaaaatcatcggcgaagaatttatccgcgtgtttgaggaagaatccgcaaaactaggcgatattccttttctggcgcagggaactatatacccggatgtcgtcgaatccggaggcaaatacggcgcggttatcaaaagccatcacaacgtaggcgggcttcccgaaaggcttaagtttaccggaatccttgaaccactgtccgggctttttaaggacgaggtacgcgtcctcggtaaaaaactgaagcttcccgtttcgattgtaaaccgccaaccgtttccgggaccgggccttgcgatccgcgtctccggcgaagtcacggaagaaaagctggaaaccttacgcaaggccgacgcgattctccgcgaagagctggacggtcttaaaaacaggccggatcagtatttttgcgtccttaccggcacacgctccgttggcgttaaaggggacgacaggacatacgatttcgtaatagccgtcagggctgtaaagacggacgacttcatgacttgtgaatacgctccgttgccgcacaagctcttaagccgtatatcttcaaggataacggcggagataccgtccgcgagccgagttgtttacgatattacatcaaagccccccgctacggtagaatgggaataa

SEQ ID NO: 54214 - protein, 343 aa, Unknown
  Obtained from environmental sample
  DOMAIN (252)...(342): GMP synthase C terminal domain
  misc_feature (1)..(343): Xaa is any amino acid
MQFHPETKHTEGGREILSKFLYDVCKASGDYKLDDYIETQTALMRNKVGDKKALLALSGGVDSSVCASLLSLAIPGQLTCIFVDHGFMRLNEGDEIERVFSKRNLRFIRVNAQKRFLAKVKGVTEPEKKRKIIGEEFIRVFEEESAKLGDIPFLAQGTIYPDVVESGGKYGAVIKSHHNVGGLPERLKFTGILEPLSGLFKDEVRVLGKKLKLPVSIVNRQPFPGPGLAIRVSGEVTEEKLETLRKADAILREELDGLKNRPDQYFCVLTGTRSVGVKGDDRTYDFVIAVRAVKTDDFMTCEYAPLPHKLLSRISSRITAEIPSASRVVYDITSKPPATVEWE

SEQ ID NO: 54215 - DNA, 609 bp, Unknown
  Obtained from environmental sample
  misc_feature (1)..(609): n is a, c, g, or t
ttgatgataaaagtaattgattacaaagccggaaacgctccaagcgtgatgcacgcaattacccaccttggacacaacgcggcattcgcccgtcatggagatgagcttgcggatgcgactcatatcttactgccgggagtaggcagcgctggggcaactatggattccctgcgcgagttgaacatcattggagcgctggaagacgcggtcttaaagaaaaagactttttttctcggcatctgtgtcggactgcaagtcctttttcagcacagcgaagaagatgacgcggactgcctcggatggctaaaagggaaggtaactaaattcgacgcctcaaaggtcagggttccgcagatgggctggaacaaggttaactttacgcaaagtcctattaataatgcaaaagaaggttatttttactttgtaaactctttttacgcaaaccctgaaaataaagaagatctgtgggggacggctgattacaacggtcagttcgcggcggctgttcacagggacaatattttcgccacccagttccacgttgaaaaaagcggcaaagcggggctcgctattcttggcggatttcttggccttggtaaagggggctga

SEQ ID NO: 54216 - protein, 202 aa, Unknown
  Obtained from environmental sample
  DOMAIN (32)...(188): CobB/CobQ-like glutamine amidotransferase domain
  misc_feature (1)..(202): Xaa is any amino acid
MMIKVIDYKAGNAPSVMHAITHLGHNAAFARHGDELADATHILLPGVGSAGATMDSLRELNIIGALEDAVLKKKTFFLGICVGLQVLFQHSEEDDADCLGWLKGKVTKFDASKVRVPQMGWNKVNFTQSPINNAKEGYFYFVNSFYANPENKEDLWGTADYNGQFAAAVHRDNIFATQFHVEKSGKAGLAILGGFLGLGKGG

SEQ ID NO: 54217 - DNA, 804 bp, Unknown
  Obtained from environmental sample
  misc_feature (1)..(804): n is a, c, g, or t
atgctgacaaaaagactaatagcctgctttgacattattaaaggcacggtaacaaaagcggtgcagtttcaggacaacataaacgtcgccctcgccgaggaactggcagaaacaatgtacaacgagcagatcgacgaattgatcttttacgatattacggcgagcgctgaaaaacgcgggattgatattgaaaccgtaaaaaaagtcgcacgccgtttgtttattccattcacagtcggcggcggcataaagaacctgcaagatatgtatgaggcgctaaaagcaggagcggaaaaaatcagcgtcgattcgatggctgtcagaaatccgcaaattattactgaaggctccaaagccttcggtgcccaatgcatcgtgctttcgacccaggtaaagcgcacagggcttaccccaagcgggtacgaggtatacatcgacggggcaaggcttgcgacaggcatggatgccatcgaatggataaagcgcggacaggagcttggcgcgggcgaaatatgcgtgaacagtatcgatcgcgacggaaccctttccggctacgatatcgagcttatgaaactggccggagctgccgtgtcggttccgttaatcgcttcgggcggggcgggaaaacccgaacacctgaaggatctttttatcagcacggaagcgcaggcggctataatcagcagtatgctgtattcgccaagacttgaacgaaatttcccggtccgcgagctaaaagactatttgatacaaaacggcgtagccgcacgtccggttctgcccggagaatcaccatgcaaatag

SEQ ID NO: 54218 - protein, 267 aa, Unknown
  Obtained from environmental sample
  DOMAIN (5)...(237): Histidine biosynthesis protein
  misc_feature (1)..(267): Xaa is any amino acid
MLTKRLIACFDIIKGTVTKAVQFQDNINVALAEELAETMYNEQIDELIFYDITASAEKRGIDIETVKKVARRLFIPFTVGGGIKNLQDMYEALKAGAEKISVDSMAVRNPQIITEGSKAFGAQCIVLSTQVKRTGLTPSGYEVYIDGARLATGMDAIEWIKRGQELGAGEICVNSIDRDGTLSGYDIELMKLAGAAVSVPLIASGGAGKPEHLKDLFISTEAQAAIISSMLYSPRLERNFPVRELKDYLIQNGVAARPVLPGESPCK

SEQ ID NO: 54219 - DNA, 324 bp, Unknown
  Obtained from environmental sample
  misc_feature (1)..(324): n is a, c, g, or t
atggcatccatgcctgtcgcaagccttgccccgtcgatgtatacctcgtacccgcttggggtaagccctgtgcgctttacctgggtcgaaagcacgatgcattgggcaccgaaggctttggagccttcagtaataatttgcggatttctgacagccatcgaatcgacgctgattttttccgctcctgcttttagcgcctcatacatatcttgcaggttctttatgccgccgccgactgtgaatggaataaacaaacggcgtgcgactttttttacggtttcaatatcaatcccgcgtttttcagcgctcgccgtaatatcgtaa

SEQ ID NO: 54220 - protein, 107 aa, Unknown
  Obtained from environmental sample
  misc_feature (1)..(107): Xaa is any amino acid
MASMPVASLAPSMYTSYPLGVSPVRFTWVESTMHWAPKALEPSVIICGFLTAIESTLIFSAPAFSASYISCRFFMPPPTVNGINKRRATFFTVSISIPRFSALAVIS

SEQ ID NO: 54221 - DNA, 720 bp, Unknown
  Obtained from environmental sample
  misc_feature (1)..(720): n is a, c, g, or t
atgtataaagaaagcgcattgaaattaacagcattaatcaaagcgaaaaaactcagcgcggtcgaattaacaaaagcgtgcattgacgcagtcgaaaaaaacgacagccgctataacgcgtttttggcgctgtcaaaagaaaaggcattggcacgcgcaaaagaaatccaatcacgcattgacaatggcgagacactctccccgcttgcgggcgtgccaatcgccgttaaagacaatatttccaccgagggaattgaaactacctgtgcgtctaaaatgcttaaagggtatacccctgtattcaacgcgaccgttgtcgagaagctggaaaaagccggtatggttatcatagggaagctcaacatggacgagtacgcaatgggcggctccagcgagaccggagcgtttggcccggtacataatccctgggatctttcgtgtgtcccaggcggctcatcggggggcgccgccgccgccgtagccgcaggggaaattccgcttgcgcttggttcggacacaggcggcagcatacgccagcccagcgccttctgcggcgttacaggcatcaagccgacttacggctcggtgtcgcggtacgggcttttggcttatgcgtcatccctcgataaatcggccctgtcgggcaaaacattgacgactgcgccgctttgctgtcgattatttcggggccggatacgcgcgacagtacctgcgtcatag

SEQ ID NO: 54222 - protein, 239 aa, Unknown
  Obtained from environmental sample
  DOMAIN (22)...(239): Amidase
  misc_feature (1)..(239): Xaa is any amino acid
MYKESALKLTALIKAKKLSAVELTKACIDAVEKNDSRYNAFLALSKEKALARAKEIQSRIDNGETLSPLAGVPIAVKDNISTEGIETTCASKMLKGYTPVFNATVVEKLEKAGMVIIGKLNMDEYAMGGSSETGAFGPVHNPWDLSCVPGGSSGGAAAAVAAGEIPLALGSDTGGSIRQPSAFCGVTGIKPTYGSVSRYGLLAYASSLDKSALSGKTLTTAPLCCRLFRGRIRATVPAS

SEQ ID NO: 54223 - DNA, 792 bp, Unknown
  Obtained from environmental sample
  misc_feature (1)..(792): n is a, c, g, or t
ttgctgtcgattatttcggggccggatacgcgcgacagtacctgcgtcatagaaaagccgtttgaattcggcgaggccccatccggactgcaaggcgtaaagatagggctccctcgcaattatttctcaggcggcattgacgatgaaataaagtcagctgttttggctgccgctaaagaattccaggcgtctggcgcaattatcgaagaatttgaaatgccgctgatggactatatgatccccgcatactacatcatcgcctgcgccgaggcgtcgtcaaatctctcgcggtatgacggtttgaaatacggttaccgtagcgcaaaagctcaatccctttcagaagtgtaccgcctttcccgcaacgagggctttgggctggaagtgaaaagaaggataatgctcggctcgtttgtgctttcatcagggtactacgacgcgtattacaaaaaagctttgcaagtgcgcgcgcttataaaagacgcttacacgcggctgttcaccaaatatgacatgatactttctccggtcgctcccaccaccgcgtacaaaataggcgataacatcggcgatcccatgaaaatgtacatgggggacatttacaccgtgtcgatcaacctggcgggactcccatcggcggcgctcccctgcggatttgacacggcgggtctgccgattggctttcaactgatcggtgacgctttctctgaaagcaaactcatcggcgcggcgcgggtgtatcaagcccgtactaactaccacatgaagagacctgagggcgcgaaaacatga

SEQ ID NO: 54224 - protein, 263 aa, Unknown
  Obtained from environmental sample
  DOMAIN (1)...(241): Amidase
  misc_feature (1)..(263): Xaa is any amino acid
MLSIISGPDTRDSTCVIEKPFEFGEAPSGLQGVKIGLPRNYFSGGIDDEIKSAVLAAAKEFQASGAIIEEFEMPLMDYMIPAYYIIACAEASSNLSRYDGLKYGYRSAKAQSLSEVYRLSRNEGFGLEVKRRIMLGSFVLSSGYYDAYYKKALQVRALIKDAYTRLFTKYDMILSPVAPTTAYKIGDNIGDPMKMYMGDIYTVSINLAGLPSAALPCGFDTAGLPIGFQLIGDAFSESKLIGAARVYQARTNYHMKRPEGAKT

SEQ ID NO: 54225 - DNA, 1491 bp, Unknown
  Obtained from environmental sample
  misc_feature (1)..(1491): n is a, c, g, or t
ttgtatcagcctgttgagattgccgtaaacgtcccttacacgttaatagcctcgcttgccgaacgcaaggattccctccccggcgtgtcgtggaacagcaagcctttgcggaattatgcggatttacgaagcctgtcccatgttgtagggtatgtcggggatattaccagggacgaactgacccagctttacaaccagggctatcagcagggggatacaataggaaagaccgggatagagcggcagtacgatgtgcttctaaggggaaaggacggaagggaaacaaggactgtagacgtgcggggaagaagaatcgccggacaggggacccgcgtccctccggaaacggggaaaaacctggtactgacaatcgacaggcaaatccagacgcttgccgagcaggcgttaggagaaaggatgggcgccgtcgttgtcatgcgccccaatggggaaatattggcccttgtttcatacccctggtttgatcccaatatgtttaccggcacagggcggggacagtacaatattcttgtcagcgatccaaacaaacctttcctgaaccgcgccatacagtcaagttatcccccggcttcaacctttaaggttattatgaccacgggtatacttgccgagaatgtcttccctccggaaaagaccgtggattgcccgggcgagattgattatgggaacaggcagtggcgctgccatgtccgcaagccggggcatggacgcctgagtctggcccgcgccatggcgcagtcatgtgatatttactactggacagtgggccgcgacaacctgggagcggaacggattgtctcgtatgccaaagattacggttttggagcgataaccggcattgaccttcccggcgaaatagagggttttgttcctaccccccagtggaaaacccggcgtttccacgagaagtggctgggcggcgacaccatgaatatgtccatcggacagggttataccctggtaacgccgctccagatggccaacatggtatgtatggtagtgaataacggcaaggtatacaaaccctacgttcttaaagaagtgagggatccggtttcgggggcgatagaacaacagacgatgccggagctgattcataaaagcgatattgatcccaaaatttttgaggctgtccggcgggatatgcggggggtaatcagcgaagggactgcccaatttcccctgaatatcaaaactgttgaaatagccggcaaaacgggaaccggcgaggtcggcttgcctgaccgctggcattcatggtttgccgcctatgcgccctatataaccgataagcccgaagagcagattgtcgtatcaattattgtggaagcggtaaatcaatgggagtggtgggcgccttatgcgtcagcaattatctttcaggggcttttcgcgggagaaaactgcgatgaggcgatacagagtctgggtctgagttatatgattccggcacaggggcgcagagaatga

SEQ ID NO: 54226 - protein, 496 aa, Unknown
  Obtained from environmental sample
  DOMAIN (1)...(109): Penicillin-binding Protein dimerisation domain
  misc_feature (1)..(496): Xaa is any amino acid
MYQPVEIAVNVPYTLIASLAERKDSLPGVSWNSKPLRNYADLRSLSHVVGYVGDITRDELTQLYNQGYQQGDTIGKTGIERQYDVLLRGKDGRETRTVDVRGRRIAGQGTRVPPETGKNLVLTIDRQIQTLAEQALGERMGAVVVMRPNGEILALVSYPWFDPNMFTGTGRGQYNILVSDPNKPFLNRAIQSSYPPASTFKVIMTTGILAENVFPPEKTVDCPGEIDYGNRQWRCHVRKPGHGRLSLARAMAQSCDIYYWTVGRDNLGAERIVSYAKDYGFGAITGIDLPGEIEGFVPTPQWKTRRFHEKWLGGDTMNMSIGQGYTLVTPLQMANMVCMVVNNGKVYKPYVLKEVRDPVSGAIEQQTMPELIHKSDIDPKIFEAVRRDMRGVISEGTAQFPLNIKTVEIAGKTGTGEVGLPDRWHSWFAAYAPYITDKPEEQIVVSIIVEAVNQWEWWAPYASAIIFQGLFAGENCDEAIQSLGLSYMIPAQGRRE

SEQ ID NO: 54227 - DNA, 573 bp, Unknown
  Obtained from environmental sample
  misc_feature (1)..(573): n is a, c, g, or t
atgaaaccgaaagagatacttgaaattgatttttttattcttctgccggtaatagcgctgatggtgcttggcatactgttcatttattcatcgggaacaagttctaccagcgctatggcttccactgaatatatacgccagattatatgggcttctatcggcctgatcattgccctggtattgtcttttgtcaattaccgccgttcttacgaaatcgccctgtacctgtacctttttatcatgattcccctgttgtacacctgcgtcttcgggcgggtggttcacggaacccgctggctgagagtcggcatctttggcattcaggcgtcggaattcgcaaaaattactaccattgtttttctggcgcgttacctgacggacacgcgaatcagcgggcatcctttcaaccgttttttaacatcctgttttatcgtgcttattcccatgggcattgtgctggttcagccggatcttggcacctcgctggtgtttattccaattctgctttgcatgacatttgtcgccggtatatcaacgcgttatatcttctttttaattcctgcattttgctga

SEQ ID NO: 54228 - protein, 190 aa, Unknown
  Obtained from environmental sample
  DOMAIN (10)...(189): Cell cycle protein
  misc_feature (1)..(190): Xaa is any amino acid
MKPKEILEIDFFILLPVIALMVLGILFIYSSGTSSTSAMASTEYIRQIIWASIGLIIALVLSFVNYRRSYEIALYLYLFIMIPLLYTCVFGRVVHGTRWLRVGIFGIQASEFAKITTIVFLARYLTDTRISGHPFNRFLTSCFIVLIPMGIVLVQPDLGTSLVFIPILLCMTFVAGISTRYIFFLIPAFC

SEQ ID NO: 54229 - DNA, 774 bp, Unknown
  Obtained from environmental sample
  misc_feature (1)..(774): n is a, c, g, or t
atgcggcagaaaagttcctcccttattgaggcgcaggttggggaaatggtaacaaagggcggctggcatgaaataagcctttcttccctgtcttccggcgactatgccggcatagacggccttgtggaaaatcttaacgaaaaattcatagatatgcgcgtttctttccagcttccgtcattaaaagtttctggtttctcgctttcgcttttggaaaaaatatccgttacaagaaaaagcggccttacctttgccgttgaaactcccagggaagcgtggcagatgtcccttaacaaggaagttactcttgattcagttactgctattctgaacgaagcgaaaaaacgcggctggaaaacggcaaagttttattttatgataggacttccgcttccttcctctgaaaaaaacgaagaagaggagatcgtcaattttatcgcctgtatcggccgcagaaccaaaatgcattttaacatcaacgtggggctttttgttccaaagccgtatactccttatcaatggtcgccgcagttggacgctgaagaagcggtaaaaaaaattgaatatatacgaagcaacttaaagccgttgggacacaaggtaagcgtcccggacgcgttaatttcccaaatagagggcatattaagcaggggcgatgaaagggcaggccttctttttgaacaggcctatcttgggggctcaaggcttgacgcgtggggcgaatacatagacagggaaaaatggctttcgctcttgaagaaaacaaagaattaa

SEQ ID NO: 54230 - protein, 257 aa, Unknown
  Obtained from environmental sample
  misc_feature (1)..(257): Xaa is any amino acid
MRQKSSSLIEAQVGEMVTKGGWHEISLSSLSSGDYAGIDGLVENLNEKFIDMRVSFQLPSLKVSGFSLSLLEKISVTRKSGLTFAVETPREAWQMSLNKEVTLDSVTAILNEAKKRGWKTAKFYFMIGLPLPSSEKNEEEEIVNFIACIGRRTKMHFNINVGLFVPKPYTPYQWSPQLDAEEAVKKIEYIRSNLKPLGHKVSVPDALISQIEGILSRGDERAGLLFEQAYLGGSRLDAWGEYIDREKWLSLLKKTKN

SEQ ID NO: 54231 - DNA, 846 bp, Unknown
  Obtained from environmental sample
  misc_feature (1)..(846): n is a, c, g, or t
atgtcagaaggtacagccattaataccggaattgttaatcctgttaacgatctgggggcgctgctgttgggggtggaaaaacccgcccgctattgcggcggcgaatacggacgcctcgcccgtacagatgcccctctgcaaacccttatcgcctttcccgacctctatgaaataggaatgtccaaccaggctttgaggattatttacaacggcctcaaccgaatccccggcgtttcctgcgaccgggcctttgcccctgcgccggattttgaacaactgctccgcggccggggcttgccgctgtacggcctggacaccggaatcagtttaaaaaactttgacctcgtgctgtttaccctgggttacgaactggggatttccggcattcttgccatgcttgacgtttccggcattcccctgcgctcagaactgcgcggcgaatctgatccgctactcatagcaggaggacccgccgtgtccaatcccctgccctacagcgcttttatcgacgctttctggataggcgaagcggaagcaggtttttttgatttggcgcaagaattattaacaataaaacaaaacggcggagacaaagccgccctgtttgagcgtataaaaagtcatcctcatatatgggtgaagggaaaagaacgggctgtccgcgccgtggatataagttttgcccggtgggatacagcggaaacggcagtataccccattcccagcatgaagaccgtgcagcaccacggcatactgaaatcatgcggggctgtcccaacggctgccgctttgccacgcaggttactggtacaggcccatgcggcagaaaagttcctcccttattga

SEQ ID NO: 54232 - protein, 281 aa, Unknown
  Obtained from environmental sample
  misc_feature (1)..(281): Xaa is any amino acid
MSEGTAINTGIVNPVNDLGALLLGVEKPARYCGGEYGRLARTDAPLQTLIAFPDLYEIGMSNQALRIIYNGLNRIPGVSCDRAFAPAPDFEQLLRGRGLPLYGLDTGISLKNFDLVLFTLGYELGISGILAMLDVSGIPLRSELRGESDPLLIAGGPAVSNPLPYSAFIDAFWIGEAEAGFFDLAQELLTIKQNGGDKAALFERIKSHPHIWVKGKERAVRAVDISFARWDTAETAVYPIPSMKTVQHHGILKSCGAVPTAAALPRRLLVQAHAAEKFLPY

SEQ ID NO: 54233 - DNA, 1062 bp, Unknown
  Obtained from environmental sample
  misc_feature (1)..(1062): n is a, c, g, or t
ttgattggcggcactttattggatcagattgccgagaaccgcgaaaaattggcggataacatgatcaaaattaatttgataggagccgccaattacgacaaaatgatcttttcgcccgacggacttgatccgaaaaaagtaaaaaaattgcttactgccgccggaaaagttgaaggtacgcaggcaatcgagccgaaccaaaagggcgcaaacgcttttatagaaaaaatggcatcgttcaatcttcccaattcatgcttctgcgattgcaccgccagcgaagatatcgccgccctttacgaaaaaatccttcattattctgtacctattgttacgccgaataaaaaagcaaactcgggttcttatgactattacaaacggcttacaacatattcaagggaaaggggaattccctatctttatgaatgtacggtggcggcgggactgccggttatttctacattacgagaccttttccttgcgggtgataaagttatcaaaattgaagcggtcttgtcgggaacattaagttttatttttaacagcttcgacggctcanaacctttttccgctcttgtgcgcgaggcgaaagagaagggctacacggaacctgatccgagagacgaccttaacgcgatggatgccgcgcgtaaagttttaatcctcgccagagaatgcggtcttaaccttgagtttaagaacgtaaagatcgatcctattctgcctaaagcttgctttagcgctaaaaatatcgacgcttttttcagggaactggaaaaagccgacgccgattttgaaaaacggcgcgctcaggcggcggcggaaggcaaacaactgcgctatgtcgcctcaatagaagaaggaaaagcgaaaatttctttccgcgccgaagaggacggcagtcccttccgttcgctggtggacagcgataatatcgtcgttattaccacaaaccgttattcaaaactcccgatggttatcaaaggaccgggagcgggcgctcaagttacggcgacgggagtattcgccgacattctgcgtacggcgagaactttggtatag

SEQ ID NO: 54234 - protein, 353 aa, Unknown
  Obtained from environmental sample
  DOMAIN (2)...(142): Homoserine dehydrogenase, NAD binding domain
  misc_feature (1)..(353): Xaa is any amino acid
MIGGTLLDQIAENREKLADNMIKINLIGAANYDKMIFSPDGLDPKKVKKLLTAAGKVEGTQAIEPNQKGANAFIEKMASFNLPNSCFCDCTASEDIAALYEKILHYSVPIVTPNKKANSGSYDYYKRLTTYSRERGIPYLYECTVAAGLPVISTLRDLFLAGDKVIKIEAVLSGTLSFIFNSFDGSXPFSALVREAKEKGYTEPDPRDDLNAMDAARKVLILARECGLNLEFKNVKIDPILPKACFSAKNIDAFFRELEKADADFEKRRAQAAAEGKQLRYVASIEEGKAKISFRAEEDGSPFRSLVDSDNIVVITTNRYSKLPMVIKGPGAGAQVTATGVFADILRTARTLV

SEQ ID NO: 54235 - DNA, 1149 bp, Unknown
  Obtained from environmental sample
  misc_feature (1)..(1149): n is a, c, g, or t
atggctatcgctcaaaatataaaaaacgcccttgccggctcttctatgatccgcaaaatgtttgaagaaggcataaatctgaaaaaacagcacggcgaaaacaatgtttttgatttttcgcttggaaatcccgacatagaaccgccgcccgcctttcataaaatgtttgtaaaatcggcgaagaaagacgaaaaaggctctcacgggtatatgccgaacgccggttatctttttgtcagagaagcgctggcgaaaaaagtatgtaaagagcagaatgtcaatatagacggctctcatatagtcatggcggttggagccgccggcggacttaacgccgtcttcaaggcaatctgcaaccagggcgatgaagttatcgtaccccgtccgtactttatggaataccgcgcctacaccgccaaccacggagcgaaacttgtcgaagttgacactcaagaggattttaatttggatatttccgctatcggcgcggcattgaacgaaaaaaccgccgccgtacttataaattctcccaataatccgacagggaaagtttattcagcccaaactcttgcctctctttcttccttgcttacggaacacggcaaaaagacggggcgttttccctatcttgtctcggacgaaccctaccgtgaaatagcgtataacattgatgttccgccgtttttatcctgctataatgaatctatagtagtctcatcatattcaaaaagcctgtccctacccggcgaacgtatcggttttatagcggtaaaccctgcggcaagcgaaaaagacgatcttcttaacgggctaatctacgctacaagaatactgggctttgtaaacgcccccgctttaatgcaaagaatagtagcatccctcacagaagagcgtgttgatgtctcgatttacgcgagaaggcgggacgcttttatgaaagtgttgaataacgcaggcatagaatattccatgccgcagggggcgttctatcttttctgcaaagtcccgaaaagcaaaacaggcaggcaggaaaccgatgataaagcgtttgtagaacatcttaaaaaacatttaattttgggagtgcctggctcgggtttcggcaaaagcggctggcttncgttcgcgtattgtgtcgatgaaaaataa

SEQ ID NO: 54236 - protein, 382 aa, Unknown
  Obtained from environmental sample
  DOMAIN (34)...(382): Aminotransferase class I and II
  misc_feature (1)..(382): Xaa is any amino acid
MAIAQNIKNALAGSSMIRKMFEEGINLKKQHGENNVFDFSLGNPDIEPPPAFHKMFVKSAKKDEKGSHGYMPNAGYLFVREALAKKVCKEQNVNIDGSHIVMAVGAAGGLNAVFKAICNQGDEVIVPRPYFMEYRAYTANHGAKLVEVDTQEDFNLDISAIGAALNEKTAAVLINSPNNPTGKVYSAQTLASLSSLLTEHGKKTGRFPYLVSDEPYREIAYNIDVPPFLSCYNESIVVSSYSKSLSLPGERIGFIAVNPAASEKDDLLNGLIYATRILGFVNAPALMQRIVASLTEERVDVSIYARRRDAFMKVLNNAGIEYSMPQGAFYLFCKVPKSKTGRQETDDKAFVEHLKKHLILGVPGSGFGKSGWLXFAYCVDEK

SEQ ID NO: 54237 - DNA, 1527 bp, Unknown
  Obtained from environmental sample
  misc_feature (1)..(1527): n is a, c, g, or t
atggaagcggccgaggaaagcattcaaaggcgcgccgtcctgtatgaccgcgacggagattaccatttcgacacgataagcgcgtttattaaaagcgttcgtggaagcgatcctgacgcggctctgtactggctcgcgaagatgctccgcgccggcgaagacccaagttttattttcaggcgcatgataatcctcgccagcgaagacgtgggccttgccgatccccatgccctgggcgtcgttgtttcctgcgccgaggcttttgaccgcatcggctttcccgaggggaattttcccctcgcccacgcctgcctgtaccttgcgacttctccaaaatcaaacaccgctatggccctgtttgacgcgatgaaagaagttgacaaagaagacgccgaagtgcctaatcatctgcgcgacgcgagccgcgacgcggaaagtttcggccacggcgaaggctatacttacccccacgcctaccgcgaccactgggccgctcagcaatacctgcccaccgctttgcgcggcaggacattttatataccctcccctgtcggctatgagggaaaaatcagggacgaggtacttagaaaaagaggaactgcaggcggctgttatccttggcgaccaaacaggcgacggcgagcttttaagctggtcggccgcggcgaaaggaagagaaggctggttcaagcgtctgaatcgggcagaagcgccctcctgcttagcgaccgcgacgcgattttcaaggccgcctcacctggccgccaggaccgtatccttgtccccctggccggtgacggccttctgatctgggaaagcctgcgccgttgtcccgagggcctcagcgcggcgttagtcgcaaatgatagtgcccgcgaggctttattccgttacgcgtcagtgctggatcaaattgagcagccggaaatcgccgtgctggaaaccgggcttttaccctcgccccaacaagccgccgaatggtttgacacaagcgttttcgattttatactgataagggaaccctggcgcagaggtttttcgggaaatacccctgaaaccgaatttacaaacctcgccgcgtccgcaaagaccctgcttgcccccgaaggccgcgtaatcctgctctgttcgccgcctgttatgggccagaggatctcacagcttatcatggatgaagatcaaccattggccgaaaaactaaggctgtctgaagatgcttttttctcgcggcagcaaggcccgcttaccgcctggaattgggacgccgccgatttgtcggcttcttttgaatcacagggcttcaaggttaaagttgagtttctcgatcaaaaagaagaacgacttatcggcccgaaagacataagcgcgtggtttgacaagacaaattcccgctggggcgctttcatgggaaaagctctcgacgcaggcgatttttcccgcgccgaagaactgctgacaaagcgaatccagtcaggcccattaccctggaaatggaaaagtttactgctcacaattagaaatgagtaa

SEQ ID NO: 54238 - protein, 508 aa, Unknown
  Obtained from environmental sample
  misc_feature (1)..(508): Xaa is any amino acid
MEAAEESIQRRAVLYDRDGDYHFDTISAFIKSVRGSDPDAALYWLAKMLRAGEDPSFIFRRMIILASEDVGLADPHALGVVVSCAEAFDRIGFPEGNFPLAHACLYLATSPKSNTAMALFDAMKEVDKEDAEVPNHLRDASRDAESFGHGEGYTYPHAYRDHWAAQQYLPTALRGRTFYIPSPVGYEGKIRDEVLRKRGTAGGCYPWRPNRRRRAFKLVGRGERKRRLVQASESGRSALLLSDRDAIFKAASPGRQDRILVPLAGDGLLIWESLRRCPEGLSAALVANDSAREALFRYASVLDQIEQPEIAVLETGLLPSPQQAAEWFDTSVFDFILIREPWRRGFSGNTPETEFTNLAASAKTLLAPEGRVILLCSPPVMGQRISQLIMDEDQPLAEKLRLSEDAFFSRQQGPLTAWNWDAADLSASFESQGFKVKVEFLDQKEERLIGPKDISAWFDKTNSRWGAFMGKALDAGDFSRAEELLTKRIQSGPLPWKWKSLLLTIRNE

SEQ ID NO: 54239 - DNA, 486 bp, Unknown
  Obtained from environmental sample
  misc_feature (1)..(486): n is a, c, g, or t
gtggaaaaaatagcgagttttcaaatagaccatttacggttaaaaccgggagcttatgtttcacggcgggatcagttcaaagatgtgatactcaccacttttgatcttcgttttaaagagccgaacaaagaacctgtaatggatcagcctgcgcttcatacgattgaacatttatgcgcaacctttctgcgctcccacaaagaatggagtcccaagacagtatacttcggccctatgggctgccgcaccggtttttatttaatcttggaaggcgattacaaatccgccgatattcttcctctgcttacggaaatgtttgactggatagaaaagtttgaaggagacattcccggcgcgcaccctgccgaatgcggcaactggcaagaacaaaacctcaacatggcaaaatgggaatgccgcaaatacgccgctctgttaaagaaagcgtcgaaggaaaatttggaatacccaagctcggtggtgtaa

SEQ ID NO: 54240 - protein, 161 aa, Unknown
  Obtained from environmental sample
  DOMAIN (2)...(157): S-Ribosylhomocysteinase (LuxS)
  misc_feature (1)..(161): Xaa is any amino acid
MEKIASFQIDHLRLKPGAYVSRRDQFKDVILTTFDLRFKEPNKEPVMDQPALHTIEHLCATFLRSHKEWSPKTVYFGPMGCRTGFYLILEGDYKSADILPLLTEMFDWIEKFEGDIPGAHPAECGNWQEQNLNMAKWECRKYAALLKKASKENLEYPSSVV

SEQ ID NO: 54241 - DNA, 1005 bp, Unknown
  Obtained from environmental sample
  misc_feature (1)..(1005): n is a, c, g, or t
ttgatttcatgcaggtcagcattgaatccgacttggcggaacccgaaaaacttcttcaagcatttccaatccataaagaacatgataatcaatggttacagtcccgcccagatccaaaaatatataaaagaagatataacccccaatgtaatcaaacatgataaacgtaaactgggcataaacagaatgtacggttattttgaagtattcaacggtttacagcttattaacggagaatgggagacgtccgtagatgacaacatgcaggaaagcccctggtacaaggcggcagttgaagcaaacggaaaagttgtttttacaacgccgtatttcaacgcgcgtatacgcagttatgtacttacatactcacggcaaatttttgacggggacaaacctctggcggttatcgcgactgacgttccgattgacaaaataatagattatgttatcggtatgcatgtcaccgatgacggttacgggatactgctggacgaaaatttgggactaatcgcccatccggacgtgtatatgataggaaaatcgctgcggaacgtgaacagcggactggcaagccaccttgcctattatttggaaaatagcgaagagtacattcctaaaaacatggcaatcaattacaagggtatggagtccattgttttttccagaaaattaagaaccggctggtatgtcagccttatagcgcccgtcaacaagtattaccgcgaaatcaggaacatgggtctggtacttaccgttcttggcataataatggcggctgttttgagcggtatcctgcggcgtattaccaattcaaagaaaaaagtggaacaagaaaacaaacagaaaagcgattttctggcaaaaatgagtcatgaaatccgcacgccgataagcgctattctgggcattaccgaaatccagcttcaggatcgcacgcttccgattacgacaaaagaggcgttaggcagaaatttacaattcagggcgatttactgctcgggataa

SEQ ID NO: 54242 - protein, 334 aa, Unknown
  Obtained from environmental sample
  DOMAIN (106)...(185): Cache domain
  misc_feature (1)..(334): Xaa is any amino acid
MISCRSALNPTWRNPKNFFKHFQSIKNMIINGYSPAQIQKYIKEDITPNVIKHDKRKLGINRMYGYFEVFNGLQLINGEWETSVDDNMQESPWYKAAVEANGKVVFTTPYFNARIRSYVLTYSRQIFDGDKPLAVIATDVPIDKIIDYVIGMHVTDDGYGILLDENLGLIAHPDVYMIGKSLRNVNSGLASHLAYYLENSEEYIPKNMAINYKGMESIVFSRKLRTGWYVSLIAPVNKYYREIRNMGLVLTVLGIIMAAVLSGILRRITNSKKKVEQENKQKSDFLAKMSHEIRTPISAILGITEIQLQDRTLPITTKEALGRNLQFRAIYCSG

SEQ ID NO: 54243 - DNA, 483 bp, Unknown
  Obtained from environmental sample
  misc_feature (1)..(483): n is a, c, g, or t
atgaagcgcatcattattgaacaggataaatgcgatggctgcaaaagttgcagtattgcctgtatgcaagcccaccgcgagctcaccgcgacaggaagccggggaacggtttacgatctggatcttcttgaccccaaaaacgaggcccgccataccattaccaactatcgaaaaggcggttacgttccggtcttctgccgtcactgcgccgtgcctgaatgtgtgggcgcgtgcatgtcaggcgctttaaggaaagaccctgtcacgggccatgtgcaatacgacgagaagcgctgcggtaaatgcttcatgtgcgttatgagctgtccctacggaaacatcaagccggacagcgtaacgcgaacaaggatactcaagtgtgatttttgcaaggacgacaacgaggaaccaaattgcgtgaagtcctgtcccaaagaagctattcatgtggaagaagttgacgttgggggtgtcgctgtatga

SEQ ID NO: 54244 - protein, 160 aa, Unknown
  Obtained from environmental sample
  DOMAIN (92)...(115): 4Fe-4S binding domain
  misc_feature (1)..(160): Xaa is any amino acid
MKRIIIEQDKCDGCKSCSIACMQAHRELTATGSRGTVYDLDLLDPKNEARHTITNYRKGGYVPVFCRHCAVPECVGACMSGALRKDPVTGHVQYDEKRCGKCFMCVMSCPYGNIKPDSVTRTRILKCDFCKDDNEEPNCVKSCPKEAIHVEEVDVGGVAV

SEQ ID NO: 54245 - DNA, 1254 bp, Unknown
  Obtained from environmental sample
  misc_feature (1)..(1254): n is a, c, g, or t
atgaaacatctaataatcggcgcgggagctgcggccataagcgctgtaaggacaatcctaaaagagaaaagcgatgacactgtggtactagtatcgcaggatgaagaagtttattcgcgctgtatgctgcacagatttatttccggcgaaagggacgccgaaagcataaacttcattaacgatgatattctgaaatcgccgagagtccagtggataaagggcaagaccataacccgcctggacgccgccgcgaaaacagtttacgccggggaggaaaagatctcttcaggtgacaccgtgcttatcgccaccggatcggacagcgtaacccctcccataggcgagcttaaaactgcgaagaatgcttttggtcttcgccacctttccgatgcccgcgccattgtagagcgcgcgaagacagcaaaggaaatcgccgtcataggagctgggctgattggccttgacgctgtgtacggcatacttgaatcacccagcggcgagaagaaaaagatcaccgtagttgaaatggccccatctgttctggctattaaccttgacgcccacgccgccgaagcgtatcagcggctttttgataataagggcgttgcttttcgccttgcccgcaaagtggtgaacacaaagagtgatggcggaaacattaccgcacttgaactggatgacggcgaaataatctcctgcgacatggtgattatggcggtgggcgtaagagcggcaacagctttcctggcaggtggcgtggcttccgaaggaagcctagagcttaccgagcgaagagcggtgaaagtagacgattaccttgccactaatatttcaggtatttatgcagccggggatgtcgcgggtctttccggtatttggcccaacgcccagaaacagggggagatggccgcctacaacatgaccggaacaaaatgggcttatgatgaccgtttcgccataaaaaataccgtcaacttttttggcctgttatctttgtccctgggggctatcaatccattagaaggcgataagacccttgtaaaggaagacagaaacaattaccgaaaactcattttaagggacggtattccggttgggattattctccagggcgaaatcggcgaaagcggtttctggctctaccttattaaaaacaagatacgcatcgacaacttgggcaagagtccctggaatgtgagttacgcaaatttttacggggtggaagcaaaacgcgagtacaagtggggtgtctaa

SEQ ID NO: 54246 - protein, 417 aa, Unknown
  Obtained from environmental sample
  DOMAIN (143)...(241): Pyridine nucleotide-disulphide oxidoreductase
  misc_feature (1)..(417): Xaa is any amino acid
MKHLIIGAGAAAISAVRTILKEKSDDTVVLVSQDEEVYSRCMLHRFISGERDAESINFINDDILKSPRVQWIKGKTITRLDAAAKTVYAGEEKISSGDTVLIATGSDSVTPPIGELKTAKNAFGLRHLSDARAIVERAKTAKEIAVIGAGLIGLDAVYGILESPSGEKKKITVVEMAPSVLAINLDAHAAEAYQRLFDNKGVAFRLARKVVNTKSDGGNITALELDDGEIISCDMVIMAVGVRAATAFLAGGVASEGSLELTERRAVKVDDYLATNISGIYAAGDVAGLSGIWPNAQKQGEMAAYNMTGTKWAYDDRFAIKNTVNFFGLLSLSLGAINPLEGDKTLVKEDRNNYRKLILRDGIPVGIILQGEIGESGFWLYLIKNKIRIDNLGKSPWNVSYANFYGVEAKREYKWGV

SEQ ID NO: 54247 - DNA, 1260 bp, Unknown
  Obtained from environmental sample
  misc_feature (1)..(1260): n is a, c, g, or t
atgtctacctttttcagcggttgggataccacaacgatttggaatacgggcggcaatctgtccgtaggcgtcaatttgcccacgctcaaaacaaacacgcaaacgccagcccccacgcttccgccggcatacgtgttaggcacggcggccgatcccttcatcattgccaccgaagccgatctccgcaaagtcggcacaggcacagacggctggtcgctctcggcgtactacaaacagacagcagacatcgccgtaacatcggctaacaactgtccggcgataggaagtaacgccaacagattcaccggcacgtatgacgggggcggaaaaaccatcaccggcttgacccaagttaccacgagcagttattcaggtatctttggttatatcggcgaaggcggcacggtgaaaaatgttactgttaccaacggcacgataacccaaaacggaagcaacacttcgttcaccggcggcattaccggatataatctaggtacgatagacaactgttcctttagcggaaacgtcaacggcaacacaaccaatgatgtaataggcggcattgccggaaggaataacggcacggtgataaacagcagaagcaccgcaacggtaagcggcagaatttgtatcggtggcattgtcggagagaataccggcaagattgaaaacagttacaacacgggaaacgtcagcggcacaaatcagataggcggtatcgccggagctctttccggcagtagttcatacataaagaacagctataacacgggcaatgttaccgcaactgacagcacctccaatgtcggcggcattgccgggaattgcacgacaggctcattggtagaatattgctacaattccggaaccgtttccggcgcacaatatgtcggaggcatagttggaaccggcggttcaacagttaccgtgcaatactgcgtatcactcagcacaagggtgataaccaccacaaacagcacctatgccgggcgcataagcggagctcaaggcgtaaccatgaccggcaacaaagcccgttcagatttgctacttggaccaagcactcaaaccacaccggtaacaacaggcacaggatcaaacaaagacggcgaaaatgtcagtttaggtacgacagtaatgaacgttttcaccagctttgatgggagtatttggtatatatggaacacacccatgaatgtaggcggtgatttgcccacattaagaaaaaatgagcaaagccccgctcccaagcttccgtga

SEQ ID NO: 54248 - protein, 419 aa, Unknown
  Obtained from environmental sample
  DOMAIN (207)...(232): The GLUG motif
  misc_feature (1)..(419): Xaa is any amino acid
MSTFFSGWDTTTIWNTGGNLSVGVNLPTLKTNTQTPAPTLPPAYVLGTAADPFIIATEADLRKVGTGTDGWSLSAYYKQTADIAVTSANNCPAIGSNANRFTGTYDGGGKTITGLTQVTTSSYSGIFGYIGEGGTVKNVTVTNGTITQNGSNTSFTGGITGYNLGTIDNCSFSGNVNGNTTNDVIGGIAGRNNGTVINSRSTATVSGRICIGGIVGENTGKIENSYNTGNVSGTNQIGGIAGALSGSSSYIKNSYNTGNVTATDSTSNVGGIAGNCTTGSLVEYCYNSGTVSGAQYVGGIVGTGGSTVTVQYCVSLSTRVITTTNSTYAGRISGAQGVTMTGNKARSDLLLGPSTQTTPVTTGTGSNKDGENVSLGTTVMNVFTSFDGSIWYIWNTPMNVGGDLPTLRKNEQSPAPKLP

SEQ ID NO: 54249 - DNA, 969 bp, Unknown
  Obtained from environmental sample
  misc_feature (1)..(969): n is a, c, g, or t
ttgagtatcagtgaaaaaactcttgcctttgaagccgctttttccggctttcttggaaacgggacaaaatgtcttgccctttcaaattgtaccgccgccttgcacatggcactacttgctcttgatataaaagaaggcgatgaaataattacaccttctttaacatttatcgcagatcaaaatgtttctatgatgaacggcgcaaaaaatattcttgcggatatttcttcaatggaggattggtcgattgatcccgatgatattgaagcacggattactccggcgacaaaagcggtgatgatagttcactatgcgggatttgcctgtgatatggagcgtataaccgccctatgccaaaaaaacaaactgctccttatcgaagactgcgctcattcaccgggagccgattacaagggacagcctctcggtactttcggcgacatagcggctttcagtttttttgccaacaaaaacatcgcagtcggcgaaggcggtatggttgttacgcgcaatattgacctgtatgaaaaactgcgtcttttacgctcccacggaatgtccgttccttcttttgaccgttacaagggcagggcagtctcctacgacatacagtcgccgggactgaattaccgtattcacgaaataagttccgcgcttggacttgtccagcttaaaaagcttgaagacgcgaatgaaaaaagaaaaaaactcgtggaacattactacagccgtcttgataaaattccgtccgtttcagtccctttcaggtttttttcgcgcggaaaaccgaattatcacataatgccgattttactttctgataaaatagacagatcggtggtcatagaatcaatgaaacaggacggaattcaaaccagtatacattatccggcgattcaaaatttcagcgcatacaaggacaaaattaactccacgcagaaagccgaatatgtctgtgcccacgaatga

SEQ ID NO: 54250 - protein, 322 aa, Unknown
  Obtained from environmental sample
  DOMAIN (2)...(302): Aminotransferase class-V
  misc_feature (1)..(322): Xaa is any amino acid
MSISEKTLAFEAAFSGFLGNGTKCLALSNCTAALHMALLALDIKEGDEIITPSLTFIADQNVSMMNGAKNILADISSMEDWSIDPDDIEARITPATKAVMIVHYAGFACDMERITALCQKNKLLLIEDCAHSPGADYKGQPLGTFGDIAAFSFFANKNIAVGEGGMVVTRNIDLYEKLRLLRSHGMSVPSFDRYKGRAVSYDIQSPGLNYRIHEISSALGLVQLKKLEDANEKRKKLVEHYYSRLDKIPSVSVPFRFFSRGKPNYHIMPILLSDKIDRSVVIESMKQDGIQTSIHYPAIQNFSAYKDKINSTQKAEYVCAHE

SEQ ID NO: 54251 - DNA, 378 bp, Unknown
  Obtained from environmental sample
  misc_feature (1)..(378): n is a, c, g, or t
gtgcttgaactgcggataaaagcctataacgcgattcagtctttttccatggactattttcacaacaagcaaacaggcgaactgttaagccgagtaatgaacgatgtcgccacatttgaattgatatacgcgcacatcaccccagatattataacaaactttgttaccctcacaggcgtaacaattattctctttaatttaaacgcgcgtcttgcgcttatcacctgtattcccattccgtttattttgttatcagggtggtttttcatccgcaaggtgcgccctaattttcagaagacgcaaaagtcacagggggaattatccgcacagttgcaagataatttatcgggcattcaggaaatacaggcttttgggtaa

SEQ ID NO: 54252 - protein, 125 aa, Unknown
  Obtained from environmental sample
  misc_feature (1)..(125): Xaa is any amino acid
MLELRIKAYNAIQSFSMDYFHNKQTGELLSRVMNDVATFELIYAHITPDIITNFVTLTGVTIILFNLNARLALITCIPIPFILLSGWFFIRKVRPNFQKTQKSQGELSAQLQDNLSGIQEIQAFG

SEQ ID NO: 54253 - DNA, 588 bp, Unknown
  Obtained from environmental sample
  misc_feature (1)..(588): n is a, c, g, or t
ttgttcagtatagacaaactcaacaaggccccggctattttcgattataaaaaacttgaatggtttaacggccagtacatcagaatgaaaagcgacgaggaacttgccgccctttgcctgccctcagcagtagaagcgggtcttttcggcgctcccggagccgtacccgaccttaatcagaaaaatattttcacagcggcaatgccccttatccgcgagcgtctgatatacacccacgaggccgccggaaaaatcgcctatctgttcgcgcctcccgcgctgcccgccaaagaagaattcatccccaaaaaagctgatcttgccgaaaccgtaaggcttttacaactgtcgcgggacatggttcaaccgcttgccgaagccgctgacgatgcggcggcggaagcgtacatcaaggaacaggccgaaaaagcagcggtaaagttaggcgatctaatgatgcctctgcgcgtcgccattacaggaagccgcgtcagccctccccttttcggatctcttaaaattttaggatcccaggaatcgctgcaaagggtggataaggctttgcagtaccttaacttaggtaaatga

SEQ ID NO: 54254 - protein, 195 aa, Unknown
  Obtained from environmental sample
  misc_feature (1)..(195): Xaa is any amino acid
MFSIDKLNKAPAIFDYKKLEWFNGQYIRMKSDEELAALCLPSAVEAGLFGAPGAVPDLNQKNIFTAAMPLIRERLIYTHEAAGKIAYLFAPPALPAKEEFIPKKADLAETVRLLQLSRDMVQPLAEAADDAAAEAYIKEQAEKAAVKLGDLMMPLRVAITGSRVSPPLFGSLKILGSQESLQRVDKALQYLNLGK

SEQ ID NO: 54255 - DNA, 405 bp, Unknown
  Obtained from environmental sample
  misc_feature (1)..(405): n is a, c, g, or t
gtgctattgaagcgcggactggccaacacaatcgaagaattgttgatgagtgcggaatatatcgtatccgcaggaaacacgcaggtcatactctgcgagcgcggcattcgcacctttgaaacaatgacgcgcaacacgctggatttatctgcggtcgcgcttctcaaacaaaaatcgcatctgcccgttatcgtagacccaagtcacgcttcggggatcagaagccttgtgccgccccttgcaaaagcggccatggctgtgggagcggacggccttatgatcgaagcgcacaacaacccggcgacagcgttatgcgacggcgcacagtcgcttgatttggaacagttccgcctgctcatggacgaattgagaaagcgcgcagtaatagagaataaaattttttaa

SEQ ID NO: 54256 - protein, 134 aa, Unknown
  Obtained from environmental sample
  DOMAIN (1)...(129): DAHP synthetase I family
  misc_feature (1)..(134): Xaa is any amino acid
MLLKRGLANTIEELLMSAEYIVSAGNTQVILCERGIRTFETMTRNTLDLSAVALLKQKSHLPVIVDPSHASGIRSLVPPLAKAAMAVGADGLMIEAHNNPATALCDGAQSLDLEQFRLLMDELRKRAVIENKIF

SEQ ID NO: 54257 - DNA, 1488 bp, Unknown
  Obtained from environmental sample
  misc_feature (1)..(1488): n is a, c, g, or t
atgtttaaaccgtcactggaagaagcaaaacatatcgcaaaaacagggcaatacgatattataccgcttagcctggaaatgtactccgatatggtaacgccgattgacgtattcaggaaattgaaaaaggagagcgggcattgctttatcctcgaaagcgcggaggatacaaaaaactggggcagatacacctttttgggatttgatccaaaactggaaattacctgcctgaacggtgcaatgaacatcaattcggatacaacggaatcgtttaagaccgataaccccaacacacatattcaggaaattcttgatcgttataaaagcataaagtttgactacctgcccccctttaccggcggccttgtaggctactttgcttacgactacgcaaaatatttcgagccaacgctcaaactggacgccgttgacgaggagcgttttaacgatgtcgatcttatgctctttgacaaggtaatcgcatttgacaattaccggcaaaaagtaattttaatcgtcaatataaacgcccaaaacattgaaagtgaatacgagaagggaaagtcgcggttagaaagtttaaaaaaccttatcaaaaaccagcagtgggaaaatactcctcaagccctcgtaaagtcggacttcaatgctttgttcacaaaagaagaatactgccaaatggtgaacagggccaagggctacatcaaagaaggggatatttttcaagtcgtactgtccaaccgtttcgaggctgattttgaaggcagcattttcgacacatacagggtactgcggacaataaacccctcgccgtatatgttttacttcggcggaagcaatcttgaaatcgccggcgcgtcgcccgagaccctggttaaattgcataacggcagactgtttacctttccgcttgcgggaacacgccccaggggatcaagcgacgaggaagacatcgcgctggagaaagaactcctcgccgacgagaaggaacttgccgagcataatatgcttgtggacctggggcgaaacgatttggggaagatcagcaaattcgggactgttattgtggaaaattatatgtcaatccttcgcttctcacatgttatgcacattggctctaccgtaagcggggaaatcatcgaaggcaaaacagggctggacgcgattaacgccgtgcttcctgccggaacgctgtcgggcgcgcccaagatacgcgcaatgcaaattattaacgagcaggaaaaaaacaaacgcggcatttacggcggggcaatcggctaccttgattttacaggcaatatggacacatgtatagcaatcagaattgtttacagaagaaacaacaaagtattcgtaagaagcggagcgggaattgtcgccgacagcaatcccgaatcggaatatcaggaatgtgaaaataaatccgcggcggttatgaacgcgcttaaactttcaagcgaagtttcagccgaaggagagctgaaatga

SEQ ID NO: 54258 - protein, 495 aa, Unknown
  Obtained from environmental sample
  DOMAIN (23)...(171): Anthranilate synthase component I, N terminal region
  misc_feature (1)..(495): Xaa is any amino acid
MFKPSLEEAKHIAKTGQYDIIPLSLEMYSDMVTPIDVFRKLKKESGHCFILESAEDTKNWGRYTFLGFDPKLEITCLNGAMNINSDTTESFKTDNPNTHIQEILDRYKSIKFDYLPPFTGGLVGYFAYDYAKYFEPTLKLDAVDEERFNDVDLMLFDKVIAFDNYRQKVILIVNINAQNIESEYEKGKSRLESLKNLIKNQQWENTPQALVKSDFNALFTKEEYCQMVNRAKGYIKEGDIFQVVLSNRFEADFEGSIFDTYRVLRTINPSPYMFYFGGSNLEIAGASPETLVKLHNGRLFTFPLAGTRPRGSSDEEDIALEKELLADEKELAEHNMLVDLGRNDLGKISKFGTVIVENYMSILRFSHVMHIGSTVSGEIIEGKTGLDAINAVLPAGTLSGAPKIRAMQIINEQEKNKRGIYGGAIGYLDFTGNMDTCIAIRIVYRRNNKVFVRSGAGIVADSNPESEYQECENKSAAVMNALKLSSEVSAEGELK

SEQ ID NO: 54259 - DNA, 573 bp, Unknown
  Obtained from environmental sample
  misc_feature (1)..(573): n is a, c, g, or t
atgattttattaatcgacaattacgacagcttttcatataacctgtaccagcttctgggctcgataaatcccgacattgaagttgtgcgcaacgacgcgttaagcgtagacgaaatagcaaagatgtctccacagtacattgtaatttctccgggaccgggaaaaccatcggacgcgggaatttgtatcgacgttataaaaagccttcactcaacaattccaattttgggaatctgcctcggtcatcaggcgatttttgaagcgttcggcggtacggtatcttacgcgagcaaactaatgcacggaaaatcttctcaggtaaccgtagacgtaaacaatactttgttcaaaggacttccgccggcaatacaggcggcgaggtatcattcgctcgcgggaattaaatcgacattgccggattctttaaaaattacggcatggacgcaggatgatgaaattatggcagtatgccacaaagaatatcccgtatacggcgtgcagtttcaccccgaatctatacttacacctaacgggaaaataatagcggaaaattttttaagagtgagaaattga

SEQ ID NO: 54260 - protein, 190 aa, Unknown
  Obtained from environmental sample
  DOMAIN (22)...(171): Peptidase C26
  misc_feature (1)..(190): Xaa is any amino acid
MILLIDNYDSFSYNLYQLLGSINPDIEVVRNDALSVDEIAKMSPQYIVISPGPGKPSDAGICIDVIKSLHSTIPILGICLGHQAIFEAFGGTVSYASKLMHGKSSQVTVDVNNTLFKGLPPAIQAARYHSLAGIKSTLPDSLKITAWTQDDEIMAVCHKEYPVYGVQFHPESILTPNGKIIAENFLRVRN

SEQ ID NO: 54261 - DNA, 378 bp, Unknown
  Obtained from environmental sample
  misc_feature (1)..(378): n is a, c, g, or t
ttgactgaagcatttgtaacagacgcgcttctttccgcaagtaaaactacagacgttaccgttcatgaaaaggcaatcttacctgtaaccgcgctagtcttctcccccgccctgctggaaagttgtaaaacgaacgtatgcggcaatttcaataagtcttgggtttgccctcccgcctgcgaaagcattgaggagcaaaagaaaaaaatattttcctatcaaaatcttttggtatttacaacaatgcacgctttagaagattcctttgattatgagggaatgacagaaagcagaaaactccacaccctgctgacattgggattaagaaaaatactgaacgccccccgtttacggtgcgggaaactggcccatgtgtaa

SEQ ID NO: 54262 - protein, 125 aa, Unknown
  Obtained from environmental sample
  misc_feature (1)..(125): Xaa is any amino acid
MTEAFVTDALLSASKTTDVTVHEKAILPVTALVFSPALLESCKTNVCGNFNKSWVCPPACESIEEQKKKIFSYQNLLVFTTMHALEDSFDYEGMTESRKLHTLLTLGLRKILNAPRLRCGKLAHV

SEQ ID NO: 54263 - DNA, 603 bp, Unknown
  Obtained from environmental sample
  misc_feature (1)..(603): n is a, c, g, or t
atgtcttcgcaatatggtaaaaaacttaggatatcaatattcgggcagtcgcattctccggcgattggcgtgagcattgacggcttgccagctggaatcaaacttgatattgacgaactaaaggcctttcttaaacgccgggctccggggcaaaacgatatttccacggcgcgcgcggaggatgacgcgccggagattttgtcagggctggttgaaaatgttacctgcggagcgccgcttgccataatcatccgcaacaaagatccccgctcagtcgattaccgcgaactgcgggatattccgcgcccatcccacgccgattttgccgcgcaaataaagtacggcggttttcaggacgtagcgggcggcgggcatttttccggcaggctgacagctccattgtgcgccgccggaggtatatgtttacagatactgcgcggtctggggatcagcattggggcgcacatattgcggatcggcaacgcgcaagacgatccctttgaccctgtggctgtatcaaatgcggaattcgaagcaattctaaaaaaccctctgcctgtactcaagcgtgaggccggtgaggcaatgagacagcaaatctga

SEQ ID NO: 54264 - protein, 200 aa, Unknown
  Obtained from environmental sample
  DOMAIN (9)...(199): Chorismate synthase
  misc_feature (1)..(200): Xaa is any amino acid
MSSQYGKKLRISIFGQSHSPAIGVSIDGLPAGIKLDIDELKAFLKRRAPGQNDISTARAEDDAPEILSGLVENVTCGAPLAIIIRNKDPRSVDYRELRDIPRPSHADFAAQIKYGGFQDVAGGGHFSGRLTAPLCAAGGICLQILRGLGISIGAHILRIGNAQDDPFDPVAVSNAEFEAILKNPLPVLKREAGEAMRQQI

SEQ ID NO: 54265 - DNA, 1476 bp, Unknown
  Obtained from environmental sample
  misc_feature (1)..(1476): n is a, c, g, or t
ttgatgaggcggctttttttgacagaaacgaagcggcaagcgtattaccctgattctgccggagaagatcggcaagtgcgtcgcgaaagacttcagtctcgacgaactcgcggaattcatccggctcgcgatgcgggcgtagaggcatatatggaagtgcgaattttacccgggcgattgcgcggtacggtgaacgcgatcccctccaaatcgcaggcgcacagggcgctcatctccgcggcgcttgcggacgcgcccacgcggattgcgtgcggggaacgggatccccttgatgccggcgaagcgccgggcgaggcgcaggatatcgcggcgacggcggattgcctctccgcgctcggcgccgtgatcgagcgcgaaccgggcggataccgggtaattcccctgcggcgcgatgcgaacaacgccgttgacgcagacgacgccgccgcttctctgccctgcgcggagagcgggagcaccttccgattcatgctgccgatcgtctgcgcgctcgggcgagagggcgcgtttatcctgcggggacgattgccgcagcgtccgctttctccgctctacgaagagctcattcgccacggatgcgcgttatcgccgcagggttcgtctccgtttcataccgccggaaaactcacgccgggcagctattcgctcgacgcgggcgtatcctcgcaattcatcagcgggcttctgttcgcgctgcctttgctcgatggggagagcgagctccgtataaccggacgcgcggaatcctttccctatattgaattaacgatggcgatgcttcaaaaattcggcatacaaattaaatttgacggtacggtctttacgataccgggcgcgcagacctaccgttcacccggcagcgcgcgcgtggagggcgattggtcaaacgccgcgttctggctgagcgcgggggctataggcgccggcagcgtcacatgtaccggtttgaattttaaatcaccacagggtgaccgcgcaattctggacattctgacgaaattcggtgcgtgtgttgaaattattgaaagcgactccagggtaacagtatccggcgggaaactgcgcggtattgagatagacgcgcgggatattcccgatctcgtgccaatattagcgattgtcggctcgagggccgaagggacgaccgttattcgcaacgcagcgcggctgcgtaccaaggaaagcgacaggcttgccgctgtaagcgatatattacacgctctgggcgtagacgctaaggagactaatgacgggcttgtcatacatggcggaaagactttcaaaggcggagaggtatcgtcacgaggggatcaccggatcgccatgtccgcgacaatcgcggcgacaatatgcgcgggttcggttgttattcatggagcgcaggcggtcaataaatcatatccctgtttttttgacgatctgcgtttgcttggcggttcgattcaagagttatag

SEQ ID NO: 54266 - protein, 491 aa, Unknown
  Obtained from environmental sample
  DOMAIN (55)...(481): EPSP synthase (3-phosphoshikimate 1-carboxyvinyltransferase)
  misc_feature (1)..(491): Xaa is any amino acid
MMRRLFLTETKRQAYYPDSAGEDRQVRRERLQSRRTRGIHPARDAGVEAYMEVRILPGRLRGTVNAIPSKSQAHRALISAALADAPTRIACGERDPLDAGEAPGEAQDIAATADCLSALGAVIEREPGGYRVIPLRRDANNAVDADDAAASLPCAESGSTFRFMLPIVCALGREGAFILRGRLPQRPLSPLYEELIRHGCALSPQGSSPFHTAGKLTPGSYSLDAGVSSQFISGLLFALPLLDGESELRITGRAESFPYIELTMAMLQKFGIQIKFDGTVFTIPGAQTYRSPGSARVEGDWSNAAFWLSAGAIGAGSVTCTGLNFKSPQGDRAILDILTKFGACVEIIESDSRVTVSGGKLRGIEIDARDIPDLVPILAIVGSRAEGTTVIRNAARLRTKESDRLAAVSDILHALGVDAKETNDGLVIHGGKTFKGGEVSSRGDHRIAMSATIAATICAGSVVIHGAQAVNKSYPCFFDDLRLLGGSIQEL

SEQ ID NO: 54267 - DNA, 1152 bp, Unknown
  Obtained from environmental sample
  misc_feature (1)..(1152): n is a, c, g, or t
atgggcgttcccatacctttgaccttaaagagagactaccgtatggcgaagaaatcaaaaaaaggtaaaggcgacgcgggaagcgatgccgcaattacctcggcgcaattggccgcgttgcagaagcccagcaaaaagaccgttaacatcagcggtattccggggcccgtcaaggcggctatcgttatggtggcgctcggaacggacgcctccagcaaggtattcaagttacttgacgacgtggacatagagcggctctccactgaaatcgctcggttggagaatatctcgcaggatgttcgcgaggctgtgcttgaggagtttcacaccttggcgctggcgcaccaatacatatcgcagggcggtttggactacgctcgtcaggttttgatagcggctctgggaccggagaaggccaacgagatactcgagaaggtgcaagcgaagattcggacgaccggtttcaatttgttggagaacatagaccccaagcagcttgtcaactacatacagaaggagcacccgcagacaatcgctatcctgctcgcccacatggacgcggcgcacgcggccggcatagtctcggcgttgccgcaaatggtgcagatcgacgtcgcgacacgtatagccacaatggagagcatatcgccggacacgctgtcgcagatcgaagaggtgctggtgacgcagataaagtcgctcttcggcggcgacgtttcggaaatcggcggcgtgaaggctgtggcggagatcctgaacaacgtggaccgcggtacggagaagaatatcataggcaacctggagagggagaacccggagcttgccacggagataaagaaactcatgttcgtcttcgaggacgccatgttgctcgacgaccgctcgatgcagcgcctgctcaaggagatcgacacaaaggaactcggcatggccctcaagagcgcgacggaggagctgcaggagaagttcttccgcaacatgtcgtcacgcgcctccgagatgataaaagaggatatgcagttcatgggcccgatacgtttgaaggacgtggaagaggtccagcagcgcgttgtggacgttatccgccgactggaagaggacggagagataataataagcggacgcggcggcgacgacaatgtcgttgtgtaa

SEQ ID NO: 54268 - protein, 383 aa, Unknown
  Obtained from environmental sample
  DOMAIN (264)...(373): FliG C-terminal domain
  misc_feature (1)..(383): Xaa is any amino acid
MGVPIPLTLKRDYRMAKKSKKGKGDAGSDAAITSAQLAALQKPSKKTVNISGIPGPVKAAIVMVALGTDASSKVFKLLDDVDIERLSTEIARLENISQDVREAVLEEFHTLALAHQYISQGGLDYARQVLIAALGPEKANEILEKVQAKIRTTGFNLLENIDPKQLVNYIQKEHPQTIAILLAHMDAAHAAGIVSALPQMVQIDVATRIATMESISPDTLSQIEEVLVTQIKSLFGGDVSEIGGVKAVAEILNNVDRGTEKNIIGNLERENPELATEIKKLMFVFEDAMLLDDRSMQRLLKEIDTKELGMALKSATEELQEKFFRNMSSRASEMIKEDMQFMGPIRLKDVEEVQQRVVDVIRRLEEDGEIIISGRGGDDNVVV

SEQ ID NO: 54269 - DNA, 999 bp, Unknown
  Obtained from environmental sample
  misc_feature (1)..(999): n is a, c, g, or t
atgagatcaaccatgaaaacaaaatccaatttactaatcaagttcatccaggcccgtcggtttcactgttgtcatggctgtttttctatatgtatatttcactctcccaatcccgccgcgttggggaacatgggcaagccttccgatccggttccggttatggaaaacctcagaaccggggttctgcccagtggccttcgctactatatccttgagaattacagaccggaaggccgcgcgtatcttacgcgggcggtgaaagccggttccgtgcttgaagaagatgacgagcaggggcttgcccattttgtcgagcatatggcgtttaatggtactgagcgcttccccgaattgaaactggtaagttaccttcgttcgctgggaatgcgctttggcccggaggtaaacgcctatacatcctatgacgaaacagtgtacggcatcgaagtgccgatagaaaaagacggagagggtataaggcgtattcccgaaaacgcgcttgccgttattgacgactggacgcgggcagtgacttttctcccttcggatgtggacgatgaacgtcccgtgataatggaagaataccgcacgaggcttggcgtgtggaaaaggctcaggcagaaatggctgccggtattgttcaaaggatcgccttacgcaaaccgcatgcctatagggttgccggaaatcatcgaaggggctcctgtttcccggctggagggtttttacaaaaagtggtacaaagctgataacatggccctgatctttgtgggtgattttaatggggcggcgttagaagcttcgttgatcgatcattttaggatagagaaaccagtagtgcctgctaagcggccattgtatgatctgccgctcccccaaaaagggaacctggaagtccttacccttaccgatcctgaactgaccgataccaatatttatatctatttcaagcgtaaaccgcaggcacgcatatttgtatatcaactaaaaccgctttag

SEQ ID NO: 54270 - protein, 332 aa, Unknown
  Obtained from environmental sample
  DOMAIN (68)...(216): Insulinase (Peptidase family M16)
  misc_feature (1)..(332): Xaa is any amino acid
MRSTMKTKSNLLIKFIQARRFHCCHGCFSICIFHSPNPAALGNMGKPSDPVPVMENLRTGVLPSGLRYYILENYRPEGRAYLTRAVKAGSVLEEDDEQGLAHFVEHMAFNGTERFPELKLVSYLRSLGMRFGPEVNAYTSYDETVYGIEVPIEKDGEGIRRIPENALAVIDDWTRAVTFLPSDVDDERPVIMEEYRTRLGVWKRLRQKWLPVLFKGSPYANRMPIGLPEIIEGAPVSRLEGFYKKWYKADNMALIFVGDFNGAALEASLIDHFRIEKPVVPAKRPLYDLPLPQKGNLEVLTLTDPELTDTNIYIYFKRKPQARIFVYQLKPL

SEQ ID NO: 54271 - DNA, 777 bp, Unknown
  Obtained from environmental sample
  misc_feature (1)..(777): n is a, c, g, or t
atgctctgcggcgcactctaccccacttcgggagaaattgacgttatgggatattcgcccagcagggatagaaagaggtatgtgcgcgaaatcggcgcggttttcggtcagcgttcacagttaatctgggatattccccctattgacagttttaacatgaaccgcgccatttacgggataccgcaggcggattacaaatcgcgccttgacgagttagccgaaatgtttgatgtcacggaagttatgcacaaaccgacaagggtgctgtctctcggcgagcgcatgaagtgtgaatttataatggctatgctccacaagcctaaaattgtctttttagacgagcctacaatagggcttgatgttatcgctaaagctgttatacgcaggttcatcatggatatgaacaaaaccggaacaacttttatccttacgacccacgatttggaagacgtaaaacagcttgccgataatgtgatagtaattaatcacggcaggaaagtgtttgacaactctttgcagaatttacagttaaatcttggtgagaaaaaaattgtagagcttacgctggaacagccttttgacgcgggggcggcgcttccggacagcgtaagggtgcttgaacaaaaatcgccgctggaaataattttggaagtagacgcgtcgaaaacagcgattggggattttatcaagtttctttcgagtaaattttcgctaaccgacatagctgttaaggaacttcctatggaagaaattattacacagatatataaaaattaa

SEQ ID NO: 54272 - protein, 258 aa, Unknown
  Obtained from environmental sample
  DOMAIN (1)...(164): ABC transporter
  misc_feature (1)..(258): Xaa is any amino acid
MLCGALYPTSGEIDVMGYSPSRDRKRYVREIGAVFGQRSQLIWDIPPIDSFNMNRAIYGIPQADYKSRLDELAEMFDVTEVMHKPTRVLSLGERMKCEFIMAMLHKPKIVFLDEPTIGLDVIAKAVIRRFIMDMNKTGTTFILTTHDLEDVKQLADNVIVINHGRKVFDNSLQNLQLNLGEKKIVELTLEQPFDAGAALPDSVRVLEQKSPLEIILEVDASKTAIGDFIKFLSSKFSLTDIAVKELPMEEIITQIYKN

SEQ ID NO: 54273 - DNA, 1569 bp, Unknown
  Obtained from environmental sample
  misc_feature (1)..(1569): n is a, c, g, or t
atgaataaaagaaaaaaactggtaaataccctctttggaagaagggcattggttgttatcgcccttcttattcaaatttcattgataattattttaatagcgagggtaagcgtacattttcaatattcatatttaattctttattttttaagcattatcgcgtgtattcatgtattaaacaaacatgaaaaagccggttataaacttacatggattttccttatcctcctttttccttttttcggcggggttctgtatatatatttcaatacgatttctacccagaaaaaattaaaaaaagcccttgataagaacatacgcgacagccgaggggctttttttctggccggaaacaggctggatgaattaatagacgaacatcccgaattcaggacacacgcccaatatttgcagaatttcgcgggtttcccggttttttcaaacacaaggcagatttatcttgattcgggagaagcgttttaccgtaaagttctggaagaacttgaaaaagcaaagagttacatttttttggagttttttatcttaaaagaaggcgtaatgctgaataccatacttgatattctggaaagaaaagccgcagaagggcttgatgtaagaataatgtacgatgatttgggatgtatttttaccctgccggaaaactatcataaaacgcttgagcagagaggaattaaatgttttgtatttaatcccttcaggcctattgttacatctttgcagaacaacagggaccacagaaaaataatttccatagacggcaggatagtgttcacgggcggccttaatcttgcggatgaatatataaatattgtcgagcgtttcggccactggaaagacgcggcgataatgctggagggagacggagcgtgggcttttacgctgatttttctgcagatgtggaacctgaagccgggggacaaggacaattacgaggtatttttcccgtggaaagacaacatcattgaacatacggaaaaaggagtcgccgaaggttacgaagaatggggttatgtccagccttacgccgacagtccaatagaccatgaatttataggcgagcatgtttatatcaaaataataaatcaggcaaaaaagtttgtttacataaatacgccgtatcttatagttgatgacaatttgctctccgctctgacaaccgccgcgaaaagcggagttgacgtgcggattattactcctcacaggtgggacaaatggatagtggcgattacgtcccgttcatatttccgcaggctcattcacgccggagtaaaagtttacgaatacacttcaggatttaaccacggaaaaacatttgtttccgacgacataatcgccactgtcggcactaccaatcttgatttccgcagtttataccttcactttgaatgcggcgtagtgatttactcaagcaaaacaataaacgacattaaaaatgatttcttaaaaacgcttccgatttctaaggaaattaccttaaaagattgcgacaggaacgcctttcaaagaataataccggatgttcttcgcatctttgcgccattgatgtaa

SEQ ID NO: 54274 - protein, 522 aa, Unknown
  Obtained from environmental sample
  DOMAIN (436)...(463): Phospholipase D Active site motif
  misc_feature (1)..(522): Xaa is any amino acid
MNKRKKLVNTLFGRRALVVIALLIQISLIIILIARVSVHFQYSYLILYFLSIIACIHVLNKHEKAGYKLTWIFLILLFPFFGGVLYIYFNTISTQKKLKKALDKNIRDSRGAFFLAGNRLDELIDEHPEFRTHAQYLQNFAGFPVFSNTRQIYLDSGEAFYRKVLEELEKAKSYIFLEFFILKEGVMLNTILDILERKAAEGLDVRIMYDDLGCIFTLPENYHKTLEQRGIKCFVFNPFRPIVTSLQNNRDHRKIISIDGRIVFTGGLNLADEYINIVERFGHWKDAAIMLEGDGAWAFTLIFLQMWNLKPGDKDNYEVFFPWKDNIIEHTEKGVAEGYEEWGYVQPYADSPIDHEFIGEHVYIKIINQAKKFVYINTPYLIVDDNLLSALTTAAKSGVDVRIITPHRWDKWIVAITSRSYFRRLIHAGVKVYEYTSGFNHGKTFVSDDIIATVGTTNLDFRSLYLHFECGVVIYSSKTINDIKNDFLKTLPISKEITLKDCDRNAFQRIIPDVLRIFAPLM

SEQ ID NO: 54275 - DNA, 492 bp, Unknown
  Obtained from environmental sample
  misc_feature (1)..(492): n is a, c, g, or t
atgcccggcagcggctacggtatggggcttttagtcatagcggggcagtatataggcgccggcgattataacggcgcaaaacggtacacaagaaaaatactgataattgcatatattacatatttggtaataaatgtcaacgttttcctgtttatggatcaaatcgccgcctttttcaaactgtcgcctgaagcgcacgatctgtgcctggacttcctgaagattcactgtattacatcaacattgttctggtgtttctcctttgtgcttcccaacgcgctgaaagccgccggagacgcccgttatgtgatgattgtcgccgcaagcaccatgtggcttgtcagggtatgttccgcctacatcatggcgttccctctcgggctcggtcctgtgggagttatcctggcgatgggcgcggatttcctgttcaggggaatcttcttcggcgcccgctggttcagcggcaagtggatggagaaaagagttatataa

SEQ ID NO: 54276 - protein, 163 aa, Unknown
  Obtained from environmental sample
  DOMAIN (1)...(121): MatE
  misc_feature (1)..(163): Xaa is any amino acid
MPGSGYGMGLLVIAGQYIGAGDYNGAKRYTRKILIIAYITYLVINVNVFLFMDQIAAFFKLSPEAHDLCLDFLKIHCITSTLFWCFSFVLPNALKAAGDARYVMIVAASTMWLVRVCSAYIMAFPLGLGPVGVILAMGADFLFRGIFFGARWFSGKWMEKRVI

SEQ ID NO: 54277 - DNA, 369 bp, Unknown
  Obtained from environmental sample
  misc_feature (1)..(369): n is a, c, g, or t
ttgggaactccggcggaaatttattataagtttgaagggactaatacttcaggttctcataaactaaactcggcgggacctcaggcgtattttgcgaaagaggccggacttacatcacttacaacggaaacaggcgcggggcaatggggttccgcaatgtcaatggcctgcgatttttacaatctaaaattgactgtttacatggtaaaggtaagcagtgaacagaagccttaccgcaaagcgttgatggaaacttacggcgcanacgttataccctccccgtccataccaccgaatcgggaaagaaaattctggaaagcgatcctgacacaaccgnttctcttggctgcgccatttccgaggcgatag

SEQ ID NO: 54278 - protein, 122 aa, Unknown
  Obtained from environmental sample
  misc_feature (1)..(122): Xaa is any amino acid
MGTPAEIYYKFEGTNTSGSHKLNSAGPQAYFAKEAGLTSLTTETGAGQWGSAMSMACDFYNLKLTVYMVKVSSEQKPYRKALMETYGAXVIPSPSIPPNRERKFWKAILTQPXLLAAPFPRR

SEQ ID NO: 54279 - DNA, 360 bp, Unknown
  Obtained from environmental sample
  misc_feature (1)..(360): n is a, c, g, or t
atgactgacggctgctacctggatttcagggccatagaccgactggaagaaataggccggctcggtatcggtaccatagcccagagcttcagccttgacccggtaacgaaagaaatgaacgaagcctccgcttcactggttttgggcggacagggaaacctttggtcggaaattatctacgcgggaaaaatagccgagtacatgatcttcccgaggatctgtgccatagccgagactctatggtcacaaaggaaacaaaagaccgcgcctgacttggaggaattcgcgcagaggcttgctattcatcaaagccggcttgataaactgggactgttgcaataccgcggaccgctggggtaa

SEQ ID NO: 54280 - protein, 119 aa, Unknown
  Obtained from environmental sample
  misc_feature (1)..(119): Xaa is any amino acid
MTDGCYLDFRAIDRLEEIGRLGIGTIAQSFSLDPVTKEMNEASASLVLGGQGNLWSEIIYAGKIAEYMIFPRICAIAETLWSQRKQKTAPDLEEFAQRLAIHQSRLDKLGLLQYRGPLG

SEQ ID NO: 54281 - DNA, 1020 bp, Unknown
  Obtained from environmental sample
  misc_feature (1)..(1020): n is a, c, g, or t
atgcagaaagtaaaactgggccgtaccaatcttgaagtaaaaaaggatgcttttggagccctgccggtacagcgggcttccatggacgaagccgtaaaaattttgcggaaagccctggacggcggcattaattttttagacagcgcccggggttattcggacagtgaagaaaaaataggcgcggctctttcttcacggcgcggggaattttttatagctacaaagacccctgcaaaaaacggcatcgagctgaaaaaggatttggaaaccagtcttggcaaactcaagacagatcatattgatgtttaccaattccataaccccggatttgttccgcagcccggcgatgaaaccggcctttatgacgcggccctggaagttaaagcccagggcaagatccgctttatcggaatcagcaaccacaggttaacggtggccagggaagcggttgagagcgggctgtacgatacactccagttcccgttcagctatctttcaacagaagaagagatcggccttacaaaactctgcgcggaaaaaaatgtcggctttatagccatgaaggccctgagcggggggctgatcaccgatatttttgcagcccaggcatggatggcacaatttgccaatgtggtacccatttggggaatccagcgggaaagcgagctggacgagctttttcaggctatgaaacaaatcggcggcattactcccgaacaacaggccaaaattgtaaaagaccgttctgagctgggcggggaattttgccggggctgcggctactgcctgccttgccccgccgaaatccccatcaacacggccgcgagaatttctctgcttatgacgcgtgcaccggttgccgggttcctgacagaagattttcagaagaccatgagcaaaattgaaaattgtcagcgctgcggccattgtacttctggctgcccatataacctggacaccccggcgctactgaaaaaaaacctccattggtacagggattttattgctcaaaaaagataa

SEQ ID NO: 54282 - protein, 339 aa, Unknown
  Obtained from environmental sample
  DOMAIN (7)...(248): Aldo/keto reductase family
  misc_feature (1)..(339): Xaa is any amino acid
MQKVKLGRTNLEVKKDAFGALPVQRASMDEAVKILRKALDGGINFLDSARGYSDSEEKIGAALSSRRGEFFIATKTPAKNGIELKKDLETSLGKLKTDHIDVYQFHNPGFVPQPGDETGLYDAALEVKAQGKIRFIGISNHRLTVAREAVESGLYDTLQFPFSYLSTEEEIGLTKLCAEKNVGFIAMKALSGGLITDIFAAQAWMAQFANVVPIWGIQRESELDELFQAMKQIGGITPEQQAKIVKDRSELGGEFCRGCGYCLPCPAEIPINTAARISLLMTRAPVAGFLTEDFQKTMSKIENCQRCGHCTSGCPYNLDTPALLKKNLHWYRDFIAQKR

SEQ ID NO: 54283 - DNA, 366 bp, Unknown
  Obtained from environmental sample
  misc_feature (1)..(366): n is a, c, g, or t
gtgcattttgcttccgcttccggtgcggcgacatcattctttgatcgtttatttttcagccttgagtctgaagcaaaaagattgaaattcggcgcgtgtattgttagttgccggaggggaggttcaaccgccacattcgaccaattaaataagtattttaccaatgggcaaatgcccgtcgtatcgtcttgttattggaatggtatacatggatataaaccggaagacgtatacgccgataaagaaggcgttcgtacattaacaatattggcaaacaatatggcatatctcatcaaatgcaagcaaaaaagcaatattgaactgccggaagagccgcccccggccatgacgaattttatccgctga

SEQ ID NO: 54284 - protein, 121 aa, Unknown
  Obtained from environmental sample
  misc_feature (1)..(121): Xaa is any amino acid
MHFASASGAATSFFDRLFFSLESEAKRLKFGACIVSCRRGGSTATFDQLNKYFTNGQMPVVSSCYWNGIHGYKPEDVYADKEGVRTLTILANNMAYLIKCKQKSNIELPEEPPPAMTNFIR

SEQ ID NO: 54285 - DNA, 408 bp, Unknown
  Obtained from environmental sample
  misc_feature (1)..(408): n is a, c, g, or t
atgattgcgtcgtcgatgaccactgacagctatatacgggatattgtaaaccatccggcgttcataggtttcggagaacgtatgctgtcctgtgatgataattccgcctattacaatacccgaatttccgatgccgcctcgcttatgccgtatcatcaaaacgtgaaccctgccgttgttgtgaaagcgctcaattacatgattaacgaagtacgagatggcaaaactattttctacgatttttatacggaacggcaaaagaaggcggaccccgctaaaacacacaccggacttttctttttcagggggaagcccggtgcgccttttgccattgtatgtcccggcggcggttttgcatatgtcggatcgctccacgaaggtttcccccctagcgttggcgataagtaa

SEQ ID NO: 54286 - protein, 135 aa, Unknown
  Obtained from environmental sample
  misc_feature (1)..(135): Xaa is any amino acid
MIASSMTTDSYIRDIVNHPAFIGFGERMLSCDDNSAYYNTRISDAASLMPYHQNVNPAVVVKALNYMINEVRDGKTIFYDFYTERQKKADPAKTHTGLFFFRGKPGAPFAIVCPGGGFAYVGSLHEGFPPSVGDK

SEQ ID NO: 54287 - DNA, 696 bp, Unknown
  Obtained from environmental sample
  misc_feature (1)..(696): n is a, c, g, or t
atggcaaaactattttctacgatttttatacggaacggcaaaagaaggcggaccccgctaaaacacacaccggacttttctttttcagggggaagcccggtgcgccttttgccattgtatgtcccggcggcggttttgcatatgtcggatcgctccacgaaggtttcccccctagcgttggcgataagtaaaaaagggtataacgcttttgtaatcaggtaccagataggcggggaacgctttgcctgtgaggatttatcggcggcgattgcctacatctttaccaattcccggacacttgaactcaatacagaagattactccctttggggcggctcggcagggggacgaatggtcgcacggctttcatccaatggaactgcattttatggcgaaaaggattatcccaaaccgacagcggcggtcatgctctataccggacattcagactttgccgtaaataatccgccgactttcgccgttttaggcgagatggacaatatcgcaagtccggcaattatggaacagcgcgttaatgacatgaaagccgcaggaattgacgttgaattttacctgtatccgaatgtcgggcacggtttcggtcttggcgttggcacttttgcggaaggctggcttaacaacgccgtgcgtttttgggaaaagcacattaaaaaaaaaggttggaggattatatga

SEQ ID NO: 54288 - protein, 231 aa, Unknown
  Obtained from environmental sample
  DOMAIN (53)...(226): Prolyl oligopeptidase family
  misc_feature (1)..(231): Xaa is any amino acid
MAKLFSTIFIRNGKRRRTPLKHTPDFSFSGGSPVRLLPLYVPAAVLHMSDRSTKVSPLALAISKKGYNAFVIRYQIGGERFACEDLSAAIAYIFTNSRTLELNTEDYSLWGGSAGGRMVARLSSNGTAFYGEKDYPKPTAAVMLYTGHSDFAVNNPPTFAVLGEMDNIASPAIMEQRVNDMKAAGIDVEFYLYPNVGHGFGLGVGTFAEGWLNNAVRFWEKHIKKKGWRII

SEQ ID NO: 54289 - DNA, 1464 bp, Unknown
  Obtained from environmental sample
  misc_feature (1)..(1464): n is a, c, g, or t
atgcctgcaattaattcatttataaaaaaaataacgccgaaacgccccttgtatgtgcagattattttcacggtcttttcatatttgataatggtcgtgttaagttatttctttaccagaaacattgtcgacaagtacttaaagcaaaacacggaaaatatttttgtttccctgcaagcgcaaatcatgaccgacattatggagccgcggataacgctggaaagtttttcacgcacggtgcgggacatgattattaacggcgataacgcggaaaacttgcgggaatatttcaacgacatgtcaaattacctgtcgcaggacaaacaaagctatgtaaattttaacggctttatgggttattttgaaacatttccgggagggccggtttttatagaaagccttttgggctcccggtcggccgactatgatccttcacagcgaaaatggtatcaggacgcggtaaaagcggacggaaataccgccgaaacattgatgtataatgatgttatctatgaagatatcatgttcatttattcgcattgtatttttgacaacaaaggaaaccgccttggagtcgtcgccctcagggtaaaaattgataatatcaaaaaatacattgttaataccgttatggtacagggttcgtacgggatactgatcagcaccgacggggttgttcttgcccatccaaacgaagcgtttgtccgtgagaacgcgcataatcctaaaatacctttttcaatttttatgaatgaactggataacggaattgaaataactgaacgtccgcttataacatataaaagcgaacgcgccctggcgtctttcaagttcctgcccaacggctggattatgggaatagtaacgcctaaggggccttactataaaagcatatttaatatggctttattcctgatcctcctgggcacagctctcgcttcggtgcttattttagttttaatccgcgttgacgcggcaagaaccaaatcggacatggagaacaagcagaaatccacatttctggcgaacatgagccacgaaatacgcacccccatgaacgccattataggcatgacagacctgttaaattacgagccgcttaacaaaaggcagatgggttttatcaacgatataaaagtgtcagcaagatccctgctttccattatcaacgacatactggacatgtcaaaaatagaggcgggtaaatttgagcttaacccgattaattacgatttccacatgcttctggataatattttttccatgttcagctttgtatcgcagaaaaaagggcttgaattcaaatatgaaaccgagggaaacataccccgctacctgttcggcgacgacataaggcttaaacaggtattaactaatatttgctctaacgcggttaaatataccgaaaaaggatatgtaagattcagggtaaccgccaccgccaacaaacttatgttgaaataa

SEQ ID NO: 54290 - protein, 487 aa, Unknown
  Obtained from environmental sample
  DOMAIN (163)...(242): Cache domain
  misc_feature (1)..(487): Xaa is any amino acid
MPAINSFIKKITPKRPLYVQIIFTVFSYLIMVVLSYFFTRNIVDKYLKQNTENIFVSLQAQIMTDIMEPRITLESFSRTVRDMIINGDNAENLREYFNDMSNYLSQDKQSYVNFNGFMGYFETFPGGPVFIESLLGSRSADYDPSQRKWYQDAVKADGNTAETLMYNDVIYEDIMFIYSHCIFDNKGNRLGVVALRVKIDNIKKYIVNTVMVQGSYGILISTDGVVLAHPNEAFVRENAHNPKIPFSIFMNELDNGIEITERPLITYKSERALASFKFLPNGWIMGIVTPKGPYYKSIFNMALFLILLGTALASVLILVLIRVDAARTKSDMENKQKSTFLANMSHEIRTPMNAIIGMTDLLNYEPLNKRQMGFINDIKVSARSLLSIINDILDMSKIEAGKFELNPINYDFHMLLDNIFSMFSFVSQKKGLEFKYETEGNIPRYLFGDDIRLKQVLTNICSNAVKYTEKGYVRFRVTATANKLMLK

SEQ ID NO: 54291 - DNA, 600 bp, Unknown
  Obtained from environmental sample
  misc_feature (1)..(600): n is a, c, g, or t
atggccgttggacgaaaaccagtgactgacacctggggagccgccgcggcgggtatcgatcatagcccgagaggcgtcgccgttgacgacagaatgagaactaacattcccggtatctgggcggcgggggacgttacaggcaagagccttcttgcccattccgcctaccgcatggcggaagtcgccgttgcggacattcttgcggggggccatgccgacagtaagacaaatcgaatgcgttataacgccgtgccctgggcggtgtacggtcttaccgaggccggcggagtcggtatcacagagcaggaagccgaagcaaaaggcattgctattttaaaatcggttcttcccatgagggtttcaggccgcttcgtcgccgaaaacacgctgatgggtcatggggcagtaaaggttatcgcggacgcgaatgatcgccgcatcctgggcgttcacgctgtgggcgcgtacgcttcggaatttatctggggcggcgcagcgcttatagaacaggaattcagaactgacgaagtaaaacaacttatttttccacacccaacggtgagcgaactcatccgtgacgcggtatgggcaatggagtaa

SEQ ID NO: 54292 - protein, 199 aa, Unknown
  Obtained from environmental sample
  DOMAIN (84)...(195): Pyridine nucleotide-disulphide oxidoreductase, dimerisation domain
  misc_feature (1)..(199): Xaa is any amino acid
MAVGRKPVTDTWGAAAAGIDHSPRGVAVDDRMRTNIPGIWAAGDVTGKSLLAHSAYRMAEVAVADILAGGHADSKTNRMRYNAVPWAVYGLTEAGGVGITEQEAEAKGIAILKSVLPMRVSGRFVAENTLMGHGAVKVIADANDRRILGVHAVGAYASEFIWGGAALIEQEFRTDEVKQLIFPHPTVSELIRDAVWAME

SEQ ID NO: 54293 - DNA, 735 bp, Unknown
  Obtained from environmental sample
  misc_feature (1)..(735): n is a, c, g, or t
ttgaatctggtgattgtagccgacacaacggaagaacttttacaccccgacgtattgcaggcggtggataatctttccgcctaccttacaactcatattccggcggtagggaaggtcgtcggttttacggatattatcaagcggatcaatcaggtgttcaatgtcggcgaaagtcctgagggactgcaaaaaactgtgtcgcataacacgacggataatttcggctttaatgatgattcaggttttggaaattttggtttcggcgattttggttttaacgatactaaatatgttgaaacgccgaagcaggaaaacaattttgacataactcagtacaacacggcggatattttacggtttctggacaatgccgccggaaaatcaccgaatttaagcggcagtgatttagtaaaagaattgaaacgccttaccaattatgacggcatggcatattatgaaattcccgcaaacccaaaacgttacggcaaggaaacgtatgaggaactgcagcgcctgatagccaattatctggttctgcttgccggagatgaagattccggctactccaatgacccgcttgagccaacggcaatcagaacaatgatacaactgcgcacaacaggaagcagggattctcaggcggttatcgacataataaaagaatatattgatgtcaactttcccgagaatgtgcgggtaataatcggcggcgctcgtgccgctcggccgatctga

SEQ ID NO: 54294 - protein, 244 aa, Unknown
  Obtained from environmental sample
  misc_feature (1)..(244): Xaa is any amino acid
MNLVIVADTTEELLHPDVLQAVDNLSAYLTTHIPAVGKVVGFTDIIKRINQVFNVGESPEGLQKTVSHNTTDNFGFNDDSGFGNFGFGDFGFNDTKYVETPKQENNFDITQYNTADILRFLDNAAGKSPNLSGSDLVKELKRLTNYDGMAYYEIPANPKRYGKETYEELQRLIANYLVLLAGDEDSGYSNDPLEPTAIRTMIQLRTTGSRDSQAVIDIIKEYIDVNFPENVRVIIGGARAARPI

SEQ ID NO: 54295 - DNA, 1017 bp, Unknown
  Obtained from environmental sample
  misc_feature (1)..(1017): n is a, c, g, or t
atgtcgacgcagtacatacccggagacagtgaaagtatcattgtttcggattttgttcccgaagatttttcaggaacagatgaggaaattacagagctaaaaaggcgtatcgcgtcatgggatttgttccgtggttctcttgtctccgatgatctttcggcaacgcaaattttgatcacccttgatgccctgaccgcggattttacgcgtcccgaagtaacggtcagcattgataaaattcgtaaaatagcgagagaaatatttgcagactccgctgaggtgtatttcacaggacagccgattgtcaacgaagttattaataaatctatgataacagacaacattttactgataccgttagttgtcatcgtactgctggcaatgctgtttttttcgttcaggcgttttacttttgtagtactgccgtttttaaccgttatcatggcggttgtctgggctataggaatggcggcgttgttagggataaaactttcggttattacaaccatactgcccgtgattcttgttgcggtcggcagcgcctacggtattcacatcgttacccattacatggaagatacgcggaatatgccgttgagtgttgaggaacatcgcggtttggttttagctttggtaaaaaaattaattaagcctgtatttctggcggcgcttacaacaatggcgggatttatatcgttctgttttacgccgattgtcccgatgagagagtttggattttgcgccggctttggggtgatttccgctttttttgtggcggcgctgtttattccggcaatgtttctgcttcgcggtccccgcgttttgaaagagcggcgaaaaggacaaacaagcggcggctttaacaatactgtcgcgggaatttttacccgcattgcgggaaaaaaagtactggtgcttgttcttgcggcgctggctgtggtcatttcactgtacggactttcaaaggtaataattgacaacgcagtagttgagtttttcagaaagagaccgacataa

SEQ ID NO: 54296 - protein, 338 aa, Unknown
  Obtained from environmental sample
  DOMAIN (47)...(160): MMPL family
  misc_feature (1)..(338): Xaa is any amino acid
MSTQYIPGDSESIIVSDFVPEDFSGTDEEITELKRRIASWDLFRGSLVSDDLSATQILITLDALTADFTRPEVTVSIDKIRKIAREIFADSAEVYFTGQPIVNEVINKSMITDNILLIPLVVIVLLAMLFFSFRRFTFVVLPFLTVIMAVVWAIGMAALLGIKLSVITTILPVILVAVGSAYGIHIVTHYMEDTRNMPLSVEEHRGLVLALVKKLIKPVFLAALTTMAGFISFCFTPIVPMREFGFCAGFGVISAFFVAALFIPAMFLLRGPRVLKERRKGQTSGGFNNTVAGIFTRIAGKKVLVLVLAALAVVISLYGLSKVIIDNAVVEFFRKRPT

SEQ ID NO: 54297 - DNA, 897 bp, Unknown
  Obtained from environmental sample
  misc_feature (1)..(897): n is a, c, g, or t
gtgggagttatgtcgggaaacaacactctcaccaataacaaagcccgcgcggatatgataatcggcgcaagcggatcggaagcattaccaactataaatataggagcaaatgaaagagaaggcgcagatgtcagtctgggtacggcacagaactctgttttcagcagtttctttactaccacaatttggactttaggcagtactttgacagtaggcggcaatttgcccatactccagatgaatacgcaaagccccgctcccactctgccgggatcgaacccgacgttaggcacggcggctaatcccttcctcgttaccaacgaagccgatctccgcaaggtcggcactgaaacaactgccgggggctggacgctttcggcgcactacaaacagacggcgaacatcacgatgacaggcgcatttacggggattgtctatacttcctccaaatttaacggctcatatgacggaggcggatataccatcaccggattgaacataaccgccacgagcagtaatttaggtttattcggctatattggaagcggcacggtgaaaaacgtgaacgcttccggcacggtaaccggaaccggatcggtagcgggtatcggaggcattgcgggcgcaaacgaaggcacgattgaaaactgctcctttagcggaactgtaaccggcagtacaacaagccttcaagtcggcggtattgtcggaaggaataccggcacggtgaaaaacagcagaagcagtgcaacggtaagcggcaacgatcaggtcggcggcattgccggaaggaatgagggcaagattgaagccagttacaacacgggagcagttagcgcaagcaaccagtatgtcggcggtatcgccggaacaaataccggaagcggtaatacataa

SEQ ID NO: 54298 - protein, 298 aa, Unknown
  Obtained from environmental sample
  DOMAIN (199)...(224): The GLUG motif
  misc_feature (1)..(298): Xaa is any amino acid
MGVMSGNNTLTNNKARADMIIGASGSEALPTINIGANEREGADVSLGTAQNSVFSSFFTTTIWTLGSTLTVGGNLPILQMNTQSPAPTLPGSNPTLGTAANPFLVTNEADLRKVGTETTAGGWTLSAHYKQTANITMTGAFTGIVYTSSKFNGSYDGGGYTITGLNITATSSNLGLFGYIGSGTVKNVNASGTVTGTGSVAGIGGIAGANEGTIENCSFSGTVTGSTTSLQVGGIVGRNTGTVKNSRSSATVSGNDQVGGIAGRNEGKIEASYNTGAVSASNQYVGGIAGTNTGSGNT

SEQ ID NO: 54299 - DNA, 1065 bp, Unknown
  Obtained from environmental sample
  misc_feature (1)..(1065): n is a, c, g, or t
atgccctgtgggctattccctgtcgctgagaaccgtattgtttcccctgtacccacggcttcgatcacaggaagcggaacgagtatcaaggcttatcatgacgcttccttaagaaaagcgggggtaaaaatggccggaccgcaggttttatcggcgattttaattgtcaatctccaaaaagaaaacgccgcgtccgtcgctgaagaaatccggcgggaacttgagagtggaggagtgcaaacaacctttttcgcttttaaagggcgccctgatactcccccaaaaggccaatgggatatcgcttttagcctgggaggcgacgggactgtcctgtatgcggcgcgaatcctggcccattcaggcacgcccatactccccgtacatcttggaaccctgggatttatcgccggagtggaaaggcgcaaatggcccgaagtttacaaaagctggattatgggaaaaataaagccttccaggcgctgtatgctggaattttccattgaaaggggcggtaaatatgccgttaataatagtgtatgcctgaatgacgtggtaatttcacctttgggaatagcaaagctgatacgtttgcaggcaagaacagaggttgcccccggcgaatttgcggaaattggctgctatcgctcggacgggcttataatcgctactcccaccggttccacggcatattccatggcggccggcgggccaatactggatccggagatggaagcgcaaatcatcagcccaatctgcccctttaccctgtcgaatcgcccgctggtgcttccctcacggcaggcattacagataacggtctgtaaagagcagcgaagcggagtgcttctgacttccgacgggcaggaaaccttcgctctggaaccatgcgatttagtcaccataaaacattcgccgcattatgccatcctgattaccgcggggtattcgtcgtattacaaagcgctggcggaaaaactcgcctggtcctccgaaggaggcatgtcctccaaaggagtcggcgcctccaaaggagtcggcgcctccataggaggcgcacatgcttga

SEQ ID NO: 54300 - protein, 354 aa, Unknown
  Obtained from environmental sample
  DOMAIN (51)...(313): ATP-NAD kinase
  misc_feature (1)..(354): Xaa is any amino acid
MPCGLFPVAENRIVSPVPTASITGSGTSIKAYHDASLRKAGVKMAGPQVLSAILIVNLQKENAASVAEEIRRELESGGVQTTFFAFKGRPDTPPKGQWDIAFSLGGDGTVLYAARILAHSGTPILPVHLGTLGFIAGVERRKWPEVYKSWIMGKIKPSRRCMLEFSIERGGKYAVNNSVCLNDVVISPLGIAKLIRLQARTEVAPGEFAEIGCYRSDGLIIATPTGSTAYSMAAGGPILDPEMEAQIISPICPFTLSNRPLVLPSRQALQITVCKEQRSGVLLTSDGQETFALEPCDLVTIKHSPHYAILITAGYSSYYKALAEKLAWSSEGGMSSKGVGASKGVGASIGGAHA

SEQ ID NO: 54301 - DNA, 1032 bp, Unknown
  Obtained from environmental sample
  misc_feature (1)..(1032): n is a, c, g, or t
atggtggaggatcagataggtccgggcgagagggctcgccttctcctgcaaatagccaaagaacatatccgtttcgattacgccctcgcgttgcgaagccccgccacagccctccaccttgcgcttaaagccctggaactgaaagaaggggacggggttctggtttccgctctttccccgcgttattacgcccagacgcttgccgacctgcgcctaacgcccctgttctgcgacgtgtcgtattcgttcccctgcataagccgcgagagcgttgaaaaagcgataacggcaaaaccgtcaggggtagagccccgctgcgtaatccttcaccatactttaggctttgtgccggacgcggcgtccatcgccggtcttggcattcccgttattgaggatatttcccaaagttacacacctccgcaggaaacggggaatgaccagactgaagaagcaaatgaaaaaacagcggtatcggggactgaaccgggacaggcaatccacggggtacttgccattttagggcttgaggaaagggatatgcttacagccggcggaggggcgatcctgtttgccatgaacagaaaggacagccagatgctgcgcgccttttcaaatataccgcccgagtactgcctgcccgacattaacgccgccctggcggccgcgcaattcagggaggcgccgcgtaacatggcaaggcgccaggaaatcgccaaggcctatacccaggcaagcctccgtaccaaacacaagcgttttgttcccttggacggtacgggcgaatactgcaattatgtctttcccctcgtgcttgagaccggtatgaaggatgtcgcggcttatgcccgcaaaaaagaaataatcgtggaaagcgcctttgagcaaagtctggccggagcgggggttatagattcggttttatgccctgtgggctattccctgtcgctgagaaccgtattgtttcccctgtacccacggcttcgatcacaggaagcggaacgagtatcaaggcttatcatgacgcttccttaa

SEQ ID NO: 54302 - protein, 343 aa, Unknown
  Obtained from environmental sample
  DOMAIN (4)...(340): DegT/DnrJ/EryC1/StrS aminotransferase family
  misc_feature (1)..(343): Xaa is any amino acid
MVEDQIGPGERARLLLQIAKEHIRFDYALALRSPATALHLALKALELKEGDGVLVSALSPRYYAQTLADLRLTPLFCDVSYSFPCISRESVEKAITAKPSGVEPRCVILHHTLGFVPDAASIAGLGIPVIEDISQSYTPPQETGNDQTEEANEKTAVSGTEPGQAIHGVLAILGLEERDMLTAGGGAILFAMNRKDSQMLRAFSNIPPEYCLPDINAALAAAQFREAPRNMARRQEIAKAYTQASLRTKHKRFVPLDGTGEYCNYVFPLVLETGMKDVAAYARKKEIIVESAFEQSLAGAGVIDSVLCPVGYSLSLRTVLFPLYPRLRSQEAERVSRLIMTLP

SEQ ID NO: 54303 - DNA, 402 bp, Unknown
  Obtained from environmental sample
  misc_feature (1)..(402): n is a, c, g, or t
ttgaattggacgtcacccccgcccgttacagaactggaactgcccacatccgcaacagacgagctagaaacgccaccgacagaggaagacgaactaccatttgctgaactggaactaatcacatccgcaatagacgagctagaaatgccaccgacagaggaagacgaggaactgccattatctacggaactactgctaacgacaatgttttctgccgaagacgaagaaacgatattatcgctggaactagaactacctgctataccgccaccagcagagctactactaccacctccaacgacctcaactgacgaggacgaatcatcatcgccaccgcctccaccgccagatgagcaggaaaaagtgaataccatagcaaacaaaaagctcggccgattctga

SEQ ID NO: 54304 - protein, 133 aa, Unknown
  Obtained from environmental sample
  misc_feature (1)..(133): Xaa is any amino acid
MNWTSPPPVTELELPTSATDELETPPTEEDELPFAELELITSAIDELEMPPTEEDEELPLSTELLLTTMFSAEDEETILSLELELPAIPPPAELLLPPPTTSTDEDESSSPPPPPPDEQEKVNTIANKKLGRF

SEQ ID NO: 54305 - DNA, 927 bp, Unknown
  Obtained from environmental sample
  misc_feature (1)..(927): n is a, c, g, or t
ttgtttgctatggtattcactttttcctgctcatctggcggtggaggcggtggcgatgatgattcgtcctcgtcagttgaggtcgttggaggtggtagtagtagctctgctggtggcggtatagcaggtagttctagttccagcgataatatcgtttcttcgtcttcggcagaaaacattgtcgttagcagtagttccgtagataatggcagttcctcgtcttcctctgtcggtggcatttctagctcgtctattgcggatgtgattagttccagttcagcaaatggtagttcgtcttcctctgtcggtggcgtttctagctcgtctgttgcggatgtgggcagttccagttctgtaacgggcgggggtgacgtccaattcaacgaaaattcgcaaatctataatagagattacgatgataatggcagttggcatattggcgatgcctataatggtagcggagttataaaattagtcgcatacaacaacggcaacgaaattttaataaatgcaggaagtgtaacgaatggaattgtcaatttgaatttgcctcaaacaataaatctccctgatgaatattttcgtaatcttattgatgaagacgaacaaagttattgtacggattatccaacagatattaaaatagttgttccagatggatttaaactatttgatagcaatgaagaacttttgggcagattgtatattcaatatcgggatgaacagattcgagaatacattgagtattggtatcttacaaaagcaggaaaaataacttgtgatttaggaagtgctatcgtaaaaatggatgctaacgttggttggaacaaaacgtattaccataaaaactacgtaggcaactcaataattgaacgtagtacaacgaatattctaacgaaagaagtgaagtggtttattctcgattaa

SEQ ID NO: 54306 - protein, 308 aa, Unknown
  Obtained from environmental sample
  misc_feature (1)..(308): Xaa is any amino acid
MFAMVFTFSCSSGGGGGGDDDSSSSVEVVGGGSSSSAGGGIAGSSSSSDNIVSSSSAENIVVSSSSVDNGSSSSSSVGGISSSSIADVISSSSANGSSSSSVGGVSSSSVADVGSSSSVTGGGDVQFNENSQIYNRDYDDNGSWHIGDAYNGSGVIKLVAYNNGNEILINAGSVTNGIVNLNLPQTINLPDEYFRNLIDEDEQSYCTDYPTDIKIVVPDGFKLFDSNEELLGRLYIQYRDEQIREYIEYWYLTKAGKITCDLGSAIVKMDANVGWNKTYYHKNYVGNSIIERSTTNILTKEVKWFILD

SEQ ID NO: 54307 - DNA, 591 bp, Unknown
  Obtained from environmental sample
  misc_feature (1)..(591): n is a, c, g, or t
ttgcagagcgctatacgacattatgaaactcaagctcttaaagatgcactcacaaaatacggcttcacagcagcttttggcggcggtcgcagagatgaggaaaaatcccgtgccaaagagagaattttttcctttcgcaacgcacatcacgcatgggatccaaaaaatcagcgaccggaaatgtggaagctctacaacacaaaaatcaacaaaggcgaaagcattcgggttttcccaatttccaactggacggaaaaagatatttggcaatatatccgcagcgagaatattcccattgttccgctctattttgcggctccgcgtccggttgtattccgtagtggcaatatcattatggtggacgatgagcgtatgcgtcttttgccagacgaaaaaccggaaattaaaaaagtacgttttcgtacccttggctgttatcctctaactggcggagtggaatcagaagcagatacgctggacacagtgataaatgaaattttgggagccgccacatccgagcgcaccagccgaataatagacaaagaggctgcaggcagcatggaacgccgcaagcgagaggggtatttttaa

SEQ ID NO: 54308 - protein, 196 aa, Unknown
  Obtained from environmental sample
  DOMAIN (3)...(151): Phosphoadenosine phosphosulfate reductase family
  misc_feature (1)..(196): Xaa is any amino acid
MQSAIRHYETQALKDALTKYGFTAAFGGGRRDEEKSRAKERIFSFRNAHHAWDPKNQRPEMWKLYNTKINKGESIRVFPISNWTEKDIWQYIRSENIPIVPLYFAAPRPVVFRSGNIIMVDDERMRLLPDEKPEIKKVRFRTLGCYPLTGGVESEADTLDTVINEILGAATSERTSRIIDKEAAGSMERRKREGYF

SEQ ID NO: 54309 - DNA, 759 bp, Unknown
  Obtained from environmental sample
  misc_feature (1)..(759): n is a, c, g, or t
atgattatgtgcaatgggctgaaaacggaggtaaccagcatgaatatagcggcgcatcatcttgatttcaaggaactgaacaaaaggataagaaccgccacggaagccgtctgcatcgacggctgtttcgggcagaggtttatcgccagcggcatgaccggcaaaaacgtgacgattaacggaacgccgggaaacgcgttaggcgcttactttaacggcggaaccattatggtaaacggcaacgcgcaggacgccgtaggcgacacgatgaatgacggtaaaataatcattcacggcagcgccggcgacgcgctcggctacgccatgaggggcggggaaatttatgtccgcgacaacgcgggatacagaaccggaattcacatgaaggaatacagggaaaaaaaaccggtaatcgtcatcggcggcagagcgggcagttttctgggcgaatacctcgccggcgggctcatcgtggttcttggcataggctgcaatcatgaaatcccggtctggtattttacgggcacgggaatgcacggcggaaaaatctttatcagaaccgataaggaactctcttcactcccagcgcaggtcattgaggacgtggccgatgataatgatctgcatgagattgcgccgtatgtcggtgagtttgcgaaatatttcgacatggacgcgcagcagcttttgaaagacaggtattacgtgttgaggcctaacgcaaggaacccgtataagcagttatatacggccaattag

SEQ ID NO: 54310 - protein, 252 aa, Unknown
  Obtained from environmental sample
  DOMAIN (11)...(222): GXGXG motif
  misc_feature (1)..(252): Xaa is any amino acid
MIMCNGLKTEVTSMNIAAHHLDFKELNKRIRTATEAVCIDGCFGQRFIASGMTGKNVTINGTPGNALGAYFNGGTIMVNGNAQDAVGDTMNDGKIIIHGSAGDALGYAMRGGEIYVRDNAGYRTGIHMKEYREKKPVIVIGGRAGSFLGEYLAGGLIVVLGIGCNHEIPVWYFTGTGMHGGKIFIRTDKELSSLPAQVIEDVADDNDLHEIAPYVGEFAKYFDMDAQQLLKDRYYVLRPNARNPYKQLYTAN

SEQ ID NO: 54311 - DNA, 1542 bp, Unknown
  Obtained from environmental sample
  misc_feature (1)..(1542): n is a, c, g, or t
ttggctatccgctgcattcagaacattccagctaaacccagtgaaaagaaaaacgacataaaactatacagcacggttcaaataggttctgggctgtggatggcggagaatttgaattataaaacaggaaaatcctggtgctacgaaaacgatgattacaactgcaatacctacggacgcttatacgactggaacactgcggttaatgcttgcccagcaggttggcgtttgcctacgcggcgtgaatggaacgaagcatcagcagccgagtttgccgcaaagctcggcggaaatctcagaaacgaatacaaccgcacaactcctgtaaacgaatacaaattcttggataaagaatattccggcagttggtggggtggcacagaatatggcaatactgacgcatatagttggcatatcagagctggcgaaaataaatttgatgagaaaatcataaataaatccataggctattcggttcgctgcattaagagcgctcctaaaatagtcaaaacaaataacatgaagcaatacaaaacagtcagaatagaacatcaagtttggatggcagaaaatatgaattataaaacaggtaaatcctggtgctatgaagatgacgatttttattgcaaaaaatacggacgcttatacgactggagcaccgcgagcaaaatatgcccggctggctggcatttgccaagcgattctgaatggaatgaaatggaaaaactaactggcaaaaaaggtgttgtgaatactatctccgctgtgaaaggcggctggcgcgacagcgacccgaatgaatatactttggacaagcagagaagcggagagatgatagggcgttggcgcaacatagacgaaaacggcaattggtggacatccacggtatttgaagctacaggttctgtgcggactaggcatttatcggcttcaaatgacttcacaggtaacttaaatgaaaaagcccacggcctttcggttcgttgcctccaaaatcctccgattaaaaaaatcagcagaacattcacagacgatcgcgatcacagaaaatacaaagtgattctgatggataaaacgatatggctggcgaataatttgaattacaatgcaaaaggaagtttttgctacgacaataaatccgaaaattgcgaacaatacgggcgtctttacgattgggatttagctcaaacggtatgcccatccccttggcgtttgcccaatatggaggattggaataaattgatagagagcacaggcgacagcagccttgctggtgaaaaactcaaatcggaacaactttggaatggaacggataatttcggtttttccgcgttgcccggtggcttcaccaaagctcaaggctttacggaaaaaggagtgaggggatattggtggacaaacgagtcttctggctcttacggcaaatacaagtttatgaccacagacagggatagcgtggctcagtctcaatattctaagtctatgggtctttcggttcgctgcgtgatggactgcggattgtttaattgtgttatggagtaa

SEQ ID NO: 54312 - protein, 513 aa, Unknown
  Obtained from environmental sample
  misc_feature (1)..(513): Xaa is any amino acid
MAIRCIQNIPAKPSEKKNDIKLYSTVQIGSGLWMAENLNYKTGKSWCYENDDYNCNTYGRLYDWNTAVNACPAGWRLPTRREWNEASAAEFAAKLGGNLRNEYNRTTPVNEYKFLDKEYSGSWWGGTEYGNTDAYSWHIRAGENKFDEKIINKSIGYSVRCIKSAPKIVKTNNMKQYKTVRIEHQVWMAENMNYKTGKSWCYEDDDFYCKKYGRLYDWSTASKICPAGWHLPSDSEWNEMEKLTGKKGVVNTISAVKGGWRDSDPNEYTLDKQRSGEMIGRWRNIDENGNWWTSTVFEATGSVRTRHLSASNDFTGNLNEKAHGLSVRCLQNPPIKKISRTFTDDRDHRKYKVILMDKTIWLANNLNYNAKGSFCYDNKSENCEQYGRLYDWDLAQTVCPSPWRLPNMEDWNKLIESTGDSSLAGEKLKSEQLWNGTDNFGFSALPGGFTKAQGFTEKGVRGYWWTNESSGSYGKYKFMTTDRDSVAQSQYSKSMGLSVRCVMDCGLFNCVME

SEQ ID NO: 54313 - DNA, 462 bp, Unknown
  Obtained from environmental sample
  misc_feature (1)..(462): n is a, c, g, or t
ttgaaagaaaatgcaatggagttcaatgaaaggcttgggaattatatcaatcttttcggcgatttcactgagtatataatggctcccaaattgcgtgagaaatttatggagtttggacttgttttccccagaacaaatagaaatgtcagcgttaaagatgaaaataataatactcttcttgaaactgacgttatgctggaaaacggcgataaagctatgatggttgaaataaaaaccgaacttaccgttgaacgcataaataaacatatagaacggcttgagaaaatgcgaaaacactccgatttacacggcgataaacgtacttttttgggtgcggttgcgggcgttgtagtagctgatgacgtgagagagtatgccttaaatcaaggtctttttttaattgaacctgccggagaagaacttaatattaccccgccaaacggcaaacctaaagaatggtaa

SEQ ID NO: 54314 - protein, 153 aa, Unknown
  Obtained from environmental sample
  misc_feature (1)..(153): Xaa is any amino acid
MKENAMEFNERLGNYINLFGDFTEYIMAPKLREKFMEFGLVFPRTNRNVSVKDENNNTLLETDVMLENGDKAMMVEIKTELTVERINKHIERLEKMRKHSDLHGDKRTFLGAVAGVVVADDVREYALNQGLFLIEPAGEELNITPPNGKPKEW

SEQ ID NO: 54315 - DNA, 897 bp, Unknown
  Obtained from environmental sample
  misc_feature (1)..(897): n is a, c, g, or t
atgcgcgatttaaaccggattttagcagaggtgagtctgctttattatataacaacgggggcccggcgttgccattggccctccaaaacacgattgaggagaattattatgggtttgaatgacgatgtagacgtggcaagaagggtgatggttttgttttttctggtggacacatcgggaagcatgagcggctcaaaaattggcgcggtcaaccacgccatagaagaagtaatcccggagataaaaagcatctccgtggggaacgcggacgcgcagatcaaaatcgcggttatgaagtttgacaacagcgtcgaatggattaccaaaaacgggccggaagattcggaaacctttatctggcgcagtctggacgctaacggcatgacctacatgggcgaggcctgccggcttcttgacaagaaactctccaccaaagaaggcgggtttatgcgcgaggccaccggctcttacgcgcccgcgattttcatgatgtccgacggccagcccaacgacgactttgacgggggactgggggcgttaaaacaaaacaactggttcaaggccgcggtgaaggttgccatagccatcggcgacgacgcggacaaggacgtgctcgcccagtttgtaggctccccggagggtgtgattaccgcccacgacgccgccacattaaagaaatggataaagtttgtcagcgtaaccgccagcaaagtcgccagcaaaagctccaacgccaaatccaacgcggacggaacccccgcgccggacaacgcgaaacaggtggaactgcaacaggccatagccggacaagccgccgccacgggcgctgtcgttgactcggacggcaccataaacgcgccgcccacatccacggctgatcccggcgacgtatggtaa

SEQ ID NO: 54316 - protein, 298 aa, Unknown
  Obtained from environmental sample
  DOMAIN (52)...(228): von Willebrand factor type A domain
  misc_feature (1)..(298): Xaa is any amino acid
MRDLNRILAEVSLLYYITTGARRCHWPSKTRLRRIIMGLNDDVDVARRVMVLFFLVDTSGSMSGSKIGAVNHAIEEVIPEIKSISVGNADAQIKIAVMKFDNSVEWITKNGPEDSETFIWRSLDANGMTYMGEACRLLDKKLSTKEGGFMREATGSYAPAIFMMSDGQPNDDFDGGLGALKQNNWFKAAVKVAIAIGDDADKDVLAQFVGSPEGVITAHDAATLKKWIKFVSVTASKVASKSSNAKSNADGTPAPDNAKQVELQQAIAGQAAATGAVVDSDGTINAPPTSTADPGDVW

SEQ ID NO: 54317 - DNA, 450 bp, Unknown
  Obtained from environmental sample
  misc_feature (1)..(450): n is a, c, g, or t
ttgcaatattgcatggcaggagaatttatggaaacaggaaaattgacgcttttggacggttctgtttatgaaggcgaacttactaatggaatagcanacggcaaagggaaaatgactctcacaaacggcgatgtatacgaaggcgattttgttgacggcacaccgcacggcaaagggaaatatacacgggcggacggcgaagtttacgaaggcggttatattcagggtcagcagacgggcaaaggaaaattaatcaggtctgacggctttgttgacgaaggcgattttgtggatggttgtttacaaggtaaaggcaaacgcacggctactgacggctctgtttacgagggcgattttattgaaggccagagaaccggttatggcaaaaagacttaccccgacggcaaagtcgaagacggtcaatggaaagacggaaagtttgtggggtag

SEQ ID NO: 54318 - protein, 149 aa, Unknown
  Obtained from environmental sample
  DOMAIN (23)...(45): MORN repeat
  misc_feature (1)..(149): Xaa is any amino acid
MQYCMAGEFMETGKLTLLDGSVYEGELTNGIAXGKGKMTLTNGDVYEGDFVDGTPHGKGKYTRADGEVYEGGYIQGQQTGKGKLIRSDGFVDEGDFVDGCLQGKGKRTATDGSVYEGDFIEGQRTGYGKKTYPDGKVEDGQWKDGKFVG

SEQ ID NO: 54319 - DNA, 525 bp, Unknown
  Obtained from environmental sample
  misc_feature (1)..(525): n is a, c, g, or t
atgaaagacgagctcaaagatgaaaccggaaaaccggtagaagtattctcatacttcctccccacatggggtctccactatgtactcaagaccaatgctccttctacatcaggtgactgggccatgattgaaggtccttccgcatatcgttggggcggcacttgggttggcgcatacaaaggcaccaagaatgtaaagaatgcaaaagaatttatccgctatgtaaccaccgatgacagtttccttgagaattgggcaaaagataccggcgatatggtaagcaatctgaatgtcgttaataaaattaaagacacctatagcgaacccttcctcggcggacagaatcactatgccgaatttgccgaaatggcgaaaaacgtaaatgccaaacttcttcagggcagcgatgaagcaattgaagcaatgtttgatgaagcgacggcagcttatgtaaacggcgaaaaatcaaaagagcaagctattgcggatttcaaagcacaggctggatcacagtttggaagttaa

SEQ ID NO: 54320 - protein, 174 aa, Unknown
  Obtained from environmental sample
  misc_feature (1)..(174): Xaa is any amino acid
MKDELKDETGKPVEVFSYFLPTWGLHYVLKTNAPSTSGDWAMIEGPSAYRWGGTWVGAYKGTKNVKNAKEFIRYVTTDDSFLENWAKDTGDMVSNLNVVNKIKDTYSEPFLGGQNHYAEFAEMAKNVNAKLLQGSDEAIEAMFDEATAAYVNGEKSKEQAIADFKAQAGSQFGS

SEQ ID NO: 54321 - DNA, 936 bp, Unknown
  Obtained from environmental sample
  misc_feature (1)..(936): n is a, c, g, or t
ttgaaaatctacaatatgcccacttgggtcatacccacgcacaaaccttgcatcagaaacgatatgcaagaccagatttacaaaacagcagatgcaaaatggaatgcgataattgcagacataacagagaggcacgaaaaaggccagcccattctggttggaacaatatctgtggaaaaatctgaaaaactctcaaagatgcttcgcatagcgggtattccacacgatgttttgaatgcaaaaaatcacggacgagaagcggaaattatccaatatgcagggcacaagggaaaggttacagttgcaaccaatatggcaggtcgtggaacagatattgcgcttggccccggcgttgttgagcttggaggtttgcacgtccttggcaccgaaaggcacgagagccgccgcatagacaaccagttgagaggtcgctccggtaggcaaggagacccgggttcttcgcaatattatttatccttagacgacgatttgatgagaattttcggtggtgaaaatgttaagaaaataatggataggttcggtttcaaagatgacgatgttattgagcatccgtgggtaaccaagagcgttcgcaatgcgcagcgcagaattgaagggcaaaactttgatgcccgcaaacacctgttggactacgataacgttatgaacgaacagagaagggttatatattctttgcgccgcagcattttaatgggcgaagacattaaaaccganatttcaaaccgtatagaagatgccgcagatatcaaggttagcaaatacgtagttcccaattcttaccccgaaacttgggatatggatggtttggaaaaagatttgaaaatgagcatgggcattgaatcactacccagccccgaaaaactctcaggcatgattgcccgaacaggtgctggacgaggttatagagctatatag

SEQ ID NO: 54322 - protein, 311 aa, Unknown
  Obtained from environmental sample
  DOMAIN (67)...(149): Helicase conserved C-terminal domain
  misc_feature (1)..(311): Xaa is any amino acid
MKIYNMPTWVIPTHKPCIRNDMQDQIYKTADAKWNAIIADITERHEKGQPILVGTISVEKSEKLSKMLRIAGIPHDVLNAKNHGREAEIIQYAGHKGKVTVATNMAGRGTDIALGPGVVELGGLHVLGTERHESRRIDNQLRGRSGRQGDPGSSQYYLSLDDDLMRIFGGENVKKIMDRFGFKDDDVIEHPWVTKSVRNAQRRIEGQNFDARKHLLDYDNVMNEQRRVIYSLRRSILMGEDIKTXISNRIEDAADIKVSKYVVPNSYPETWDMDGLEKDLKMSMGIESLPSPEKLSGMIARTGAGRGYRAI

SEQ ID NO: 54323 - DNA, 540 bp, Unknown
  Obtained from environmental sample
  misc_feature (1)..(540): n is a, c, g, or t
ttgcccgaacaggtgctggacgaggttatagagctatatagggaacgctatgcacaaattggagcgatgctcccgccagaagaactttccaattttgcacaccgagttcttttgagcgttataaacaagccatgggaagaccatctctacggaatggatcatttgcgggatgcaacgcgctttcacggttatgctcaaaaagatccgcttattgtgtacaaagccgaaggttttaaaatgttccaagagtgcttggaaacaatcgccacaaacacagttatgagaattttgaatgtgcgtgttgaagtaaacggccagcacattccacttgcctctataccagttccgcaaaaaccgacaatgacttttgaaaacagaggtgcagccccaccaagcactggagcaccgcaaggcgcaaggcctccgcaaaaacccgcagcgaaaccagctcctgttgtaaaccaagtggcaaaggtaggcagaaacgatccctgcccttgcggtagcggaaagaagtataagcaatgtcacgggggctaa

SEQ ID NO: 54324 - protein, 179 aa, Unknown
  Obtained from environmental sample
  DOMAIN (161)...(179): SEC-C motif
  misc_feature (1)..(179): Xaa is any amino acid
MPEQVLDEVIELYRERYAQIGAMLPPEELSNFAHRVLLSVINKPWEDHLYGMDHLRDATRFHGYAQKDPLIVYKAEGFKMFQECLETIATNTVMRILNVRVEVNGQHIPLASIPVPQKPTMTFENRGAAPPSTGAPQGARPPQKPAAKPAPVVNQVAKVGRNDPCPCGSGKKYKQCHGG

SEQ ID NO: 54325 - DNA, 741 bp, Unknown
  Obtained from environmental sample
  misc_feature (1)..(741): n is a, c, g, or t
ttggatatttctgatgaggcatggatggatttgccaaaactggctgaccagatgaactacgagaacatgactaatgctgatgaaaacaagccttacaatccgaataatgatataactgttgatgaaataaaacgaatgctacctgataatgtagtatatagtgtagacggaatactattattggtagctgttaatgatacccccaagagtattgatataaacccaggacagaatggttctaaacttgtatctatgaagattgttgatgaattgctctcgctggaagaaggatcaggttcgccgaatgcccattatattgtaactttttatgatggggaatcttatgaatatagagacgttaaagataacggtactattgattggccagaagaccctaagaaaacaggctacacatttgacggttggtacgatgactatgaatttggcgaaaagtggctcgcaggtactttcaatggttacaccacattatacgcttattggacggctaatgtttacactgtttcctttgacgctaattgttatagtgtagatagtgtatctaatcctgaagacataaatgtaacttatgactccccctatggccctttgccgcaagtatcaagagacaactacacctttgccggttggtacacggatccctcggacggagagaaagttttagaaacaacatttgtaaaaacaccttctgaccatatcctgtacgctcaatggataaaataa

SEQ ID NO: 54326 - protein, 246 aa, Unknown
  Obtained from environmental sample
  misc_feature (1)..(246): Xaa is any amino acid
MDISDEAWMDLPKLADQMNYENMTNADENKPYNPNNDITVDEIKRMLPDNVVYSVDGILLLVAVNDTPKSIDINPGQNGSKLVSMKIVDELLSLEEGSGSPNAHYIVTFYDGESYEYRDVKDNGTIDWPEDPKKTGYTFDGWYDDYEFGEKWLAGTFNGYTTLYAYWTANVYTVSFDANCYSVDSVSNPEDINVTYDSPYGPLPQVSRDNYTFAGWYTDPSDGEKVLETTFVKTPSDHILYAQWIK

SEQ ID NO: 54327 - DNA, 405 bp, Unknown
  Obtained from environmental sample
  misc_feature (1)..(405): n is a, c, g, or t
atgaacgaacataaaatagcaatcgaatggttacgttatgcgcaaaatgaccttattgttgcaaagcactgtattgaagatttacatcccaaacaaacagaaatagcgagttatcattgtcaacaatgcgccgaaaaagcattgaaagcatttttgatatacaaaaacatagaaccgcccaaaattcacgatttaaaagttttgtgcaaaatgtgtcaggatattgatactgtatttgccgaaataatcagtcaatgcgcccatttaactccttatggtgtaaccgttcgataccctgatgaactttctccaaacgaagacatggtaaaacttgctatcaatgaagcgcaacaggtatatgattttactattaaatgttgcccggaactaaacacatatcattaa

SEQ ID NO: 54328 - protein, 134 aa, Unknown
  Obtained from environmental sample
  DOMAIN (7)...(127): HEPN domain
  misc_feature (1)..(134): Xaa is any amino acid
MNEHKIAIEWLRYAQNDLIVAKHCIEDLHPKQTEIASYHCQQCAEKALKAFLIYKNIEPPKIHDLKVLCKMCQDIDTVFAEIISQCAHLTPYGVTVRYPDELSPNEDMVKLAINEAQQVYDFTIKCCPELNTYH

SEQ ID NO: 54329 - DNA, 726 bp, Unknown
  Obtained from environmental sample
  misc_feature (1)..(726): n is a, c, g, or t
ttggggatcgcctcccccctgtgcatgtacggcacaatcccgatagccgcctccttcgccgaaaagggaatggaagaagactggcttgccgccttcatgatgggttctattttgctaaacccgcaacttcttttttacagcgccgctcttgggatggacgcgcttgttatacgttttgttatctgttttttatgcggtattgccgcaggggcagttataaggctcttctttaaaaacaaacaattttttaatttctccggtcttaccgcccccgcaaacagggacaccgacccaaaccccgtattacgctttctaaaaaatttcgcccgcaatgtaaaagcaaccgctggatattttttaatcggcgtattactttccgctctttttcagcgttatgttccacccgatggttttgcaagactcttcggcggcactacccccgcaggacggggcttcgccatattaatggccgctaccataggcgtccccctgtacatgtgcggtggcggaaccatcccactccttcaaacatggctgcgcaatggcatgagcatgggcagcgcgtctgcatttatgattacaggtccagctactaaaataacaaacttaggcgcgttaaaaattgtacttggcgtaaaacacttttttttctatcttttgtttaccgtagtattcgcgtttgccggcggcattttggtagatttggtttacggggtaattcgttag

SEQ ID NO: 54330 - protein, 241 aa, Unknown
  Obtained from environmental sample
  DOMAIN (1)...(235): Predicted permease
  misc_feature (1)..(241): Xaa is any amino acid
MGIASPLCMYGTIPIAASFAEKGMEEDWLAAFMMGSILLNPQLLFYSAALGMDALVIRFVICFLCGIAAGAVIRLFFKNKQFFNFSGLTAPANRDTDPNPVLRFLKNFARNVKATAGYFLIGVLLSALFQRYVPPDGFARLFGGTTPAGRGFAILMAATIGVPLYMCGGGTIPLLQTWLRNGMSMGSASAFMITGPATKITNLGALKIVLGVKHFFFYLLFTVVFAFAGGILVDLVYGVIR

SEQ ID NO: 54331 - DNA, 966 bp, Unknown
  Obtained from environmental sample
  misc_feature (1)..(966): n is a, c, g, or t
ttgaccggcttattctacctatctccgctgcgagggatcaccgacaaaatcttccgaaccgcctacgaacggcgtttcggacgctttgattacacggtcgccccgtttatcccgacgattttggggagcagggtcagggatcgccatatacgggatttattgccggacaatgatagcagtattaacaatgataacaacggccgtttgatcccccaaataataggacgcgacccgtccggattcctgcttctatcacgcaaattcgccgacatgggtttcccatccgtcaactggaacctcggctgccccgccccgcttgtggccaagaaagcgcgcgggtgcggactgctgccgcatagagaaatcattgagaaatttttggacgaagtaattcccaaactgccgcttccgttatcaataaaagcaaggctcggctacgaaacgccggatgaattggaggcgctgataccgctgtttaacaactatcctctaaaggaactgatgatcattcgagaaataggaacgcaactctacgccggtagcgtagacctcgacagattcgagacctgcctaaacttgtcaaaccacaccgtcgtatataacggagatatcgtatcggtcagcacattcaagcaattaaaggataggttcccaagtatcaataaatggatgatcggcaggggtatagtcaggaatccgtttttattgatggaattgaaaaaagccgtatcaacagaaccatcggtattaatagaatcaaccgtatcaacaaaacaatcgcagataatagcctttcttgatgatctcttagacgcctgtaaagatcacccttatcccataaaagtcttaggcagaatgaaagaaatctggagatatttaggcgacgggattgacggatgggaggatttatcgaaaaaagtcgttcagtgtcaatcattatcagattatagaacaataatcacttaa

SEQ ID NO: 54332 - protein, 321 aa, Unknown
  Obtained from environmental sample
  DOMAIN (6)...(321): Dihydrouridine synthase (Dus)
  misc_feature (1)..(321): Xaa is any amino acid
MTGLFYLSPLRGITDKIFRTAYERRFGRFDYTVAPFIPTILGSRVRDRHIRDLLPDNDSSINNDNNGRLIPQIIGRDPSGFLLLSRKFADMGFPSVNWNLGCPAPLVAKKARGCGLLPHREIIEKFLDEVIPKLPLPLSIKARLGYETPDELEALIPLFNNYPLKELMIIREIGTQLYAGSVDLDRFETCLNLSNHTVVYNGDIVSVSTFKQLKDRFPSINKWMIGRGIVRNPFLLMELKKAVSTEPSVLIESTVSTKQSQIIAFLDDLLDACKDHPYPIKVLGRMKEIWRYLGDGIDGWEDLSKKVVQCQSLSDYRTIIT

SEQ ID NO: 54333 - DNA, 1182 bp, Unknown
  Obtained from environmental sample
  misc_feature (1)..(1182): n is a, c, g, or t
atgcccaaaactgactgctccaaaagcctctccctgatgacgcctgaagaaatggagaaagcccgcggttttcaccgtagttttccccggtattcgcggactccgctggtgagtttatccaacctggcggaacttttcggaataaagggaatctatattaaagacgagtcattccgtttcgatttaaacgctttcaaggtgctgggcggctcttacgccatcgcgaagtatatagccaaacgcctgggcaaggacatagccgaaatcaattacaataccctgatttcggatgagataaagcaaaagttaggcgacattactttttacaccgccactgacggcaatcacggcaggggcgtagcctgggcggcgaacaaactcaggcagaaggccgtggtttttatgcccaggggttcctcgcatatccggctgcaggctattcttgacgagggagcgcaggcgagtatcaccgatctgaactacgatgacgcggtgaggctcgcgaacaaaaaggcgtccgaagaccccaacggcgtggtggtgcaggacacggcctgngccggctatgaggaaatccctggctggatcatgcagggctacggttccatggccgttgaggcgatggcgcaactgaaggaagccggcgtagaacggcctacccatatattaatccaggcgggagtcggttccctggccggcgcggtaatcgggtattttaccgatctctttccggataatcccccggtgatgaccgtggtggaagcgtccgccgcgaacaatctttacatttccagcatagcgggaagactcgtgggccttaagggaaacctttctaccattatggcgggccttgcctgcggcgagggcaatacgatctcctgggagatactgaaaaattacgcgaagttttttgtctccgcgcccgactgggtcgcctcgcggggaatgagagtgctggcggttcccgttaaaggcgacgagaaagtaatttccggagagtcgggcgcggtaacgacggggctgttgtttacccttctgcgtaaagaagaataccgcgacttgaagaaagccatgggactcaattctaaatcggtagtgctgctgttcagtacggaaggcaacaccgatcctgaaaaattccgcgacgtagtctgggacggggagtttcccagcggacattag

SEQ ID NO: 54334 - protein, 393 aa, Unknown
  Obtained from environmental sample
  DOMAIN (27)...(363): Pyridoxal-phosphate dependent enzyme
  misc_feature (1)..(393): Xaa is any amino acid
MPKTDCSKSLSLMTPEEMEKARGFHRSFPRYSRTPLVSLSNLAELFGIKGIYIKDESFRFDLNAFKVLGGSYAIAKYIAKRLGKDIAEINYNTLISDEIKQKLGDITFYTATDGNHGRGVAWAANKLRQKAVVFMPRGSSHIRLQAILDEGAQASITDLNYDDAVRLANKKASEDPNGVVVQDTAXAGYEEIPGWIMQGYGSMAVEAMAQLKEAGVERPTHILIQAGVGSLAGAVIGYFTDLFPDNPPVMTVVEASAANNLYISSIAGRLVGLKGNLSTIMAGLACGEGNTISWEILKNYAKFFVSAPDWVASRGMRVLAVPVKGDEKVISGESGAVTTGLLFTLLRKEEYRDLKKAMGLNSKSVVLLFSTEGNTDPEKFRDVVWDGEFPSGH

SEQ ID NO: 54335 - DNA, 303 bp, Unknown
  Obtained from environmental sample
  misc_feature (1)..(303): n is a, c, g, or t
ttggatatgctggattttgacgccatcaggaatgccgccaagggttacgaagcggacatgacgaaatttttaagggaccttatccggattcccggcgaaagctgcggcgaaaaggaaaccgcggcccgcatcgtggaagaaatgcaaaaagtcggctttgacgaggccggcatcgacaagatgggcaacgtcatcggttacatggggaacggcaaaacgcttatctgcttcgacggccacatcgacaccgtgggcataggcaaccgggacaactggactttccatccctacgaggggctttga

SEQ ID NO: 54336 - protein, 100 aa, Unknown
  Obtained from environmental sample
  misc_feature (1)..(100): Xaa is any amino acid
MDMLDFDAIRNAAKGYEADMTKFLRDLIRIPGESCGEKETAARIVEEMQKVGFDEAGIDKMGNVIGYMGNGKTLICFDGHIDTVGIGNRDNWTFHPYEGL

SEQ ID NO: 54337 - DNA, 720 bp, Unknown
  Obtained from environmental sample
  misc_feature (1)..(720): n is a, c, g, or t
gtggccgcagtctacgccgcgaagatcatgaaagaattaggccttctcaacgacaaataccgcgtgatggtaacaggcacggtgcaggaggaagactgcgacggcctgtgctgggaatacatcataaaagaagaaaaaatcaagcctgagttcgtggtgatcaccgagccgaccaacggcaacatctaccggggacagaggggccgcatggagatccgcgtcgaagtgaagggagtttcctgccacggttccgcgccggaacgcggcgacaacgcgatatacaagatgggggaaataatcgccgaagtcaaggcgctgaacaaaaagctgaaaaaagacaagttcctcggaaaggggacgctggcggtttcgcagatctatttcagttcgccctcccgctgcgccgtcgccgacatgtgcgccatttccattgaccgccgcctgaccatgggagaaacctacaaaagcgccctcgcggaaatcgccgccctgcccaaggtcaaagagtacaaggccaaagtcaccatgtacaagtacgatctgcccagttacaccggcgtggtttatcccatcgactgctacttccccacctgggtcataccggaagacgcaaagccggcaaaggcgatggtaaaggcctataaaggaatgttcggcaagccaaaggttgacaagtggactttttcaactaagcggcgtttcgatcatgggccggaataa

SEQ ID NO: 54338 - protein, 239 aa, Unknown
  Obtained from environmental sample
  DOMAIN (64)...(173): Peptidase dimerisation domain
  misc_feature (1)..(239): Xaa is any amino acid
MAAVYAAKIMKELGLLNDKYRVMVTGTVQEEDCDGLCWEYIIKEEKIKPEFVVITEPTNGNIYRGQRGRMEIRVEVKGVSCHGSAPERGDNAIYKMGEIIAEVKALNKKLKKDKFLGKGTLAVSQIYFSSPSRCAVADMCAISIDRRLTMGETYKSALAEIAALPKVKEYKAKVTMYKYDLPSYTGVVYPIDCYFPTWVIPEDAKPAKAMVKAYKGMFGKPKVDKWTFSTKRRFDHGPE

SEQ ID NO: 54339 - DNA, 1917 bp, Unknown
  Obtained from environmental sample
  misc_feature (1)..(1917): n is a, c, g, or t
gtgcggctggataacggctgtgaggctcctgacaggtggtattcaggttcggggttatacagaaatgtgttattaaaaattcttcctgtaactcatataaaaacaaggggcgttcatgtttatgtaaaacagaatgaagttacggttgcgacaacgatagtaagccgcgccaaatcagaaaaaggcaatgttattgcgcaaattttaaaacctgacgggagtcttgccgcacagaataccgttccttttgacatgaacggtaaaagcgaaatagatgtgaagcaaaagttaaacgtcaagaacccgcacttttggtcaagcgagaacccgaatctgtaccgctcggttgtaagtcttgaaacaggcaaagaaggaatgtcaacggaaataaaattcggctttcgcagcgtaaaaatagaatataaaaagggaatgacagttaacggtaaaaaaataaaactaaaaggggtatgtctgcaccacgactgcggaataacaggttcggcttactatgacgaggcgtggaggcgccgtcttttaacgcttaaatccattggctgcaacgcgattagaaccagccacaacccgcccgctcaagagtttttagatctttgcgacgaacttggtttttatgtggtggacgaatgttttgacaaatggaaaagcggctattacgccgcgcattttgacgaagattcaaagcgcgatcttaccgattttattttacgcgacagaaaccatccttgcgtaattatgtggagcgtgggcaacgaggttgaggatcagggagcggacagtatgattcagattcaaaaaaaccttgtcggtattgttaaaagccttgataaccgtcccgtaacatgcgctctcgcgcctcacgctaatccgcgctcattggttggcgcgcctgcagacgagcttgttaaattgacaaaaaaactcgcgaaagacgttgacgtgctgggccttaattaccatgagcctttgtatcaggcatataccgccgcgataaataagcccatacttggcaccgagtgttatgaattttattcaagcgtaggaacaaattttgaggatgtctcgtcaaaaaacccctggcgctttgtgcttgagaataacaatgtaatcggccagtttatctgggcggggattgattatctgggtgaaagcccgtggcccgtaaaaggctggacaggttcaattctggatatatgcggttttatgaagcctaacgcgtttttcagaaaaagtatctggtcggatgatccgtttgtatatcttgcgttttatgatcaggaacgtaaaccggattacgcgcggggccgctggtcgtttccgccaatggcgtctcatcttaattttgatcattttcacggaagaaacgttaaggccgccgtatttactaattgcgaagaagttgagttgcgggttaacggcaaaaagatgggacggcgcaaaaaagcggactttgagaacggaataattgaatggccgcttgagtacacaagcggcaatatggaaataaaaggattaagcaaagggaaggaagtttgttcttatatcttaaaaaccgcagaactgccgaaaaatataaaactattgccggataaatcgaaattgaaagcgggagaaatcgcgcatattgaaataaatattaccgataataacggattgactttcccaaatggtgaatttcttattgagttttcattgacaggagacggagaaatccttggagcgtgttccggcgatttaagccaaaatctcggctttaccctgcctaaagtttttacttttgacggcagggcgcttgcggtaataagggcgggagattcatccggcgaaatagtgttacgtgcatattccgagaaacttgaaaaagccgaattacggtttattgctgaaggggagaaataa

SEQ ID NO: 54340 - protein, 638 aa, Unknown
  Obtained from environmental sample
  DOMAIN (31)...(135): Glycosyl hydrolases family 2, immunoglobulin-like beta-sandwich domain
  misc_feature (1)..(638): Xaa is any amino acid
MRLDNGCEAPDRWYSGSGLYRNVLLKILPVTHIKTRGVHVYVKQNEVTVATTIVSRAKSEKGNVIAQILKPDGSLAAQNTVPFDMNGKSEIDVKQKLNVKNPHFWSSENPNLYRSVVSLETGKEGMSTEIKFGFRSVKIEYKKGMTVNGKKIKLKGVCLHHDCGITGSAYYDEAWRRRLLTLKSIGCNAIRTSHNPPAQEFLDLCDELGFYVVDECFDKWKSGYYAAHFDEDSKRDLTDFILRDRNHPCVIMWSVGNEVEDQGADSMIQIQKNLVGIVKSLDNRPVTCALAPHANPRSLVGAPADELVKLTKKLAKDVDVLGLNYHEPLYQAYTAAINKPILGTECYEFYSSVGTNFEDVSSKNPWRFVLENNNVIGQFIWAGIDYLGESPWPVKGWTGSILDICGFMKPNAFFRKSIWSDDPFVYLAFYDQERKPDYARGRWSFPPMASHLNFDHFHGRNVKAAVFTNCEEVELRVNGKKMGRRKKADFENGIIEWPLEYTSGNMEIKGLSKGKEVCSYILKTAELPKNIKLLPDKSKLKAGEIAHIEINITDNNGLTFPNGEFLIEFSLTGDGEILGACSGDLSQNLGFTLPKVFTFDGRALAVIRAGDSSGEIVLRAYSEKLEKAELRFIAEGEK

SEQ ID NO: 54341 - DNA, 519 bp, Unknown
  Obtained from environmental sample
  misc_feature (1)..(519): n is a, c, g, or t
ttgcgagcgaggtataacaaaatggcggatgtagacgtaaaggaaataaagaccgcgattcaccatgttgatgaaatgagcgcggaaaacaataagaatttcaacgatcttaaggaagaaacggagaaattcaaaattaataccggcaaagaaagaaagaaagtgctggtaatagatgataataaaacggatcttgttacggctaaaagcatgttggaaaataattatgaagttattacagccgattcgggaaacgccgctttgaaattgttccatacaggctttgttccgaacgccattttacttgaccttataatgcccggcatgagcgggtgggatactttcgagagaataaagaaggtcggttccgttcacaatgccgccataataatttattccgcgtcatcggatcccgatgacaaagaacgcgccagaaaaataggcgcggtggattttgtcaagaagcccgctctcatggatgagttattgagtgtaatcagaagggcagtcgggacctga

SEQ ID NO: 54342 - protein, 172 aa, Unknown
  Obtained from environmental sample
  DOMAIN (53)...(167): Response regulator receiver domain
  misc_feature (1)..(172): Xaa is any amino acid
MRARYNKMADVDVKEIKTAIHHVDEMSAENNKNFNDLKEETEKFKINTGKERKKVLVIDDNKTDLVTAKSMLENNYEVITADSGNAALKLFHTGFVPNAILLDLIMPGMSGWDTFERIKKVGSVHNAAIIIYSASSDPDDKERARKIGAVDFVKKPALMDELLSVIRRAVGT

SEQ ID NO: 54343 - DNA, 1593 bp, Unknown
  Obtained from environmental sample
  misc_feature (1)..(1593): n is a, c, g, or t
atgtccagcgtgttaaacgacattattactctggttattacccgtcttggggaaaaaccggtaatattcagccttaatatccccgacgaattgcccgccaagctgttaggcgacgatctgcgggtcaaacaggtattaaccaacctgctcagcaattccatcaaatacacgcacaagggaagtattgagttaaaagcaaactgcactcgcgaaggcaatattgtatggatgtatattacagtaaccgacacaggcataggcatacacgaagaagacattaaaaaactgttccttgattatttccaggccgacgccaaagccaaccgcaatattgagggtacggggcttgggctgcctattaccaaaaaacttgtggatatgatggaaggggaaatctccgcggaaagcgaatacggcaaaggcacgacgttccgcctgcgtatcaagcagggctttgttgaggatacgcccattggagcggaaacagcggaaaaactgcgcagtttccgttacatcgacgacaagcgtaccgccgccaaaaggctggtacgtctcaatttaagctacgccaaagtgctggtggtagacgacatgcagaccaatctggacgtggcggcggggcttttgcgcatatacaacatgcatgtcgattgtgtaagcagcggggaagaagctgtaaaccggatatacagcgaaaatcccgtttacgacgcgatattcatggatcacatgatgccgagaatggacggtattgaaaccacggacaggatccgcgcgcttggcagggaatacgcgaaaaaaatacccattatcgcacttaccgccaacgcgatacacggaacggaacagatattttatgaacacggtttccaggactttatatccaaacccatcgacataatggaactggataccgttataagaaagtggatacgcaatgaagaaaaagaaaaagaacttggaaccaacgtttttataacgcctgatgttaccgctgaggatgaaaagaacgcggatctggaaatagtcatacccggcgtggataccgaaaaagggctttccctttacggctatgacaagaaaatttatcttacgcttcttcgttcttatgttcccaacacgcttgaaaacctgaaaaaactgaaaacggtttcaaaagagacattgcccgattatgttataagagtacacggattaaaaggcaccagcgcaggcataggggcggaagaaatacgggcggaggccctgaagctggaaaatttagccagagcggagaatttggacgaggttctggcgctgaacgacagaatcattaaggacgctgaaattgttgcaaataacataaaagtgtggctgccaagttacgatcttcacaacaaaaaaccgctccttaaaaaacccgacaggaaaattctggcgcgtttaagacagtgctgtgataatttcgatatggcgggcatagacaaagccatgacggaactggaaagcagcaattacgaagaaggcgccgagatggtcgcgtggttaagggaaaagatcaatatatcggaaataaccgaagtcgcgatgcagcttgcgaaaatattgatctag

SEQ ID NO: 54344 - protein, 530 aa, Unknown
  Obtained from environmental sample
  DOMAIN (365)...(440): Hpt domain
  misc_feature (1)..(530): Xaa is any amino acid
MSSVLNDIITLVITRLGEKPVIFSLNIPDELPAKLLGDDLRVKQVLTNLLSNSIKYTHKGSIELKANCTREGNIVWMYITVTDTGIGIHEEDIKKLFLDYFQADAKANRNIEGTGLGLPITKKLVDMMEGEISAESEYGKGTTFRLRIKQGFVEDTPIGAETAEKLRSFRYIDDKRTAAKRLVRLNLSYAKVLVVDDMQTNLDVAAGLLRIYNMHVDCVSSGEEAVNRIYSENPVYDAIFMDHMMPRMDGIETTDRIRALGREYAKKIPIIALTANAIHGTEQIFYEHGFQDFISKPIDIMELDTVIRKWIRNEEKEKELGTNVFITPDVTAEDEKNADLEIVIPGVDTEKGLSLYGYDKKIYLTLLRSYVPNTLENLKKLKTVSKETLPDYVIRVHGLKGTSAGIGAEEIRAEALKLENLARAENLDEVLALNDRIIKDAEIVANNIKVWLPSYDLHNKKPLLKKPDRKILARLRQCCDNFDMAGIDKAMTELESSNYEEGAEMVAWLREKINISEITEVAMQLAKILI

SEQ ID NO: 54345 - DNA, 1365 bp, Unknown
  Obtained from environmental sample
  misc_feature (1)..(1365): n is a, c, g, or t
atgacagtcagcgagataaacgatctttcccgccagatcgcagggctaaacgaaacaatacagagagtcagggctcagggagatgaacccaacgatctctatgacaggcgggatcttttggtggatatgctgtcctcaaagatcaatgttacggttgacaggcgcgatcccgatgagtttatggttcataccaacggaatcgtcctcgttcagggcagaatcggacggcagcttgatcttgtgctgaatcccgagaccggctattcagatatagtctggagcgaaaccaggaataagctggaattcctgaacggcgatcataacggaagccttggcgcccttgtcgatcttcgcgattataccatcaatacggaaatccagaccctggacaatatgaccatgaatttcgtaggccttgtaaacgagattcatgaaaaagcttacggcgttaacggagaaacagggctcaaattttttaacgagcatccttttgttaccaacgtaaacggcaattacgacagaaacggggatggggacgaggacagctcttacattttcagggtttcagggatcaatatccttgaaagccacgcccaggtaggccttgagggcgttatcaccctttccgcttttggcggagagaggaagatacagtactatcctacagacactggggcagacattattaacagaattaacaaattcaggggcggaaatttaccgcccgtttggaaccgcgacggttacctgactatgaaggcgaccccttcggacgactggcaaaatcccgattttgtgatccgccatatcgaggattcaggccgcttcctggaagggtatgctggcttattgagggcttccggcccggaaggtgcttatgactgggcaaggccggacgcagtggctgcattgcgcggcggccctacagactgggaagtcgcgcctatcgcgcacccttccggctggatagaaattaattccgccttgattagagacccaatgtcggtggccgcaggtttcggcgaaaacggacgcccggcaaatcccggcaacggagaggcggcaatggctatcgcgtccataaggaattccgaagcgatggttgggcagtacagaaccttcgacgattatttcgccgtgtctgtaggccgtatcgccttattgggcgagcagagccagattgccctggagacgcagaacctgattatgaaacagctcgatgagttgcgtcagtccgtttcgggggtcaatatggacgaagagctttccaacatgattaagtaccagcacggctatgccgccgcggcaaggtttattaccgttatcaattccatgctggatacaattatccgtatgggtacctag

SEQ ID NO: 54346 - protein, 454 aa, Unknown
  Obtained from environmental sample
  DOMAIN (414)...(452): Domain of unknown function (DUF1078)
  misc_feature (1)..(454): Xaa is any amino acid
MTVSEINDLSRQIAGLNETIQRVRAQGDEPNDLYDRRDLLVDMLSSKINVTVDRRDPDEFMVHTNGIVLVQGRIGRQLDLVLNPETGYSDIVWSETRNKLEFLNGDHNGSLGALVDLRDYTINTEIQTLDNMTMNFVGLVNEIHEKAYGVNGETGLKFFNEHPFVTNVNGNYDRNGDGDEDSSYIFRVSGINILESHAQVGLEGVITLSAFGGERKIQYYPTDTGADIINRINKFRGGNLPPVWNRDGYLTMKATPSDDWQNPDFVIRHIEDSGRFLEGYAGLLRASGPEGAYDWARPDAVAALRGGPTDWEVAPIAHPSGWIEINSALIRDPMSVAAGFGENGRPANPGNGEAAMAIASIRNSEAMVGQYRTFDDYFAVSVGRIALLGEQSQIALETQNLIMKQLDELRQSVSGVNMDEELSNMIKYQHGYAAAARFITVINSMLDTIIRMGT

SEQ ID NO: 54347 - DNA, 1242 bp, Unknown
  Obtained from environmental sample
  misc_feature (1)..(1242): n is a, c, g, or t
gtgacgttattcccttcccacgcgcccccggccaggcggaattctaggaaattggagcaactaaatattttcaaggaatttaccacgaagaatttaccacgaacctcactaaccgcgtaccttcggtacgacactaactcttaccacacatcttgtcgatgttcgtggtggttcgtggtggttcgtggtaaaattttttacgcattgttttttttgtttctcgcttttcctgctttcgctcaatcgccgcaaaacgcattaaactcacagtttctggagctttactctcaatccgctgttgtgatggatgccgccaccggaaccatcgtttactataaaaacccggacgacgaaattcctcctgcttcacttacaaagctaatgaccatgcacctggtctttagggaaatcgccttgggcagggcttccctcaacgaaataataaccccgccaagggagagctgggcggtgaaccagcttcccggctcctctttgatgtacctggcgcagggtcagactttaagtcttagggaaataatgcttggtatggcgattttttcaggcaacgacgccgcggcggcggcggccctgcgtctcgctcccacggtggaagaattcacgcgaatgatgaacatggaagccgccgcgatggggctaaaaaaaaccagatttgtggacgcgtcaggttattcggaagaaaacatgaccacagccagggaattcgccgagttatgccggctatatttacaggcgcacccggaaagccttaaggattatcattcggtaagggaattcgcgtacccaagggcggaaaacgcgtctcctgaacggcggggaaatcccggaaccaggctgcacagaaacaacaacagcctgcttggaagagtaaaaggggttgacggcctcaaaaccggatacatccccgaatcgggatacaacatcgcgttgaccgcggaaagaaacggaacgcgctttatcgccattatcctcggcgctccctcggaatggggaggcgacaggaagcgggacgaagacggggaaaaagttcttgagtgggcctttgaccattacaagacaatcaggccgaatataggcgaactcccgcctgcccgcatctggaaaggcaaagacaactatacggacatcgcgccggaagagccgcttaattttaccgtcctgctggaacggggcagccggctttcctgggaaattgaactggaagaacctatgtcgctccgctaa

SEQ ID NO: 54348 - protein, 413 aa, Unknown
  Obtained from environmental sample
  DOMAIN (77)...(334): D-alanyl-D-alanine carboxypeptidase
  misc_feature (1)..(413): Xaa is any amino acid
MTLFPSHAPPARRNSRKLEQLNIFKEFTTKNLPRTSLTAYLRYDTNSYHTSCRCSWWFVVVRGKIFYALFFLFLAFPAFAQSPQNALNSQFLELYSQSAVVMDAATGTIVYYKNPDDEIPPASLTKLMTMHLVFREIALGRASLNEIITPPRESWAVNQLPGSSLMYLAQGQTLSLREIMLGMAIFSGNDAAAAAALRLAPTVEEFTRMMNMEAAAMGLKKTRFVDASGYSEENMTTAREFAELCRLYLQAHPESLKDYHSVREFAYPRAENASPERRGNPGTRLHRNNNSLLGRVKGVDGLKTGYIPESGYNIALTAERNGTRFIAIILGAPSEWGGDRKRDEDGEKVLEWAFDHYKTIRPNIGELPPARIWKGKDNYTDIAPEEPLNFTVLLERGSRLSWEIELEEPMSLR

SEQ ID NO: 54349 - DNA, 441 bp, Unknown
  Obtained from environmental sample
  misc_feature (1)..(441): n is a, c, g, or t
atggaaaagggcggaccctttgaattcaagccttattggggctgcgacatccagaccgagcatgaaaggttcctttcggaaaaagtcgcgggcgggccggtaattgttacggactaccccaaagaaatcaaagcgttttacatgaagcaaaactgcgacggcaaaacagtccgggcaatggatgttctggttccccgtctgggcgaaattattggcggctccgagcgcgaagaaaaccttgacaaacttgaaaagcgcatggaagagttaaagttcaacatgacagattaccagtggtacctggatttacgcaggtatggctctgtcccccattcgggtttcggcctgggctttgagcggcttgttcagtacgttacggggatggtaaatatccgtgacgttattcccttcccacgcgcccccggccaggcggaattctag

SEQ ID NO: 54350 - protein, 146 aa, Unknown
  Obtained from environmental sample
  DOMAIN (1)...(142): tRNA synthetases class II (D, K and N)
  misc_feature (1)..(146): Xaa is any amino acid
MEKGGPFEFKPYWGCDIQTEHERFLSEKVAGGPVIVTDYPKEIKAFYMKQNCDGKTVRAMDVLVPRLGEIIGGSEREENLDKLEKRMEELKFNMTDYQWYLDLRRYGSVPHSGFGLGFERLVQYVTGMVNIRDVIPFPRAPGQAEF

SEQ ID NO: 54351 - DNA, 786 bp, Unknown
  Obtained from environmental sample
  misc_feature (1)..(786): n is a, c, g, or t
gtggaagcggcggcttattcccttacgattgtgggcgctgccccaaccgagacttacccgcttcaaaaaaagcggcattcgctggagttcctccgtgaaattgcgcaccttagggcaaggacgaacactttcggcgcagtcgccagagtaagaaaccggctcgcgattgcgacccacgagttttttcaaagcaaccactttcaatacgttcacacaccaatcatcacaggcagcgacgcggaaggggccggcgctttgtttcaggttacaaccctcgaccttgcggccctggcaaaatccggcaaagccccggattactcaaaagactttttcggcaaatggactggtcttgccgttacaggccagctcgaggccgagtcctacgccgaagccctttcacgggtctacactttcggccctacttttcgggctgaaaattccaacaccacccggcaccttgccgagttctggatgatcgagccggaagccgctttcttccgcctggaagacaacatggctctggcggaggattttctcaaataccttttctccgtggttttaaaggactgcgcggaagacctggaattttttaattcccatatcgaaaagggcattatcgaaacccttcaatccgtggcctcttcaaagttctcgcatataacctacaccgatgcaatagcggaatggaaaagggcggaccctttgaattcaagccttattggggctgcgacatccagaccgagcatgaaaggttcctttcggaaaaagtcgcgggcgggccggtaa

SEQ ID NO: 54352 - protein, 261 aa, Unknown
  Obtained from environmental sample
  DOMAIN (27)...(246): tRNA synthetases class II (D, K and N)
  misc_feature (1)..(261): Xaa is any amino acid
MEAAAYSLTIVGAAPTETYPLQKKRHSLEFLREIAHLRARTNTFGAVARVRNRLAIATHEFFQSNHFQYVHTPIITGSDAEGAGALFQVTTLDLAALAKSGKAPDYSKDFFGKWTGLAVTGQLEAESYAEALSRVYTFGPTFRAENSNTTRHLAEFWMIEPEAAFFRLEDNMALAEDFLKYLFSVVLKDCAEDLEFFNSHIEKGIIETLQSVASSKFSHITYTDAIAEWKRADPLNSSLIGAATSRPSMKGSFRKKSRAGR

SEQ ID NO: 54353 - DNA, 540 bp, Unknown
  Obtained from environmental sample
  misc_feature (1)..(540): n is a, c, g, or t
atggcggatgaatggctgagcaggctgggggaacaatgccgctacggtgaaattgcggaaaagttgagccttccggctgttaaagacggcgtttacctcgcgcatgaaaactgtcccgacacttttagcaagcttcctttttatacagaccacccttcaatgcttgggatgtacggtgttttaaacagcgataaaacggacaacaacattatgtccgctactttgaataaagtgctttccgtatgggacaagaaaactttctacggctgggacttcccaatgctggcaatgaccgcctgccgtcttggcagatacaaagacgctatcgatctgctattaatggaaagcccgaaaaatacctggctggaaaacgggcacaacaaaatgacaggcgatgacgcgcttcccctgtaccttcccggtaacggcggccttctgcttgtcgttgcgatgctcgccgccggttacggcgaaaaaataggctcttcttttcctgacggctttgccgttactactgaggggatacttccgtatatttag

SEQ ID NO: 54354 - protein, 179 aa, Unknown
  Obtained from environmental sample
  misc_feature (1)..(179): Xaa is any amino acid
MADEWLSRLGEQCRYGEIAEKLSLPAVKDGVYLAHENCPDTFSKLPFYTDHPSMLGMYGVLNSDKTDNNIMSATLNKVLSVWDKKTFYGWDFPMLAMTACRLGRYKDAIDLLLMESPKNTWLENGHNKMTGDDALPLYLPGNGGLLLVVAMLAAGYGEKIGSSFPDGFAVTTEGILPYI

SEQ ID NO: 54355 - DNA, 447 bp, Unknown
  Obtained from environmental sample
  misc_feature (1)..(447): n is a, c, g, or t
ttgcgtaactttgttttaggagaagataatatggcagccacaaaagaagaaattctggaagcgattgcttcaatgaccgttctggaggtttcagaactggttaaaatgatggaagagaaattcggcgtgtccgcggcggcccctgtggcggtagcggttggcggcggcggcggggcggctcccgcggcggctgctgaggaaaaaaccgagtttaccgtcattcttaaggctttcgaggaatccaagaaaatcgcggttatcaaggaagtcaggacgatcaccagccttgggcttaaagaagccaaagaccttgttgaaggcgtgcccaagcccctcaaggaaaatgtttccaaggaagaagccgcgaagatcaaggacgcgattaccactgcgggcggcactgtagaaatccagtatgggagaaggcgattaagccatgtgatttga

SEQ ID NO: 54356 - protein, 148 aa, Unknown
  Obtained from environmental sample
  DOMAIN (70)...(138): Ribosomal protein L7/L12 C-terminal domain
  misc_feature (1)..(148): Xaa is any amino acid
MRNFVLGEDNMAATKEEILEAIASMTVLEVSELVKMMEEKFGVSAAAPVAVAVGGGGGAAPAAAAEEKTEFTVILKAFEESKKIAVIKEVRTITSLGLKEAKDLVEGVPKPLKENVSKEEAAKIKDAITTAGGTVEIQYGRRRLSHVI

SEQ ID NO: 54357 - DNA, 456 bp, Unknown
  Obtained from environmental sample
  misc_feature (1)..(456): n is a, c, g, or t
gtgccgcccgcagtggtaatcgcgtccttgatcttcgcggcttcttccttggaaacattttccttgaggggcttgggcacgccttcaacaaggtctttggcttctttaagcccaaggctggtgatcgtcctgacttccttgataaccgcgattttcttggattcctcgaaagccttaagaatgacggtaaactcggttttttcctcagcagccgccgcgggagccgccccgccgccgccgccaaccgctaccgccacaggggccgccgcggacacgccgaatttctcttccatcattttaaccagttctgaaacctccagaacggtcattgaagcaatcgcttccagaatttcttcttttgtggctgccatattatcttctcctaaaacaaagttacgcaactcatacgagccgcgtttatttaaaccaacaggaacaacagcacccgaagcctga

SEQ ID NO: 54358 - protein, 151 aa, Unknown
  Obtained from environmental sample
  SIGNAL (1)...(26)
  misc_feature (1)..(151): Xaa is any amino acid
MPPAVVIASLIFAASSLETFSLRGLGTPSTRSLASLSPRLVIVLTSLITAIFLDSSKALRMTVNSVFSSAAAAGAAPPPPPTATATGAAADTPNFSSIILTSSETSRTVIEAIASRISSFVAAILSSPKTKLRNSYEPRLFKPTGTTAPEA

SEQ ID NO: 54359 - DNA, 546 bp, Unknown
  Obtained from environmental sample
  misc_feature (1)..(546): n is a, c, g, or t
atggctatagtcgcgaaaaaaatacaggaaagcaaaaccaaggctatcggggaactgaaagaatctttcagctccgcgcaggactttatttttaccgattaccgcggtttaaccgtggagcagattaccaatctgcgcaagaacctccgcgccaagcaggttgaatataaggtggtaaagaacaattttgcccgtatcgcctttcagcagctttccgcccctgacgtttcgtcctactttgtcggcccgaccgcggtggcgattgcacctaaggactcaagcgaggttgcgaaaatcctctttgactttgccaaagaagttccaaccttaaaagttaagggcgcccttgtcggcagtaccctgtacaacgccgcgcagacagaggcttattccaaactgcccggcaggctggagcttatttccatgctcatgtcggttatgaacggcccggcgcgcaaccttgccgccgcgttaaacgatattccgtcgcgcctggtgcggactgtcaaagccatcgcggatcaaaaggcgggtgcggggaaatga

SEQ ID NO: 54360 - protein, 181 aa, Unknown
  Obtained from environmental sample
  DOMAIN (7)...(105): Ribosomal protein L10
  misc_feature (1)..(181): Xaa is any amino acid
MAIVAKKIQESKTKAIGELKESFSSAQDFIFTDYRGLTVEQITNLRKNLRAKQVEYKVVKNNFARIAFQQLSAPDVSSYFVGPTAVAIAPKDSSEVAKILFDFAKEVPTLKVKGALVGSTLYNAAQTEAYSKLPGRLELISMLMSVMNGPARNLAAALNDIPSRLVRTVKAIADQKAGAGK

SEQ ID NO: 54361 - DNA, 684 bp, Unknown
  Obtained from environmental sample
  misc_feature (1)..(684): n is a, c, g, or t
atgaagcacggaaaaaaataccgggaaagcctgaaaaagtacgatgccgccaattcttttgaactcaacgaagctttagttctggtcaaatctatggcattcgcgaagttcgacgaaactgtggatctttcggtcaagttaaacctgaaaaaaagccagtctgtcagggacactgtaattctaccgcaccagttccggggcgaaaaaaaggttttggttttctgcaagccggaaaaagaaaaggaagcccaggacgcgggcgcggcctttgtgggcgcggatgatttgattgaaaaagtgaagggtggctggaccgactttgatgtagccgttgctaccccggacatgatgaaagacgtaggaaagcttggtatggttttgggccgcaaagggctcatgcccaatccgaaaaccggaactgttacctttgatctcaaggggacccttgctgaattaaaaaagggccgcacggagttccgcgccgacaagacaggcgtaattcatttggccgtgggaaaggtttccatggcgccggaacagattgccgataatatcaatgctgtcatcggtgaagttaagcggaaacgccccgcggacgcgaaaggcgattttatcaagtccgtatcggttgcctcaaccatggggccgggcgtatgggttgccgtcgctgaacagcaggaatag

SEQ ID NO: 54362 - protein, 227 aa, Unknown
  Obtained from environmental sample
  DOMAIN (14)...(217): Ribosomal protein L1p/L10e family
  misc_feature (1)..(227): Xaa is any amino acid
MKHGKKYRESLKKYDAANSFELNEALVLVKSMAFAKFDETVDLSVKLNLKKSQSVRDTVILPHQFRGEKKVLVFCKPEKEKEAQDAGAAFVGADDLIEKVKGGWTDFDVAVATPDMMKDVGKLGMVLGRKGLMPNPKTGTVTFDLKGTLAELKKGRTEFRADKTGVIHLAVGKVSMAPEQIADNINAVIGEVKRKRPADAKGDFIKSVSVASTMGPGVWVAVAEQQE

SEQ ID NO: 54363 - DNA, 777 bp, Unknown
  Obtained from environmental sample
  misc_feature (1)..(777): n is a, c, g, or t
atgctctgcggcgcgctctaccccacttcgggagaaattgacgttatgggatattcgccaagcaaagaccgaaaaagatatgtgcgcgaaataggcgcggtattcgggcagcgttcccagttaatctgggatatcccaccggttgacagttttaacatgaaccgcgccatttacgggataccgcaggccgattacaaaacacgccttgacgagttagccgaaatgtttgatgtcactgaagttatgcacaaacctacaagggtgctttcgctgggcgaacgtatgaagtgcgaatttataatggctatgctccacaagcctaaaatcgtctttctggacgagcctacaatagggcttgatgttatcgctaaagctgttatacgtgaatttatcatggatatgaataaaaaaggcacaacttttatccttactacccacgatttggaagacgtaaaacagcttgccgataatgtgataataattaatcacggcaagaaagtatttgacgattccctgcagaatttacagttaaatcttggtgagaaaaagattgtagagcttacgcatgaacagccttttgacgcaggggcggcgcttccggacagcgtaaggatacttgaacaaaaatcaccgctggaaataactctggaagttgacacttctaaaatagcaatcggggattttatcaagtttctttcaaataaattctccttaaccgacatagcggttaaggaactgcctatggaggagattattacacagatatataaaaattaa

SEQ ID NO: 54364 - protein, 258 aa, Unknown
  Obtained from environmental sample
  DOMAIN (1)...(164): ABC transporter
  misc_feature (1)..(258): Xaa is any amino acid
MLCGALYPTSGEIDVMGYSPSKDRKRYVREIGAVFGQRSQLIWDIPPVDSFNMNRAIYGIPQADYKTRLDELAEMFDVTEVMHKPTRVLSLGERMKCEFIMAMLHKPKIVFLDEPTIGLDVIAKAVIREFIMDMNKKGTTFILTTHDLEDVKQLADNVIIINHGKKVFDDSLQNLQLNLGEKKIVELTHEQPFDAGAALPDSVRILEQKSPLEITLEVDTSKIAIGDFIKFLSNKFSLTDIAVKELPMEEIITQIYKN

SEQ ID NO: 54365 - DNA, 1350 bp, Unknown
  Obtained from environmental sample
  misc_feature (1)..(1350): n is a, c, g, or t
atgaataaaagaaaaaagctggtaaatatcctctttggaagaagggcattggttgttatcgcccttcttattcagatttcactgataattgttttagtagcgagggtaagcgtacattttcaatattcatatttaattctgtattttttaagcattatcgcgtgtatacatgtattaaacaaacatgaaaaagccggttataaacttacatggattttccttatcctcatttttccttttttcggcggaatcctgtatatctattttaatacgatttctacccagaaaaaattaaaaaaagcgcttgataaaaacatacgggacagccggggggctttttttcttgcgggaaacaggctggatgaattaatagacgaacatcccgagttcagaacacacgctcaatatttgcagaatttcgcgggtttcccggttttttcaaacacaaggcagatctaccttgattcgggtgaagcgtttttccgtaaagttctggaagaactggaaaaagcaaaacgttacatttttttggagttttttatcttaaaagagggcgtaatgcttaattccatacttgatattctggaaagaaaagccgccgccggccttgatgtaagaataatgtacgatgatttaggatgtatttttaccctgccggaaaattatcataaaacgctggagcagaagggaattaaatgttttgtatttaatcccttcaggcctattgttacgtcattgcagaacaacagggaccacagaaaaattatttccatagacggcaggatagtgttcacgggcggacttaatcttgcggatgaatatataaatattgtagatcgtttcggccactggaaggacgcggcgataatgcttgagggagacggagcgtgggctttcacgctgatttttctgcaaatgtggaaccttaagccgggagacaaggacaattacgagtcatttttcccgtggaaagacaacatcattgaacatacggaaaaaggcgtcgccgaaggttacgaaaaatggggatatgttcagccttacgccgacagtcccattgaccatgaatttatcggcgagcatgtatatatcaaaataataaatcaggcaaaaaagtatgtttacataaatacgccgtatcttattgttgacgataatttgctttccgccctgacaaccgccgcgaaaagcggagttgacgttaggattataactcctcacagatgggacaaatggatagtggcgattacgtcccgttcatatttccgcaggctcattcacgccggcgtaaaagtttacgaatacacttcgggctttaaccacggaaaaacattgtttccgacgatataa

SEQ ID NO: 54366 - protein, 449 aa, Unknown
  Obtained from environmental sample
  DOMAIN (247)...(274): Phospholipase D Active site motif
  misc_feature (1)..(449): Xaa is any amino acid
MNKRKKLVNILFGRRALVVIALLIQISLIIVLVARVSVHFQYSYLILYFLSIIACIHVLNKHEKAGYKLTWIFLILIFPFFGGILYIYFNTISTQKKLKKALDKNIRDSRGAFFLAGNRLDELIDEHPEFRTHAQYLQNFAGFPVFSNTRQIYLDSGEAFFRKVLEELEKAKRYIFLEFFILKEGVMLNSILDILERKAAAGLDVRIMYDDLGCIFTLPENYHKTLEQKGIKCFVFNPFRPIVTSLQNNRDHRKIISIDGRIVFTGGLNLADEYINIVDRFGHWKDAAIMLEGDGAWAFTLIFLQMWNLKPGDKDNYESFFPWKDNIIEHTEKGVAEGYEKWGYVQPYADSPIDHEFIGEHVYIKIINQAKKYVYINTPYLIVDDNLLSALTTAAKSGVDVRIITPHRWDKWIVAITSRSYFRRLIHAGVKVYEYTSGFNHGKTLFPTI

SEQ ID NO: 54367 - DNA, 1014 bp, Unknown
  Obtained from environmental sample
  misc_feature (1)..(1014): n is a, c, g, or t
atgacagagtggccgagcacactcttttctttcgcaacgcagtacaccgccaccattaccctcagtgccaaaagcggctataccctgcaaggcgtggcagagaacttctttaccgttgcgggggcagaagcaaccaacgccgccaattccggcgttattacggcggtgttcccggaaaccacaaccgcgccacccattacaggaatggtctatgtccccggcggcagtttccagatggggaaagaagtgggaaccgccgggtcaggcgacacaattccggtacacacggtaacgctgaccggcttctacataagcacgtatctggtaacgcagacgcagtaccaggcggtaatggggaggaatcccagtttctttcatggaggagcaggcagggaacctgcgagcggggaaacccaggggagccgcccggtggaagggagtgtaaaatggtacgacgctcttgtgttctgcaacaaattgagcatggcggaaagtttaagtcctgcgtacagcattaatggcagtaccgatccggcagactggggaaccgtaccctacgtcaggaacgagacatgggatgcggtggtaattgttgccggttccaacggctaccggctgccgaccgaggcacagtgggaatatgcggcaaaggggggaaacccagatgtggcaggatgggtagggtatacctattcggggagcgatacggtgggcgatgtggcatggtataaagataacagcgacgacnagacacacgaggttgggaagaaggcggccaacaggcttgggttgtacgacatgagcgggaacgtgtgggagtggtgctgggactggtacgggagctatacgggcggggcgcagacggatccgtctggccccagtgctggtacgtaccgggtgagtcgtggcgggagttggaactacggtgcctctaacgcgcgttcggtgagccggtccgacagctacccgtacatcgggatcaacgacgtcggcttccggttggtctgcccctga

SEQ ID NO: 54368 - protein, 337 aa, Unknown
  Obtained from environmental sample
  DOMAIN (65)...(336): Domain of unknown function (DUF323)
  misc_feature (1)..(337): Xaa is any amino acid
MTEWPSTLFSFATQYTATITLSAKSGYTLQGVAENFFTVAGAEATNAANSGVITAVFPETTTAPPITGMVYVPGGSFQMGKEVGTAGSGDTIPVHTVTLTGFYISTYLVTQTQYQAVMGRNPSFFHGGAGREPASGETQGSRPVEGSVKWYDALVFCNKLSMAESLSPAYSINGSTDPADWGTVPYVRNETWDAVVIVAGSNGYRLPTEAQWEYAAKGGNPDVAGWVGYTYSGSDTVGDVAWYKDNSDDXTHEVGKKAANRLGLYDMSGNVWEWCWDWYGSYTGGAQTDPSGPSAGTYRVSRGGSWNYGASNARSVSRSDSYPYIGINDVGFRLVCP

SEQ ID NO: 54369 - DNA, 357 bp, Unknown
  Obtained from environmental sample
  misc_feature (1)..(357): n is a, c, g, or t
atgaattatcaagacctaatcgtatggcaaaaatcaatggaccttacggcaatggtttaccaagtaaccaaaaaactgccgaaagaagaaatgtattctctgacaaaccaaatgcggagggccgcagtttcgatcccgtctaatattgcggaaggtcaagcgcgaaattcgacaaaagagtttatacagtttttgagaatagcacagggatcaaaggctgaattggaaacccaactcttgttatgtctgaaaataaattacctttccgattcggatatatcggaaacaattcatttattgcaggaaataggcaagatgctgacggttcttattgctaaattgaagagtagtgattag

SEQ ID NO: 54370 - protein, 118 aa, Unknown
  Obtained from environmental sample
  DOMAIN (1)...(110): S23 ribosomal protein
  misc_feature (1)..(118): Xaa is any amino acid
MNYQDLIVWQKSMDLTAMVYQVTKKLPKEEMYSLTNQMRRAAVSIPSNIAEGQARNSTKEFIQFLRIAQGSKAELETQLLLCLKINYLSDSDISETIHLLQEIGKMLTVLIAKLKSSD

SEQ ID NO: 54371 - DNA, 747 bp, Unknown
  Obtained from environmental sample
  misc_feature (1)..(747): n is a, c, g, or t
ttgtttctacatatagagtcaatgacgctaaatgtcttgtttattttttttttaggacttaacctgatatttatgaataaagaaaaactaaaaatatgttacataggcggcggttcaaggaattgggcatgggtttttatgcaggacctcgcctttgaaaaatgcctttacggaaatatagaactattcgacttaaaatacgaagacgctcaaaccaatgaaataatcggcaacaagctaatggaaaaacacaatccgggcagatggaaattccacgcaaacccctcgctgccggacgcgttaggcgaaagcgacattgtcattatttcgatactgcccggcgactttgaggaaatggccgtcgacgttcacgccccggaaaaatacggcatctatcaatcggtcggggatacggcgggagccggcgggattatgcgcgcgctgcggacaataccacagttcaggcagattgctcaggagatacggaaaaacgcccccgccgcgtgggtcatcaactacacaaatcccatggccatttgtacccgcactttgtacagggagtttccgcaaataaaagcgttcggctgctgccatgaggtttttcacacacagaaactccttgccaccgttttggaagaaacgaattacgccccgcctggcagcatcaagcggggaagaaataaaagtgaatgttttgggcatcaatcactttacatggatcgacaaagcttactggaaagacattga

SEQ ID NO: 54372 - protein, 248 aa, Unknown
  Obtained from environmental sample
  DOMAIN (31)...(248): Family 4 glycosyl hydrolase
  misc_feature (1)..(248): Xaa is any amino acid
MFLHIESMTLNVLFIFFLGLNLIFMNKEKLKICYIGGGSRNWAWVFMQDLAFEKCLYGNIELFDLKYEDAQTNEIIGNKLMEKHNPGRWKFHANPSLPDALGESDIVIISILPGDFEEMAVDVHAPEKYGIYQSVGDTAGAGGIMRALRTIPQFRQIAQEIRKNAPAAWVINYTNPMAICTRTLYREFPQIKAFGCCHEVFHTQKLLATVLEETNYAPPGSIKRGRNKSECFGHQSLYMDRQSLLERH

SEQ ID NO: 54373 - DNA, 876 bp, Unknown
  Obtained from environmental sample
  misc_feature (1)..(876): n is a, c, g, or t
atgaggtttttcacacacagaaactccttgccaccgttttggaagaaacgaattacgccccgcctggcagcatcaagcggggaagaaataaaagtgaatgttttgggcatcaatcactttacatggatcgacaaagcttactggaaagacattgacatatttcccatatataaagaatttgtaaaaaaatactccttgacaggttttataaaaacaaaatcttcaggagaggccattaacgccgacgagcttgaacgtcaaaaatattttggttcaacagaccgcgtaaaaatggatctcttccgccgtttcaacctgatagccgccgccggtgacaggcacctcgccgaattctgccctcattcatggtatttgtcttcgcctgaagccgctgaacgctgggggtttgcccttactcccgtttcatggcggattaaagaccgtgaaaaattaatacaaaaagcaaaagcgtacagcgacggaatagaagaaatgattcccgcggaatctgacgaagagggcataaaaattatcaaggcgttaatgggtctgggggacattacaacaaacgtaaacataccaaacatcggacagatgcctgatcttccaaaaggagttgttgttgaaaccaacgcattatttatgcttgataatattaagcctgtttcaagctttgagcttcccgtagatttaagactgcttataatgaggcatatccttactcaggaggaaattattgaagcggcttatgaggacgatatgaaaaaagcgtttcgcgtttttttacttgattttgaaatcaggaaactgccgctcggaagcgcccattctcttttcgatgaaatgctccgcgcaaccggcttaacaggcgaataa

SEQ ID NO: 54374 - protein, 291 aa, Unknown
  Obtained from environmental sample
  DOMAIN (1)...(267): Family 4 glycosyl hydrolase
  misc_feature (1)..(291): Xaa is any amino acid
MRFFTHRNSLPPFWKKRITPRLAASSGEEIKVNVLGINHFTWIDKAYWKDIDIFPIYKEFVKKYSLTGFIKTKSSGEAINADELERQKYFGSTDRVKMDLFRRFNLIAAAGDRHLAEFCPHSWYLSSPEAAERWGFALTPVSWRIKDREKLIQKAKAYSDGIEEMIPAESDEEGIKIIKALMGLGDITTNVNIPNIGQMPDLPKGVVVETNALFMLDNIKPVSSFELPVDLRLLIMRHILTQEEIIEAAYEDDMKKAFRVFLLDFEIRKLPLGSAHSLFDEMLRATGLTGE

SEQ ID NO: 54375 - DNA, 927 bp, Unknown
  Obtained from environmental sample
  misc_feature (1)..(927): n is a, c, g, or t
atgataaaccgccggcaagtaatacagcggcataaccctcaatataaatcgttgaaaaaaaacgcgccgctatcaacaggcaacggaacattttgttttaccgccgattttacgggattgcagtcattttttgacgattactgtgcggcgcaagacgccttccctttatgcacaatggcagaatggggctggcattcgtatcctcaaaccgaagatgaatctcttttgcgtttaacgccctatgatacttacggcagaacagtttattacgctacagacgataaaggacaggaagaactttttaagaaaatcagagtaaacgctcataaatttcacttgggactgattggttttgaattacaggataaaaaacttacgttagaaaattgcaaacctgtcagtcaactactctctttatgggaaggaattttatcttccgaatttaagattgacggtaatattattaaaactgaaatttttgtccacccgaaagaggatactttgtatatccgcgcacggtcgtcattcctaaaaaacttgcgcgtaactatcaattttccttatggcagtcataaaaaaaccggagcggacttctctgccccgcgtttacatcaaactaaaatttcaaaaaacaatgacgattcggtttcaatagaaagagaacttgacggcacaatttataaagttacagttaacggcgcaggatttacggtttcatttaatgaaaatcagcatattttacaattaattccgcatgaagaatgtatcgatttcaacgttcgatttgaacctgtaaacatcccttcttttaaaaatgccggaattacaatagacaaattacaaaataaagaggcggattcgtttgatgaagcaaaaacaaaatgcctttcgttctgggaacattacggacatcggcggccgccataa

SEQ ID NO: 54376 - protein, 308 aa, Unknown
  Obtained from environmental sample
  misc_feature (1)..(308): Xaa is any amino acid
MINRRQVIQRHNPQYKSLKKNAPLSTGNGTFCFTADFTGLQSFFDDYCAAQDAFPLCTMAEWGWHSYPQTEDESLLRLTPYDTYGRTVYYATDDKGQEELFKKIRVNAHKFHLGLIGFELQDKKLTLENCKPVSQLLSLWEGILSSEFKIDGNIIKTEIFVHPKEDTLYIRARSSFLKNLRVTINFPYGSHKKTGADFSAPRLHQTKISKNNDDSVSIERELDGTIYKVTVNGAGFTVSFNENQHILQLIPHEECIDFNVRFEPVNIPSFKNAGITIDKLQNKEADSFDEAKTKCLSFWEHYGHRRPP

SEQ ID NO: 54377 - DNA, 648 bp, Unknown
  Obtained from environmental sample
  misc_feature (1)..(648): n is a, c, g, or t
ttggattaccatatcttggaatgtacgacaaagccgataatttttgacggagacacaggcggtcaacattttgccttcactgtaaaaacacttgagaggaacggcatatccgccgtcattattgaagacaagacaggtcaaaaaagaaattcgcttttcggaactgatgtaaatcaggaattatgtcccattcctgaattttgcgacaaaatcaaggacggcaaacaggcgcaggttaccaaagaatttatgatcattgcgcgtcttgaaagcttaatagcgggttttcccatttcccacgctcttgaaagagcgcgcgcttttgtcgaagcgggcgctgacggcgttatgattcacagcaaagaaaaaacaggcgaagacattaaagaattttgttctcttttccgcgcggaatatccgcatatacctctggtcttagtaccgacaacgtataacatgtttactgaaaaagagcttgcctcatggggcgcgaatataataatctatgcgaaccatatgctccgctcagcatatccggcaatggtaaacaccgcaaaaataatcttacaaaacgaacgctctcttgaagcggattcagtttgtatgcctattaaagaaatacttgaattaatcccaggcggcaaataa

SEQ ID NO: 54378 - protein, 215 aa, Unknown
  Obtained from environmental sample
  misc_feature (1)..(215): Xaa is any amino acid
MDYHILECTTKPIIFDGDTGGQHFAFTVKTLERNGISAVIIEDKTGQKRNSLFGTDVNQELCPIPEFCDKIKDGKQAQVTKEFMIIARLESLIAGFPISHALERARAFVEAGADGVMIHSKEKTGEDIKEFCSLFRAEYPHIPLVLVPTTYNMFTEKELASWGANIIIYANHMLRSAYPAMVNTAKIILQNERSLEADSVCMPIKEILELIPGGK

SEQ ID NO: 54379 - DNA, 1122 bp, Unknown
  Obtained from environmental sample
  misc_feature (1)..(1122): n is a, c, g, or t
ttgatagaaaccgcatattttttcaacaaactcgtggaaaagggagtcggttttttttctggcgtacccgattcacttttaaaagatttttgcgcgtatattaccgatcacgttgaaaagcaaaatcatattatcgccgtaaacgaaggggccgccatcggtctcgcctgcggatatcatcttgccacaggacgcatttcacttgtgtatatgcaaaattcaggcataggaaacgcggttaatcctttgctctcgcttgcggataacgacgtatatcgcatacctttattgcttgtcataggctggcgcggagagccgggcgtacatgacgaacctcagcatataaaacagggaaaggttacctgctcccttcttgaaagcatgggtataccctacgcggtacttgagaaaacagaggaagctgtaaacagccagattgaaacctgttttaaaacaatttccgaaacaggttcaccatacgctcttgttatacgcaaagaaacatttgcgccatacgctcttcaaaaaaaagaagaacataacgcggtaatgacacgtgaggaagcaatcgaagaaattgtttccggccgcggcggaattatcgtgtccacaaccggcatgatttcacgcgaattgtacgagttacgcgacaaggcggacgcgggtcatgcgcgcgattttcttaccgtaggttcaatggggcacgcttcttccatcgcgctgtctgtcgcccttcaaaaaccgcaattgcaggttacctgccttgacggagacggcgcggctcttatgcacatgggggcgttagccgcaatcgggacgcaaaaaccgcgtaattattaccacattgttcttaataacggcgctcacgactctgtcggcggacagccgactattgcgccttttattgatattccggctattgcgctctcttgcggctacacaaaagtttatcaggcgaaaacaaaagaagaattaaaaaaaatgttagccaaaaagaacgaagggcttacgtttattgaagtaaaagtaaaaaagggcgcgcgaaaagatttgggacgtccaaaaacaatgccgcaggaaaataaagcggcgtttatgaaatttattgaggaatatagatga

SEQ ID NO: 54380 - protein, 373 aa, Unknown
  Obtained from environmental sample
  DOMAIN (204)...(341): Thiamine pyrophosphate enzyme, C-terminal TPP binding domain
  misc_feature (1)..(373): Xaa is any amino acid
MIETAYFFNKLVEKGVGFFSGVPDSLLKDFCAYITDHVEKQNHIIAVNEGAAIGLACGYHLATGRISLVYMQNSGIGNAVNPLLSLADNDVYRIPLLLVIGWRGEPGVHDEPQHIKQGKVTCSLLESMGIPYAVLEKTEEAVNSQIETCFKTISETGSPYALVIRKETFAPYALQKKEEHNAVMTREEAIEEIVSGRGGIIVSTTGMISRELYELRDKADAGHARDFLTVGSMGHASSIALSVALQKPQLQVTCLDGDGAALMHMGALAAIGTQKPRNYYHIVLNNGAHDSVGGQPTIAPFIDIPAIALSCGYTKVYQAKTKEELKKMLAKKNEGLTFIEVKVKKGARKDLGRPKTMPQENKAAFMKFIEEYR

SEQ ID NO: 54381 - DNA, 678 bp, Unknown
  Obtained from environmental sample
  misc_feature (1)..(678): n is a, c, g, or t
atgatttttctggttcctttcgggttgataacgcttattttttacgctataggcttcagaaaagccatgaaacaggttttctaccggattggccaaggctggggattgtcgattattaaactaacaggatgcaaggtaaccgttacaggcagggaaaatatacctaaaaaaggaggcgtatgctttgtaagcaaccacagcggctattttgacattgtacttatgcttgcctactgcggccgtatgattgggtttgtggctaaaaaagaactggcttttgtgccttttcttaatatatggatttttatgcttggcggattctttattgacagaagcactttaagaagggcaagccggacaattaacaagggagtggaaaaggttaaatcgggccacgggcttgtcgttttccctgaaggccaccgttccctgggacgcgggctgcttcccttccaccccggttccttaaaactcgccacaatggcggaagcgcctattatcccaactgtgattgaaggctcttatgaattatgggaaaaaaccaaactggtcgtaaaaaccccgcttaaagttaccttttgcgaacccattgacaccgcaagcattcccgttacggatcgaaaacttgtcctgtcggacaggatttatgcggttataaaggaaaaattaggaaaataa

SEQ ID NO: 54382 - protein, 225 aa, Unknown
  Obtained from environmental sample
  DOMAIN (45)...(172): Acyltransferase
  misc_feature (1)..(225): Xaa is any amino acid
MIFLVPFGLITLIFYAIGFRKAMKQVFYRIGQGWGLSIIKLTGCKVTVTGRENIPKKGGVCFVSNHSGYFDIVLMLAYCGRMIGFVAKKELAFVPFLNIWIFMLGGFFIDRSTLRRASRTINKGVEKVKSGHGLVVFPEGHRSLGRGLLPFHPGSLKLATMAEAPIIPTVIEGSYELWEKTKLVVKTPLKVTFCEPIDTASIPVTDRKLVLSDRIYAVIKEKLGK

SEQ ID NO: 54383 - DNA, 399 bp, Unknown
  Obtained from environmental sample
  misc_feature (1)..(399): n is a, c, g, or t
ttgatcagatcggcacgagtcttcccctggcgcgccgatattttctttacaggacactttccgactaagagcctgcctgaactttacgccggttctgattttgtcattattccttcaatgtacgaaggtttcggtatgggcgcgcttgaggcaatggcctccggcgtgcccgtcctctgcgccagagccgcctccctccccgaaaccgcagaacacgcggctctctactttgacccgctaaatatcgaagacatggcggacaggatggtaaatatcagcaccaacagagaaatgtacaacgactgccgcaggcttggcttagaaagggcgaaattatttacatgggaacaatgtgttaaacgcactctgcagataatctacgaaacctgcggaaaataa

SEQ ID NO: 54384 - protein, 132 aa, Unknown
  Obtained from environmental sample
  misc_feature (1)..(132): Xaa is any amino acid
MIRSARVFPWRADIFFTGHFPTKSLPELYAGSDFVIIPSMYEGFGMGALEAMASGVPVLCARAASLPETAEHAALYFDPLNIEDMADRMVNISTNREMYNDCRRLGLERAKLFTWEQCVKRTLQIIYETCGK

SEQ ID NO: 54385 - DNA, 510 bp, Unknown
  Obtained from environmental sample
  misc_feature (1)..(510): n is a, c, g, or t
atgaatacggacgtgtgcaactaccttttcggcacgatacttgcgatggcaaaagaagacgtgtatttaagcatagccctttcaattaccgttcttgttctttttattcttttctataataagttattcgccataacttttgacgaaacattcgccaaagccgccggaattaaaacggggctttacaatatgctaatcgcctttttaaccgctcttacaattgtgctgggaatgcgcataatgggggccatgcttatttccagcctgattatttttccggcgttaagctcaatgcgtattttcaagaagtttaaaagcgttaccgtttgctcatccgttatctcgatactttgcttttttacaggcgtggttatatcgtatatctacgccacgccgacaggcgcgagcgttgtaatgatcaatataattgtcttcgcgctgttctggctttttgaaaatatacgcaattcaaccgtattaaacaaatacaggagaaaaaattatgcctaa

SEQ ID NO: 54386 - protein, 169 aa, Unknown
  Obtained from environmental sample
  DOMAIN (1)...(152): ABC 3 transport family
  misc_feature (1)..(169): Xaa is any amino acid
MNTDVCNYLFGTILAMAKEDVYLSIALSITVLVLFILFYNKLFAITFDETFAKAAGIKTGLYNMLIAFLTALTIVLGMRIMGAMLISSLIIFPALSSMRIFKKFKSVTVCSSVISILCFFTGVVISYIYATPTGASVVMINIIVFALFWLFENIRNSTVLNKYRRKNYA

SEQ ID NO: 54387 - DNA, 891 bp, Unknown
  Obtained from environmental sample
  misc_feature (1)..(891): n is a, c, g, or t
ttggatggctataaatttatcggatggacgggcgcggtaaacgatgccgcccataccgtaacagtaatcatgaacgacaacatgacgctgatggcgaatttccaacaacaacagcaacaaaccactagttatacacttacgacaaacgtatccccaacgggcggagggagtgtgtcgcgcagcccgaaccaaacaagctatacatccggtacgagcgttaccgtgacggccactgcggcgagcggttatacgtttacggggtggtctggggcgtcttcgtctacaagttcttccgtgactgttacaatgaatgaggacaagacactgacggccaattttcaacaacaacaagccaataattacaccctcacaacaaacgtatccccatcggacggcgggagcgtgtcgcgtagcccgaatcaaacaagttactcgtcgggaacaagcgttaccgtaacggctactccggcgagcggttacacttttaccggatggtcggacgcgtcaacgtctactagttcttccgtgacgattacgatgaatagcaataagactctcaccgcaaatttccaacaacagcaagccgggccgtatacactaataacaaacgtgaacccatcggacggcgggagcgtgtcgcgtagcccggatcaaacaaactatacatccggtacgagagttaccgtaacggctactgcggcaagcggttatacgtttatggggtggtcgggggcgtcaacgtctgtaagctcttctgtggttattacaatgaacggcgataatacgctgattgccaattttcgtgataataataactgtgggcaagacggaacggccggttcgtgtaagacagtggagataggcggtaagatgtggatggcagagaattga

SEQ ID NO: 54388 - protein, 296 aa, Unknown
  Obtained from environmental sample
  misc_feature (1)..(296): Xaa is any amino acid
MDGYKFIGWTGAVNDAAHTVTVIMNDNMTLMANFQQQQQQTTSYTLTTNVSPTGGGSVSRSPNQTSYTSGTSVTVTATAASGYTFTGWSGASSSTSSSVTVTMNEDKTLTANFQQQQANNYTLTTNVSPSDGGSVSRSPNQTSYSSGTSVTVTATPASGYTFTGWSDASTSTSSSVTITMNSNKTLTANFQQQQAGPYTLITNVNPSDGGSVSRSPDQTNYTSGTRVTVTATAASGYTFMGWSGASTSVSSSVVITMNGDNTLIANFRDNNNCGQDGTAGSCKTVEIGGKMWMAEN

SEQ ID NO: 54389 - DNA, 366 bp, Unknown
  Obtained from environmental sample
  misc_feature (1)..(366): n is a, c, g, or t
atgccttcttacaaggtttttattcctaattcctcactccgaatacagaccgcgctcaaattgggcgcttgcggctacatatcaaaaaccaaaaacaaaaccgaattgcttacggccattgatgccgtgcttcgcggggaagtgtatatcaatgacgagaacgccgtcaaattaagcaagacattaggcacatacggacaatttaccaaaaaggaaatggaagtgcttaatttgataaagcagggcaaaagcaacagggaaatcgccaaagccctgtatataagcgtccgcaccgtagagaaccacatcagcaatatttactttaagactggctgcgacaacaggcagaaactggaaaaatactaa

SEQ ID NO: 54390 - protein, 121 aa, Unknown
  Obtained from environmental sample
  DOMAIN (65)...(118): Bacterial regulatory proteins, luxR family
  misc_feature (1)..(121): Xaa is any amino acid
MPSYKVFIPNSSLRIQTALKLGACGYISKTKNKTELLTAIDAVLRGEVYINDENAVKLSKTLGTYGQFTKKEMEVLNLIKQGKSNREIAKALYISVRTVENHISNIYFKTGCDNRQKLEKY

SEQ ID NO: 54391 - DNA, 573 bp, Unknown
  Obtained from environmental sample
  misc_feature (1)..(573): n is a, c, g, or t
atgaatgattttataacaattgattttgaaaccgctacggggaaacctgaaagcgccatttccgtaggcttggtaaagtaccgcaattacaagcctgtaagctcttattattcgttaatccgtccgccgaatctgtacatacgctccgattttacggaaattcacggacttacggttgatgatgtaagggacgcgcctgattttgcttatctatggaaaaaggaaataaagggatttatcggaaataccatgcttgcggctcataacgcgccgtttgatatgagagtccttaaagcggttcttgaatggtatgaacttgacgtaccggaaatatcatatttttgtacgcttaatttggcgcgccgcgcgtggtcccagcttgagtctcacgcgcttgcggcgctggcaaagaattttgggattgtttacaacgcgcacaacgcgcttgacgacgcgcttacctgcgggaaaatggtacagcttgcggcggaaaaatttgattcgcaaaagaatattgaggaattcctggaatttacggaagtagaaatagggtatttatcaggtaagaagtaa

SEQ ID NO: 54392 - protein, 190 aa, Unknown
  Obtained from environmental sample
  DOMAIN (4)...(159): Exonuclease
  misc_feature (1)..(190): Xaa is any amino acid
MNDFITIDFETATGKPESAISVGLVKYRNYKPVSSYYSLIRPPNLYIRSDFTEIHGLTVDDVRDAPDFAYLWKKEIKGFIGNTMLAAHNAPFDMRVLKAVLEWYELDVPEISYFCTLNLARRAWSQLESHALAALAKNFGIVYNAHNALDDALTCGKMVQLAAEKFDSQKNIEEFLEFTEVEIGYLSGKK

SEQ ID NO: 54393 - DNA, 1566 bp, Unknown
  Obtained from environmental sample
  misc_feature (1)..(1566): n is a, c, g, or t
atgaaattaaatttattttataaaagagacaagtcccctgccgatgagggaaaagccggaaatgatttgtccgttaaggataaaagcatattagaccaaatcgacaaaatcgttgaaatttccaggaaaaacggcatagaaaaatgcctgactatggggaaaaaacatctggattttgttacaaagaaactaggcataaaccctatacaggcgattttattttctcattttttggaaaaaagcaatgactccaatatacagctaagtgaaattgcccagaccataaaatgcagcaatataaagataataaaatatatgaacgaatgtgaagaattggaaaagaaaaaactaatacgctgcagcaggggcggcgacggtatttctttcagaataccgcgtaatgtatgggactcactaaggaaaaatgatgagttcaggccggataagctggataatttaacaatatcaaagttctttgttactcttgaagatatttttgatcaaagaggcaataatgaattaacttatgactctatgtcggctgaaattttagaccttataaaccagaacatgcatcttcaattttgtaaaaaaattatgagctataatctttacgaagacacccttattcttctggtatgtttttgccatttattcggcaataacgatgatgataatataggggcgcacgatcttaaatttttatacgacgaaaaatttatctacagcgacgttaaaacaagtttagttcatggcagccatgtccttattaaatcaaaatatattgtttataccaataatgacggttttgtaaatactgattcatggaaattgtcggatatggcaaaaaaagagctgttatctgaacttgtagaaaagcacaattaccaaaaaaacctcattctgtttgataaaattaagcccaagaatatgttctacaacgaaaaagaaacggaggcaatcggaaaactccgctcgcttttacaggttgataattaccataaaatacaggacagactggacggcaagggaatgagaaaggggtttgcctgcctgttctcgggcggacctggaacaggtaaaacagaaaccgcgtggcaaatcgcccgcgaaacaaaacggaacgtaatgatggtggacatagctgaaacaaaaagcatgtggtacggggaaagcgaaaagaaaataaaggaagtttttgatacttacagaacggctgtagataattcagaaattgctcccatcctgttgtttaacgaagccgacgctgttataggcaagagaaaagaaataggttcatccaatcactcgattgatcaaacagaaaataccattcaaaacattatcctgcaggaaatggaaaaccttaacgccatattattgccacaaccaatttatcgcagaatatggacagcgcctttgagcgccgtttcctgtataaaatcacttttgaaaaaccggtcgcggagagccgcaaaggcatctggaatgcgctgctgccggacttgccggatgataaagccgccgaattgtcgcaaaaatttgaactgtcaggcggccagatag

SEQ ID NO: 54394 - protein, 521 aa, Unknown
  Obtained from environmental sample
  DOMAIN (350)...(501): ATPase family associated with various cellular activities (AAA)
  misc_feature (1)..(521): Xaa is any amino acid
MKLNLFYKRDKSPADEGKAGNDLSVKDKSILDQIDKIVEISRKNGIEKCLTMGKKHLDFVTKKLGINPIQAILFSHFLEKSNDSNIQLSEIAQTIKCSNIKIIKYMNECEELEKKKLIRCSRGGDGISFRIPRNVWDSLRKNDEFRPDKLDNLTISKFFVTLEDIFDQRGNNELTYDSMSAEILDLINQNMHLQFCKKIMSYNLYEDTLILLVCFCHLFGNNDDDNIGAHDLKFLYDEKFIYSDVKTSLVHGSHVLIKSKYIVYTNNDGFVNTDSWKLSDMAKKELLSELVEKHNYQKNLILFDKIKPKNMFYNEKETEAIGKLRSLLQVDNYHKIQDRLDGKGMRKGFACLFSGGPGTGKTETAWQIARETKRNVMMVDIAETKSMWYGESEKKIKEVFDTYRTAVDNSEIAPILLFNEADAVIGKRKEIGSSNHSIDQTENTIQNIILQEMENLNAILLPQPIYRRIWTAPLSAVSCIKSLLKNRSRRAAKASGMRCCRTCRMIKPPNCRKNLNCQAAR

SEQ ID NO: 54395 - DNA, 522 bp, Unknown
  Obtained from environmental sample
  misc_feature (1)..(522): n is a, c, g, or t
atggctgataatccgttgattgtgcaaggtgacaggactctgctgcttgatgttcacgcggaaaaggcggaacaggccagggttgcgattattccttttgcggaactggagaaatcgcccgaacatatccatacctaccgtataacacccctgtccctgtggaacgccgcaagcgccggattcaaccccaacgacatcgcgaaagcccttgcagaatacagccgctattccgtgccatcaggcattattgaaagtttttccgataccatgtcacgttacggaaagatcaggatgaccgccgcgcctgaacccgccgctgacaatgatacgctgttcctggaaatcgtcgataaagcggtactggcggaagtcgaatccataaaaatacttgaaaaatatttaaaaaaaaccgagaaagggtttttgctaaaactggttgacaggggaacggtaaaacaggcgcttatcagacagggatggccggtgcgggacgaagccccgcttgttccggcgataatctga

SEQ ID NO: 54396 - protein, 173 aa, Unknown
  Obtained from environmental sample
  misc_feature (1)..(173): Xaa is any amino acid
MADNPLIVQGDRTLLLDVHAEKAEQARVAIIPFAELEKSPEHIHTYRITPLSLWNAASAGFNPNDIAKALAEYSRYSVPSGIIESFSDTMSRYGKIRMTAAPEPAADNDTLFLEIVDKAVLAEVESIKILEKYLKKTEKGFLLKLVDRGTVKQALIRQGWPVRDEAPLVPAII

SEQ ID NO: 54397 - DNA, 2028 bp, Unknown
  Obtained from environmental sample
  misc_feature (1)..(2028): n is a, c, g, or t
atgccagcccactccctactccctactccccactcccttatatacaaaatggtcgacacctgcggcggcgaatttgaagcgaaaacgccgtatttctactctattcaaaacggaacggaaaacgaggctttgcctttcatccaaaagagcgtcaaacagcggattgtcgtgctgggttcagggcccatacgcattggccagggcattgagtttgactatgcctgcgtgcattgcgtatggacgctgaaaagcatgggatatgaagtcatcgttattaataacaaccctgaaaccgtatccaccgactttgacaccgccgacaggctgtactttgaaccgctgtgcgttgacgatgtgatgagcataatcgaaatcgaaaaaccgttaggcgttatagtggcatttggcggcggtacggcaataaagctcacaaaaaaactttacgagcgcggtgtcaatgtaatcggtacttcggcagacagcatagacatttgcgaagacagggaacggtttgacgcgcttctggagcgccttcaaataaaacgccccaggggattcggcgtttttaccgaggcggaagcgttggcagccgccgaaaaactcggctaccctgtgcttatgcgcccgtcctacgtactcggcgggcagaacatgatcatcgcgttttctaaggatgacatacgcgagtacatggagatcatcctgcgttcaaaacaggaaaatcccgttcttattgacaaatatcttgaaggcctggaaatagaagttgacgccatctgcgacggcgacccttcgctgggcgggaaaggggccgtgcttattcctggcataatggaacacgttgagcgcaccggcgttcattcgggggacagcattgccgtatatcccgccctgaacattaccgacgctttggccgaaaagattcttgccgttacggaaaaactctgcatggctttgaatgttaagggcctggtaaatattcaatacgttctgtacgaaaacgacattttcgtaatagaagtcaatccgcgagcatcccgcacagtgccatatatcagcaaggttacgggcattcccatgtgtgaacttgccacaaaggtcagtattggtgaaacgctttcttctttggggtactcatccggcatagcgaagattccgccttataccgcggtgaaggttcccgttttttcctttgaaaagcttgccggcgtggatacgcatcttgggcccgaaatgaaatccacaggggaagttttaggcatcgggaaaaacctagaggaagcgctttacaaagggcttgtcgctgcggggtacaagatgaaaaaacgcggcggcgttctgattaccgtacgggacagcgacaagcctgagattatcgatatagcggaaaaatttttactggcgggattttccctgtacgcgacgaggggaacggcccggtaccttggggaaagtggttttgaggttcaagccacggataaaatcagcgataacaaagataacaacacggcgacgcttttggaaagcggcaagatcagttatatcatctccacctcagagaaaggcagggatcctgccaatgacagtgtgaaaatacgcaggcgcgcctgtacactgggcattccctgccttacttcagtcgatacagcaaatgcgctggcagacggcctgctttcaggatacagcgagatcaatacggaacttgtagatattaaccgcctcaggagcgagcaaacaaaactagcgtttaccaagatgcatacttgcggcaatgattatatttactttaactgcttcgaaatggaaatcaactcgccagaatcgctttcggtgttcctttccgacaggcataccggcgtgggcggcgacggcgttgtgctgatattgcggtcaaatatcgccgacgcgaaaatgcggatgttcaaccttgacggcagtgaaggaagcataagcggaaacgcaatccgctgcgtcgcgaaattcctttacgancacggggattgtaaaaaagcgcgaaatgcggattga

SEQ ID NO: 54398 - protein, 675 aa, Unknown
  Obtained from environmental sample
  DOMAIN (165)...(346): ATP-grasp domain
  misc_feature (1)..(675): Xaa is any amino acid
MPAHSLLPTPHSLIYKMVDTCGGEFEAKTPYFYSIQNGTENEALPFIQKSVKQRIVVLGSGPIRIGQGIEFDYACVHCVWTLKSMGYEVIVINNNPETVSTDFDTADRLYFEPLCVDDVMSIIEIEKPLGVIVAFGGGTAIKLTKKLYERGVNVIGTSADSIDICEDRERFDALLERLQIKRPRGFGVFTEAEALAAAEKLGYPVLMRPSYVLGGQNMIIAFSKDDIREYMEIILRSKQENPVLIDKYLEGLEIEVDAICDGDPSLGGKGAVLIPGIMEHVERTGVHSGDSIAVYPALNITDALAEKILAVTEKLCMALNVKGLVNIQYVLYENDIFVIEVNPRASRTVPYISKVTGIPMCELATKVSIGETLSSLGYSSGIAKIPPYTAVKVPVFSFEKLAGVDTHLGPEMKSTGEVLGIGKNLEEALYKGLVAAGYKMKKRGGVLITVRDSDKPEIIDIAEKFLLAGFSLYATRGTARYLGESGFEVQATDKISDNKDNNTATLLESGKISYIISTSEKGRDPANDSVKIRRRACTLGIPCLTSVDTANALADGLLSGYSEINTELVDINRLRSEQTKLAFTKMHTCGNDYIYFNCFEMEINSPESLSVFLSDRHTGVGGDGVVLILRSNIADAKMRMFNLDGSEGSISGNAIRCVAKFLYXHGDCKKARNAD

SEQ ID NO: 54399 - DNA, 744 bp, Unknown
  Obtained from environmental sample
  misc_feature (1)..(744): n is a, c, g, or t
atgatcgatttacatcaaatccgccctgataccggttccggtcgcggcatagggcgtgagatcgcccgaaaactcgctcaagccggcgccgacgtcgccataagcgatatcgacatggggacggcaaaggccacggccgacgagatagcctccgagtttgggcgaaagaccgccgccttagccgccgatgtctcgcatgccgccgatgtcgagaagatgtttgccgacgctattgaggcgttttccaagatcgacatcttggtcaacaacgccggcattacccgcgacgggctgattatgcggatgaaggaggaggactgggatctcgttttgaacatcaacctgaagagcgctttcctatgttgcaaagaggcggctaggcctatgatgaaggcgcgcggcgggaagatcataaatatcgcctctgtcgtggggcttatgggtaacgccgggcaggtgaactattcggcctccaaagcggggatgatagggctgacgaagaccttggcgcgtgagttcgcgtcgcgttccatcaacgtaaacgccatagccccgggcttcatccgcacggctatgacggacaaacttacggacgcggagaaggcgaagctgtctgaccaaatcccgatggccaaattaggggagccgaacgacgtggccaacgcggcgctgttcctgagttcgaatttagcggattacataacgggtcaagtaatcacggtggacggcggattggtgatgtaa

SEQ ID NO: 54400 - protein, 247 aa, Unknown
  Obtained from environmental sample
  DOMAIN (11)...(174): short chain dehydrogenase
  misc_feature (1)..(247): Xaa is any amino acid
MIDLHQIRPDTGSGRGIGREIARKLAQAGADVAISDIDMGTAKATADEIASEFGRKTAALAADVSHAADVEKMFADAIEAFSKIDILVNNAGITRDGLIMRMKEEDWDLVLNINLKSAFLCCKEAARPMMKARGGKIINIASVVGLMGNAGQVNYSASKAGMIGLTKTLAREFASRSINVNAIAPGFIRTAMTDKLTDAEKAKLSDQIPMAKLGEPNDVANAALFLSSNLADYITGQVITVDGGLVM

SEQ ID NO: 54401 - DNA, 1116 bp, Unknown
  Obtained from environmental sample
  misc_feature (1)..(1116): n is a, c, g, or t
atgacgcaggaagaggctaagaagatacttctcggaaaccttgaggggcaggtgcgctacgagtgcgctcagatgatcaaggagatgaaagaccaagccaaagccgacgccgaaaaagaggcgaaggaaatcatcatccagtcgatacagcgttgcgccgccgataccactgtggaatctacggtctcggtcgtccatttacccaatgacgaaatgaagggacgcattatcggcagggagggccgcaacatccgctctttcgaggaggctactggtatagacgttatcgtggacgacacacccgaagcggtgatactctccggcttcgatcccatccgtcgcgaagtagcgcggctcgcccttgagaagttgataacggacggacgcatacacccgggacgcattgaggaactcatcaagaagagcgaaaaggaattagacaagataatgaaagagtccgccgaagaggtcatcttcgagttggacgtacacggactgcggcctaaattggtggagatgctcggccgcctaaaataccgtacatcctacggccaaaacgtccttcagcacagcaaggaggtggcgataattgccgggctgatggcgacggagctaggcctagaccccaaagtagccgtccgcgccggcctgctgcacgacatcggtaaatcaatagaccgcgagactgagggaacgcactcggaactcggcgcagaactggcctccaagaacggcgagaacgaaataatctgcaacgcaatcgccgcgcaccacgaggacgtgccgccgatatccatgtacccgatcttaatccaagccgccgacaccatatcaagcacaaggcccggcgtaaggcgtgaaacgctcacgaactacgtcaaccgcttgacaaacttggaagacatagccgactccttcaggggagtccaaaaagcctacgtcatccaagccgggcgcgagatacgagtaatggtggaaccggagcagataaacgacgcccaagcccaagaactggccggtcaaatctcgcagaagatacaggacgagatggaatacccggggcagattaaggttactatcatcagagaaatacgatttacggaattcgcgaaataa

SEQ ID NO: 54402 - protein, 371 aa, Unknown
  Obtained from environmental sample
  DOMAIN (62)...(121): KH domain
  misc_feature (1)..(371): Xaa is any amino acid
MTQEEAKKILLGNLEGQVRYECAQMIKEMKDQAKADAEKEAKEIIIQSIQRCAADTTVESTVSVVHLPNDEMKGRIIGREGRNIRSFEEATGIDVIVDDTPEAVILSGFDPIRREVARLALEKLITDGRIHPGRIEELIKKSEKELDKIMKESAEEVIFELDVHGLRPKLVEMLGRLKYRTSYGQNVLQHSKEVAIIAGLMATELGLDPKVAVRAGLLHDIGKSIDRETEGTHSELGAELASKNGENEIICNAIAAHHEDVPPISMYPILIQAADTISSTRPGVRRETLTNYVNRLTNLEDIADSFRGVQKAYVIQAGREIRVMVEPEQINDAQAQELAGQISQKIQDEMEYPGQIKVTIIREIRFTEFAK

SEQ ID NO: 54403 - DNA, 1524 bp, Unknown
  Obtained from environmental sample
  misc_feature (1)..(1524): n is a, c, g, or t
atgaacgaaatggcgctggtacttgattttggcggccagtataaggagcttatcgcggggacggtaaggaatctgtccgtatactcgcagataatgccgggcaataccccgattgatgaaattaaacggctgaaccccatcggtattatcctgacaggcgggccgaagagcgtatacctgcgcgactcgccaaagtgcgaccccgaagttttttcattgggtattcctgtcctcggtatctgttacggaatgcatttaatgtgttatacgcttggcggcaaggttgaacccggcgatatgggtgaatacgggcgcgtcagggtaacgcccacgaaaagccagtcaaagttattcaaaaataaaaaagattcctttaccgctctgatgagccacggagacgttgtaacaggcctgccggaagggtttcgcgtaacggcaagaagcccggtctgcacggcagcctgcgagaacaaggcgaaaaaactttacgccgtgcagtttcacccggagacaaaacacaccagaggcggacgcgaaataatcaaacagtttttgtatgatatttgcggcgcatcgggcgattataaactcggtaattatataaatacccaaattagacaaataagagaaaaggtcggtgataatcatgttctgctcgccctgtcgggcggggtcgattcatcggtatgtgcgggtcttttgtccagggctataccggggcagctcacgtgcatctttgttgaccacggctttatgcgcctaaacgaaggagacgaaatagaacgcgcgttttcacggcggaatctccgctttatccgcgtgaacgccaaagagcgtttccttgcgaaactgcgtggcgtgatcgatcccgaaaaaaagcgcaagctcatcggtgaagagttcatccgcgtattcgaggaagaatccgctaagctcggggacattccctttctggctcagggaacgatttaccctgacgtggttgaatcaggcggcaagtacggcgccgttatcaaaagccatcacaacgtgggaggactgcctgaaaaactcaagtttaccgctatcgtggaacccctgtccctgttttttaaggacgaggtgcgcgtcctcggcagaaagctggatttgccggcgtcgctggtgaaccgccagcccttccccgggccggggcttgccatccgcgtcatgggcgaggttaccgaagaaaagctggatgttttacgcgccgccgacgctatcctccgggaagagctggacggtatgaagcgcangccggatcagtatttctgcgtcctgactaacacccgcactgtgggcgttaaaggggatgacaggacttatgattatgtaatcgccgtcagggctgtaaagacggacgactttatgacctgcgaatacgcccctcttccgcacaagcttttaagccgcatatcatcaagaattacggcggagataccgtccgccagccgcgttgtttacgatattacatcaaagccccccgctacggtagaatgggaataa

SEQ ID NO: 54404 - protein, 507 aa, Unknown
  Obtained from environmental sample
  DOMAIN (17)...(170): Peptidase C26
  misc_feature (1)..(507): Xaa is any amino acid
MNEMALVLDFGGQYKELIAGTVRNLSVYSQIMPGNTPIDEIKRLNPIGIILTGGPKSVYLRDSPKCDPEVFSLGIPVLGICYGMHLMCYTLGGKVEPGDMGEYGRVRVTPTKSQSKLFKNKKDSFTALMSHGDVVTGLPEGFRVTARSPVCTAACENKAKKLYAVQFHPETKHTRGGREIIKQFLYDICGASGDYKLGNYINTQIRQIREKVGDNHVLLALSGGVDSSVCAGLLSRAIPGQLTCIFVDHGFMRLNEGDEIERAFSRRNLRFIRVNAKERFLAKLRGVIDPEKKRKLIGEEFIRVFEEESAKLGDIPFLAQGTIYPDVVESGGKYGAVIKSHHNVGGLPEKLKFTAIVEPLSLFFKDEVRVLGRKLDLPASLVNRQPFPGPGLAIRVMGEVTEEKLDVLRAADAILREELDGMKRXPDQYFCVLTNTRTVGVKGDDRTYDYVIAVRAVKTDDFMTCEYAPLPHKLLSRISSRITAEIPSASRVVYDITSKPPATVEWE

SEQ ID NO: 54405 - DNA, 651 bp, Unknown
  Obtained from environmental sample
  misc_feature (1)..(651): n is a, c, g, or t
atgggaataaaggttagaattaaggtctgggttttatcgatgattaaagtaattgattacaaagcagggaacgccccaagcgtgatgcacgcaatcaccagtcttgggtataaggcggaattcgcacgtcagggaaatgagcttgcggacgcgactcacatcctgctgccgggagtaggcagcgcgggagcaactatggaatccctgcgcgaattgaacatcattgcggcgttggagaacgcggtcttcaacaaaaaaacctttttccttggcatctgcgtcggattgcagattctttttcagcacagcgaagaagacgacgcggactgtctcggatggctaaagggcaaggtaattaaatttgacgcttcaaaggtcagggttccgcagatgggctggaacaaggtaagctttacggaaagtccgatcaataacaaaaacgcanatgaaggctatttttattttgtgaactcttatcacgcanagcctgagaacaaggaagatttgtggggaacggccgattacaacggccagtttacggcggctgttcacagggacaatatttacgcaacccagtttcacgttgaaaaaagcggcaaggcggggcttgccattcttgacggctttcttggcctcggtaaagggggctga

SEQ ID NO: 54406 - protein, 216 aa, Unknown
  Obtained from environmental sample
  DOMAIN (16)...(212): Glutamine amidotransferase class-I
  misc_feature (1)..(216): Xaa is any amino acid
MGIKVRIKVWVLSMIKVIDYKAGNAPSVMHAITSLGYKAEFARQGNELADATHILLPGVGSAGATMESLRELNIIAALENAVFNKKTFFLGICVGLQILFQHSEEDDADCLGWLKGKVIKFDASKVRVPQMGWNKVSFTESPINNKNAXEGYFYFVNSYHAXPENKEDLWGTADYNGQFTAAVHRDNIYATQFHVEKSGKAGLAILDGFLGLGKGG

SEQ ID NO: 54407 - DNA, 381 bp, Unknown
  Obtained from environmental sample
  misc_feature (1)..(381): n is a, c, g, or t
atgctgttcaagcatatttcccccgcgcctagttcctgcccgcgctttacccactcgatggcgtccatgcccgttgccagccttgccccgtcaatgtatacctcgaatccgcttggagtaagccctgtgcgctttacctgggtagaaagcacaatacattgggcgccaaaggctttggaaccctcggtaataatttgcgggtttcttacagccatcgaatcgacactaatcttttccgcgcctgcttttagtgcatcatacatatcttgcaggttttttatgccaccgccgactgtgaaggggataaacaaacggcgcgccacttttttaacggtttcaatatcaatcccgcgcttttccgcgctcgcagtaatatcataa

SEQ ID NO: 54408 - protein, 126 aa, Unknown
  Obtained from environmental sample
  misc_feature (1)..(126): Xaa is any amino acid
MLFKHISPAPSSCPRFTHSMASMPVASLAPSMYTSNPLGVSPVRFTWVESTIHWAPKALEPSVIICGFLTAIESTLIFSAPAFSASYISCRFFMPPPTVKGINKRRATFLTVSISIPRFSALAVIS

SEQ ID NO: 54409 - DNA, 1008 bp, Unknown
  Obtained from environmental sample
  misc_feature (1)..(1008): n is a, c, g, or t
ttgttaaatcccaatattgttccttacgacgttgtagttctcggtgtttacaccaaggacagatacggacttgacgagcaggtaaggaatgatgacggaagccttcgctatatcgccgtaaaaaaagaaatcggtttagacggaaactacatagaggaagcttccgttgatcgcaacaatatggacggcaagccggaagttgtttttaaattaagcagtgagggcggagatattttttacaagctgacatcggctaacgtgaataaaagacttgccattgttttggataataaagttaaatcctatccgaatatttccacaggtatccgcgaaagaggaaccattacgggattcggttcggaagaagcggaaaacctcgctcttgttttaagaactgcggcattccccgtggagcttgaagtcgcaagccagcagagtatcggcgcttcaatgggagaggatacaatcaatcaggggctttacgcgctgttaggcggtattgcggcggtttttcttttcatgcttgtttattacagagtcgcaggtattaacgctattatcgcccagctattaaacttctatataatgttcagcgtgctttccgctcttaactttacgctcactcttcccgcaatcgccggttttattttaacaatcggtatggcggtagacgcgaatgtaattatctttgagcgcatgaaagaagaaatgcttcttggcaaatcaagaaaagcggtaatagaagccggattcggaaaagcgttctgggcgattatggactccaacataactacgtttatagccgctctgttcctttcgcagttaggttccggtccaatcagaggattcgccgtaagcctttcaatcggcgtattctcgtcggtattcacagcgctgtttgtgtcgcggttaatcttcgactttgatactgacgttatgcgaagtaaaggtcttgcgataagctggagaactcgtattcaggaaaatgcaaaggcggtaagtttatga

SEQ ID NO: 54410 - protein, 335 aa, Unknown
  Obtained from environmental sample
  DOMAIN (129)...(307): Protein export membrane protein
  misc_feature (1)..(335): Xaa is any amino acid
MLNPNIVPYDVVVLGVYTKDRYGLDEQVRNDDGSLRYIAVKKEIGLDGNYIEEASVDRNNMDGKPEVVFKLSSEGGDIFYKLTSANVNKRLAIVLDNKVKSYPNISTGIRERGTITGFGSEEAENLALVLRTAAFPVELEVASQQSIGASMGEDTINQGLYALLGGIAAVFLFMLVYYRVAGINAIIAQLLNFYIMFSVLSALNFTLTLPAIAGFILTIGMAVDANVIIFERMKEEMLLGKSRKAVIEAGFGKAFWAIMDSNITTFIAALFLSQLGSGPIRGFAVSLSIGVFSSVFTALFVSRLIFDFDTDVMRSKGLAISWRTRIQENAKAVSL

SEQ ID NO: 54411 - DNA, 537 bp, Unknown
  Obtained from environmental sample
  misc_feature (1)..(537): n is a, c, g, or t
atgacaataatccgcgcccgcgtgcttggtttctgcatgggagtcaggcgggcggcggaacttgcagcggcgcaggcgaagaaagcggcggaggaaaactccgttctttacacgtttggtcgtcttattcacaatcctcaagtattagccgatctcgaaaaacagggagttattgccctagagcaaaacgctcttgagcggatacgggaaaaaggtaaaaactgcggcgtaattatccgcgcgcacggaataagcccagacacggaagaaaaattgcgcggtacaggctgtgaagtaacagacgcaacttgtcccaacgttaaaaaaaaccagttaaagacgcaggagctttcacgcgcggggtacagtttatttctggcaggggaatccgcgcacgcggaaatagaaggaatcacaggttacgcaagttccgctcctttttgcaagacggtagtaaatacacagcaggcgagggaagccgccgccgctttgcatgaaacaaacaataacgctaagaccgcgcctcggccgatctga

SEQ ID NO: 54412 - protein, 178 aa, Unknown
  Obtained from environmental sample
  SIGNAL (1)...(22)
  DOMAIN (3)...(178): LytB protein
  misc_feature (1)..(178): Xaa is any amino acid
MTIIRARVLGFCMGVRRAAELAAAQAKKAAEENSVLYTFGRLIHNPQVLADLEKQGVIALEQNALERIREKGKNCGVIIRAHGISPDTEEKLRGTGCEVTDATCPNVKKNQLKTQELSRAGYSLFLAGESAHAEIEGITGYASSAPFCKTVVNTQQAREAAAALHETNNNAKTAPRPI

SEQ ID NO: 54413 - DNA, 480 bp, Unknown
  Obtained from environmental sample
  misc_feature (1)..(480): n is a, c, g, or t
ttgctcttaattttaatttaccttgttatccgctttaaaatacaatacgctatcggcggtgtaatcgccattttgcacgacttgctggtaataatagcgtatcttgtttgggcgagaatggaatttaacaccacgtctatcgcggcgattcttaccattcttggttactctatcaacaatacgataattttgtttgaccgtgtaagggaaaatatccgcgtgtatcccgataacacattcaccgatattatgaatatttcattaacaggtattttgggacgttctattataacgacattgacgacaatgcttgcggtattgatgcttttcatctttacaacaggagcaatgaaagatttcgcccttgtgttgttaataggaatgacatcgggcacatacacatcgctctttatcgcctccggttttgtaaacttctgggaaacccgaaaaaaagccgaagcaaagaaaaaagcggcataa

SEQ ID NO: 54414 - protein, 159 aa, Unknown
  Obtained from environmental sample
  DOMAIN (1)...(149): Protein export membrane protein
  misc_feature (1)..(159): Xaa is any amino acid
MLLILIYLVIRFKIQYAIGGVIAILHDLLVIIAYLVWARMEFNTTSIAAILTILGYSINNTIILFDRVRENIRVYPDNTFTDIMNISLTGILGRSIITTLTTMLAVLMLFIFTTGAMKDFALVLLIGMTSGTYTSLFIASGFVNFWETRKKAEAKKKAA

SEQ ID NO: 54415 - DNA, 1266 bp, Unknown
  Obtained from environmental sample
  misc_feature (1)..(1266): n is a, c, g, or t
ttgtcttgttaccttaaaccgctgggcgaccaacaaggattttaccgaaggggatgtttccattattctgctaaccgagaatcttgcggatatttcaccacggctgctgcttcctcttccaccgtaacgattgaggtgccttttcccgacgaagcagtgcgggcaagttttctccgttcaagggaacgcgagggtcttttggcgctggatcgggggctttctaccgatgtagtggcctcggttacaagcggcttaaatttaatgaaactggatcggctggttctggagcgttacgaagaagacaaagctctgaccatggagtacctcagtcagaagaaaaaggaaatgattgagcaggaagcaggcgggcttttggagtttatggaaacccagtatagcctggacgctgtttccggtcatgattttgtcaaaaagcagctaagaaaccacgcaaaggcaattaagcgcgggcagtctgaagttgttccgatgggctaccttatcgcgggccccattggtaccggaaaaagttttatggtgagcgcctttgccggtgaaatcggaatcccaatggttaaattccgcaacttccgttccaagtggcagggcgagtccgaatcaaatttggaaaaggtgcttaacatcctcaagtccatggccccggtggcggtaatgatcgatgaagcggatgcgtatcttggagaccgtgatcaggaaggggactcgggtaccagtaaccgcgtgtttgcccaaatagcgagcttcatgggggacacctcttaccggggtagaataatctggttccttataacctgccgtcccgatcttcttccgatagacctcaaacgccagggccgggcggaagaacactttgccctcttttacccggaaaccctgccggaaaaagtagcgctttttgaaaccctggtggaaaagctcaagttcggggttcacactttttcggttcccgatctnttcaggaaatacgatcacgaagtntccggggcggaaatagagtctatgcttgtaagggctatgcaaatggctgtgatggaaggccggacgatgatctcaaaaaaggatatggaagaagtaattgaagattttcgcccgccatattaccccaacgcgatccggcttcagaacctggttgcggcggttgaatgtacttccagaaaaatggtgccaaagcgcttccagcttgacaattcccaaatggttcgggagatacaggagctgaaaactctgctgggcgagaggaagtaa

SEQ ID NO: 54416 - protein, 421 aa, Unknown
  Obtained from environmental sample
  DOMAIN (165)...(351): ATPase family associated with various cellular activities (AAA)
  misc_feature (1)..(421): Xaa is any amino acid
MSCYLKPLGDQQGFYRRGCFHYSANRESCGYFTTAAASSSTVTIEVPFPDEAVRASFLRSREREGLLALDRGLSTDVVASVTSGLNLMKLDRLVLERYEEDKALTMEYLSQKKKEMIEQEAGGLLEFMETQYSLDAVSGHDFVKKQLRNHAKAIKRGQSEVVPMGYLIAGPIGTGKSFMVSAFAGEIGIPMVKFRNFRSKWQGESESNLEKVLNILKSMAPVAVMIDEADAYLGDRDQEGDSGTSNRVFAQIASFMGDTSYRGRIIWFLITCRPDLLPIDLKRQGRAEEHFALFYPETLPEKVALFETLVEKLKFGVHTFSVPDLFRKYDHEVSGAEIESMLVRAMQMAVMEGRTMISKKDMEEVIEDFRPPYYPNAIRLQNLVAAVECTSRKMVPKRFQLDNSQMVREIQELKTLLGERK

SEQ ID NO: 54417 - DNA, 654 bp, Unknown
  Obtained from environmental sample
  misc_feature (1)..(654): n is a, c, g, or t
ttgttgttgccggctaacggcgctgggggggaaatggcaaagtatatagcgaaaaattccgagcttatcaagaactggcccgcatgggttcaggaagttgcgttaaaatacggctccaaaaccgccaatctgtatattattcacgggaacatcagggattttcttccgaaagaaacagaggaaggagaattcatcttcgccgagatccaccagtacatcgcggaaattattttcggaaaccaggacattattgcctattacaacccttccgagggcgtttccttttgcacagagggaatggccagggaatacaaaacgtttttgttcaaatgttttcctgaggccgacgcgggcgattttgtttccagagaaccggagaagagtttttattatcttgaaaaatattttcttatgcggatcccaaaggatcgcaggaatccttctccccgcatggtactcatcattgattatgccgagtatatcattccgggaggggatttattgcgtatttctgacgcggatcgctattgtcttgttaccttaaaccgctgggcgaccaacaaggattttaccgaaggggatgtttccattattctgctaaccgagaatcttgcggatatttcaccacggctgctgcttcctcttccaccgtaa

SEQ ID NO: 54418 - protein, 217 aa, Unknown
  Obtained from environmental sample
  misc_feature (1)..(217): Xaa is any amino acid
MLLPANGAGGEMAKYIAKNSELIKNWPAWVQEVALKYGSKTANLYIIHGNIRDFLPKETEEGEFIFAEIHQYIAEIIFGNQDIIAYYNPSEGVSFCTEGMAREYKTFLFKCFPEADAGDFVSREPEKSFYYLEKYFLMRIPKDRRNPSPRMVLIIDYAEYIIPGGDLLRISDADRYCLVTLNRWATNKDFTEGDVSIILLTENLADISPRLLLPLPP

SEQ ID NO: 54419 - DNA, 1524 bp, Unknown
  Obtained from environmental sample
  misc_feature (1)..(1524): n is a, c, g, or t
atgatcagatcggccgagcggcttaatcaggccgatagacactgttcctttagcggaaccgtcagcggcggcacaaccaacgatgatgtcggcggcattgccggacggaacagcggcacgattataaacagcagaaacttcgcaacaataagcggtagaaataacatcggaggcgttaccggatttaataacggcaagctcgaaaacagttacaacacgggagccgtcagcggaaaccagaacatcggcggtatcgtgggaactaataccggaagcggtaattatgtaaagaactgctataatacgggcgatattaccgccaccagtacctccaccacagccaacgccggaggcattgtcgggcttaaccaaacaagcggactggtagaatcctgctacaataccggcaatgttaccagcgcaggtgcgactgtcggaggcatagtgggacaaaacgactccacttgcaccgtgcaaaactgcgtatcgctcggctcaagggtaaccggcattaacagtgtaatgcgtatcggaaataattctggtactttcaccaacaacaaagcccgtgcggatatgaaaaccggtacaaacggcgcagagacaataaagaccggaggaacgggcaatggcactaacggcgcagatgtcagtttgggttcgacacaatccggcgttttcaacggcgcaggtggaggcacagcaggctggcaaggttcggtttggaatatcaccggcactttgaccgtaggagttgatttgcccacgctcaaatcaaacacgcaaagccccgctcccacgcttccggcggcgtactctccacccggcacggcggaaaatcccttcctcgtcgccaccgaagccgatctccgcaaagtcggcacagaaacaaccgccggaggctggacgctttcggcgagctacaaacagacggcgaatatcacgctgacaagcgcatttacggggattgtctatacttcctccaaatttaacggctcatatgacggaggcggatataccatcaccggattgaacataaccgccacgagcagtaatttaggtttattcggctatattggaagcggcacggtgaaaaacgtgaacgcttccggcacggtaaccggaaccggatcggtagcgggtatcggaggcattgcgggcgcaaacgaaggtacgattgaaaactgctcctttagcggaactgtaaccggcagtacaacaagccttcaagtcggcggtattgtcggaaggaataccggcacggtgaaaaacagcagaagcagtgcaacggtaagcggcaacgatcaggtcggcggcattgccggaaggaatgagggcaagattgaagccagttacaacacgggagccgtcagcggaaaccagtacatcggcggtatcgtgggaactaataccggaagcggtaattatgtaaagaactcatataacactggcaatgttaccgccagcgcaacctcaaacacctatgccggaggcatgtcggggctaatcaatccaacgcactga

SEQ ID NO: 54420 - protein, 507 aa, Unknown
  Obtained from environmental sample
  DOMAIN (459)...(487): The GLUG motif
  misc_feature (1)..(507): Xaa is any amino acid
MIRSAERLNQADRHCSFSGTVSGGTTNDDVGGIAGRNSGTIINSRNFATISGRNNIGGVTGFNNGKLENSYNTGAVSGNQNIGGIVGTNTGSGNYVKNCYNTGDITATSTSTTANAGGIVGLNQTSGLVESCYNTGNVTSAGATVGGIVGQNDSTCTVQNCVSLGSRVTGINSVMRIGNNSGTFTNNKARADMKTGTNGAETIKTGGTGNGTNGADVSLGSTQSGVFNGAGGGTAGWQGSVWNITGTLTVGVDLPTLKSNTQSPAPTLPAAYSPPGTAENPFLVATEADLRKVGTETTAGGWTLSASYKQTANITLTSAFTGIVYTSSKFNGSYDGGGYTITGLNITATSSNLGLFGYIGSGTVKNVNASGTVTGTGSVAGIGGIAGANEGTIENCSFSGTVTGSTTSLQVGGIVGRNTGTVKNSRSSATVSGNDQVGGIAGRNEGKIEASYNTGAVSGNQYIGGIVGTNTGSGNYVKNSYNTGNVTASATSNTYAGGMSGLINPTH

SEQ ID NO: 54421 - DNA, 1674 bp, Unknown
  Obtained from environmental sample
  misc_feature (1)..(1674): n is a, c, g, or t
ttgaatcattcgggcggtgattcttgtaacattcggccaccgattccggaaacattcggccaggaaggttccgcatctttagaccaatccggtacattaaaaaaaagagtaccggaggacaaaatgaggtgcgaggaacctatgaaaatcattgagattctgcgtctttgggagcagggatattcccaaagggacattgcggtcagcgtcaaatgcgccaaatcaactgtaggcgtaatacaacagaaatgccgggaacgcggactgcggtatgaacaggcggcggggatgggccatgacgctcttcttgcgagactctaccctgacggatcgggtggcaggcatttcaaagacgaccccgactttgaaaagatacagaaactgctggacggacggaaacgggtaaatctgcagtatgcgtgggaagaataccggcgggacactcaggacgggctgagttacagccagttctgcagccgctaccgtaggtggcggaatgccagcgggaaagacgtggtcatggtacaggggagggagccgggaaaagaattgtttgtggactggatgggggacacccttgcctgcgtccgggacagcgagagcgggaaactggcgaaggcccattttttcgtggcgacgttaggcgattcggggtatccgtatgcggaagcgtttgccaatgaaaagatggcgagctggataaccgcccatgtgcatgccttctcgtatttaggaggagtgcccagggtagcgatacctgacaactgccggacggcggtgagccggagcaactattacgaccccgcgataaaccgggcttatgaggatatggcggtctattacaacattgcggtcatccccgcgcgggtccgccggccacgggataaaaatttggtggaaggcagcatcggctggcttgagacgtggcttgtggaatggctgcgcgatcaggggccgtttgacagctttagggaattgaaccatgcggtcaaggagcgcatggcggaactggtaaaacggccgtttcagaaaagggcgggaagccgcgagtcggtgttcagggaaatcgacaaaccggcgctgcgccccctgcctccggccccttatgagattgccgagtatcagagccgccgggttccggataactaccaccttgagtatgacactttttattactcggttcctcatgagtattacaaacaggaggttgccttgcggatcaccgcatccatgattgaggtatatgacgggcataacaagcgtatcgcgctgcaccagaggcggtataccggcccgagatatgccacccgcgccgaacatatgccgccccatcatcagtttaaggcgatggcggaccgttttgacgggaagaggtatcgcagttgggcccgttccataggggaacatacctactcggtcatcgacagcttgctggccaatgcggggatagaagaacaggcgtaccgttcctgcatggggatattgcagtttgccaaagaatacggcgctcatcggttggaaggggcgtgcaggcgggcacgggaactgtccagccccagttacacgacagtacaccgcatcctcaagaaccgtcaggaaaatgccgcccagccggatttgtttaagcctgtggccgagcatgaaaatctgcggggagccgcggcattcgcgtaa

SEQ ID NO: 54422 - protein, 557 aa, Unknown
  Obtained from environmental sample
  DOMAIN (176)...(354): Integrase core domain
  misc_feature (1)..(557): Xaa is any amino acid
MNHSGGDSCNIRPPIPETFGQEGSASLDQSGTLKKRVPEDKMRCEEPMKIIEILRLWEQGYSQRDIAVSVKCAKSTVGVIQQKCRERGLRYEQAAGMGHDALLARLYPDGSGGRHFKDDPDFEKIQKLLDGRKRVNLQYAWEEYRRDTQDGLSYSQFCSRYRRWRNASGKDVVMVQGREPGKELFVDWMGDTLACVRDSESGKLAKAHFFVATLGDSGYPYAEAFANEKMASWITAHVHAFSYLGGVPRVAIPDNCRTAVSRSNYYDPAINRAYEDMAVYYNIAVIPARVRRPRDKNLVEGSIGWLETWLVEWLRDQGPFDSFRELNHAVKERMAELVKRPFQKRAGSRESVFREIDKPALRPLPPAPYEIAEYQSRRVPDNYHLEYDTFYYSVPHEYYKQEVALRITASMIEVYDGHNKRIALHQRRYTGPRYATRAEHMPPHHQFKAMADRFDGKRYRSWARSIGEHTYSVIDSLLANAGIEEQAYRSCMGILQFAKEYGAHRLEGACRRARELSSPSYTTVHRILKNRQENAAQPDLFKPVAEHENLRGAAAFA

SEQ ID NO: 54423 - DNA, 912 bp, Unknown
  Obtained from environmental sample
  misc_feature (1)..(912): n is a, c, g, or t
atgctcggccacaggcttaaacaaatccggctgggcggcattttcctgacggttcttgaggatgcggtgtactgtcgtgtaactggggctggacagttcccgtgcccgcctgcacgccccttccaaccgatgagcgccgtattctttggcaaactgcaatatccccatgcaggaacggtacgcctgttcttctatccccgcattggccagcaagctgtcgatgaccgagtaggtatgttcccctatggaacgggcccaactgcgatacctcttcccgtcaaaacggtccgccatcgccttaaactgatgatggggcggcatatgttcggcgcgggtggcatatctcgggccggtataccgcctctggtgcagcgcgatacgcttgttatgcccgtcatatacctcaatcatggatgcggtgatccgcaaggcaacctcctgtttgtaatactcatgaggaaccgagtaataaaaagtgtcatactcaaggtggtagttatccggaacccggcggctctgatactcggcaatctcataaggggccggaggcagggggcgcagcgccggtttgtcgatttccctgaacaccgactcgcggcttcccgcccttttctgaaacggccgttttaccagttccgccatgcgctccttgaccgcatggttcaattccctaaagctgtcaaacggcccctgatcgcgcagccattccacaagccacgtctcaagccagccgatgctgccttccaccaaatttttatcccgtggccggcggacccgcgcggggatgaccgcaatgttgtaatagaccgccatatcctcataagcccggtttatcgcggggtcgtaatagttgctccggctcaccgccgtccggcagttgtcaggtatcgctaccctgggcactcctcctaa

SEQ ID NO: 54424 - protein, 303 aa, Unknown
  Obtained from environmental sample
  misc_feature (1)..(303): Xaa is any amino acid
MLGHRLKQIRLGGIFLTVLEDAVYCRVTGAGQFPCPPARPFQPMSAVFFGKLQYPHAGTVRLFFYPRIGQQAVDDRVGMFPYGTGPTAIPLPVKTVRHRLKLMMGRHMFGAGGISRAGIPPLVQRDTLVMPVIYLNHGCGDPQGNLLFVILMRNRVIKSVILKVVVIRNPAALILGNLIRGRRQGAQRRFVDFPEHRLAASRPFLKRPFYQFRHALLDRMVQFPKAVKRPLIAQPFHKPRLKPADAAFHQIFIPWPADPRGDDRNVVIDRHILISPVYRGVVIVAPAHRRPAVVRYRYPGHSS

SEQ ID NO: 54425 - DNA, 408 bp, Unknown
  Obtained from environmental sample
  misc_feature (1)..(408): n is a, c, g, or t
gtgtccatcacagtctggaggcgcggggcaaagggtctggagatactgatgctgccccgtcacccagaggccgaccaatggcagtccggcgtgacggacatggtggagcctggcgagacgtttgatgccgccgccagggagaccgtggaagagactggcctgcacggaaggctggtcaatctagacttttcgcacacgcgctgccttggcccagtgcctgctttgggccatgagccgtttttcaacacggaggcctgcttccacctagaagtcctgcccgacgcggccgtgaggctggacaaggcggagcgcgtccgctggtgcccgccggacgaagccatgtcgctgatggcccatgagggaggcagggaggtcgtcaggctgctgatacgaagttgcattctttga

SEQ ID NO: 54426 - protein, 135 aa, Unknown
  Obtained from environmental sample
  misc_feature (1)..(135): Xaa is any amino acid
MSITVWRRGAKGLEILMLPRHPEADQWQSGVTDMVEPGETFDAAARETVEETGLHGRLVNLDFSHTRCLGPVPALGHEPFFNTEACFHLEVLPDAAVRLDKAERVRWCPPDEAMSLMAHEGGREVVRLLIRSCIL

SEQ ID NO: 54427 - DNA, 855 bp, Unknown
  Obtained from environmental sample
  misc_feature (1)..(855): n is a, c, g, or t
atgggagccattatgggtttttttgaagactttgcctttcaaagaattcagcttttcgggcgcggagaagtggcttttttacggcggctggaaaatgagggcaaaaccgacacaattacggaaatgtttagttttccgattccctgttgtattttcacacacagcctgatgccgcacaaagaattttttgaaattgccgaaaaagcccaatgccccattttacagaccgatttaggctccgccgatttttccaccagaataatgcgtatcctttccagcattttctcgccgcggcagattgttcacggcgtacttgtcgaagtttacggcttggggattttgatacagggcgattcgggagtgggaaaaagcgaaaccgcgctggaactgatacaccgcggacaccgtcttgtcgccgacgacgtagtggaaataaattgtatttacggaaatacattgatgggcgcgggcgcgaataaaattatcgggcatcacatggaaattcgcggtccgggaataatcaatattacgcacctgttcggcgtaagggcgatcagggatcgaaaagaaattcagcttgttgtagcgttggaagaatgggattctcaaaaaaattacgacagactcggcgcggaggatcatacggttgatatattgggcgttaacgtgccgaaacttacgattcccgtaaaaccgggacgtaacattccgattatcatagaaacagccgctatgaatgagcggttaaaatccatggggtatcatgccgccaaggaattcaacaaaaatattcttaagtggatcgagagcgacgctacgcgttcggtcttctttggttacgacgacgtaatttag

SEQ ID NO: 54428 - protein, 284 aa, Unknown
  Obtained from environmental sample
  DOMAIN (1)...(92): HPr Serine kinase N terminus
  misc_feature (1)..(284): Xaa is any amino acid
MGAIMGFFEDFAFQRIQLFGRGEVAFLRRLENEGKTDTITEMFSFPIPCCIFTHSLMPHKEFFEIAEKAQCPILQTDLGSADFSTRIMRILSSIFSPRQIVHGVLVEVYGLGILIQGDSGVGKSETALELIHRGHRLVADDVVEINCIYGNTLMGAGANKIIGHHMEIRGPGIINITHLFGVRAIRDRKEIQLVVALEEWDSQKNYDRLGAEDHTVDILGVNVPKLTIPVKPGRNIPIIIETAAMNERLKSMGYHAAKEFNKNILKWIESDATRSVFFGYDDVI

SEQ ID NO: 54429 - DNA, 888 bp, Unknown
  Obtained from environmental sample
  misc_feature (1)..(888): n is a, c, g, or t
atggcgcncgcgcactgctacaaagccgtccgcgaacaggtcggggagacacagttcgacatcaccgggctcggcgtgacgggatcgggccggcaaatagcggcgctccacgccctcaccgacaacgtcataaacgagatcatagcccacgccactgcggcggcttattttgacaaggaagtcgacaccatcttcgagatcggcggacaggacgctaagtatacctatctgacgggcggggtgccgtcggactacgctatgaacgaggcctgcagcgccggcacggggtcgttccttgaagaatccgcccgcgaatcgctaaacgtcctaaccgaggagatcggcgagcgggcgctcttgggcaaacagccgccaaacttcaccgaccaatgctcggcgttcatatcaagcgacataaagaccgcgggtcaagagggcatcggcaaggacgatatcctggccggcctcgtctactccgtctgcatgaactacctcaaccgcgttaaaggctcacggcaagtaggcaagaagatattcatgcagggcggcgtatgctacaacaaagcggtgcccgtcgccatggcgtcgcttatgaagcaccaaatagtagtcccgcccgaacccggccttatgggagcgttcggcgtcgccatggagacggcgaacagaatggaaatagggctgagctccgccgccaagttcgatctcgacgaactctccaaccgcgaagccacccgcgagagcagcttcgtctgcgccggcggcaaagaaaaagtgcgaccgcaaatgcgaaatctcgcgcatacgggtgaacgacaaactctatccctttcggcggcgtctgcaacaaatactacaacctgcgtttgcgcaaagaggtggacgtag

SEQ ID NO: 54430 - protein, 295 aa, Unknown
  Obtained from environmental sample
  DOMAIN (5)...(220): BadF/BadG/BcrA/BcrD ATPase family
  misc_feature (1)..(295): Xaa is any amino acid
MAXAHCYKAVREQVGETQFDITGLGVTGSGRQIAALHALTDNVINEIIAHATAAAYFDKEVDTIFEIGGQDAKYTYLTGGVPSDYAMNEACSAGTGSFLEESARESLNVLTEEIGERALLGKQPPNFTDQCSAFISSDIKTAGQEGIGKDDILAGLVYSVCMNYLNRVKGSRQVGKKIFMQGGVCYNKAVPVAMASLMKHQIVVPPEPGLMGAFGVAMETANRMEIGLSSAAKFDLDELSNREATRESSFVCAGGKEKVRPQMRNLAHTGERQTLSLSAASATNTTTCVCAKRWT

SEQ ID NO: 54431 - DNA, 894 bp, Unknown
  Obtained from environmental sample
  misc_feature (1)..(894): n is a, c, g, or t
gtgcgccctgcgccgcgcctatccgggcggcgataccccgcatcttgtgataagctcaggcggcgagacgcagctcgtgtacgtcatcaactccaaaggcggggtaagttccgtccactccggcaacaagtgcgcttcggggacgggcgagttctttttgcagcagatacgccggatgggcctcacgctggaagaggcggtcgagctcgccaagcgcggcacgccccacaagatcgccgggcggtgcagcgtcttctgcaaaagcgactgcacccacgccctcaacaagggcgagccgagggccaatatcgcggcggggctttgcctgatgatggcggacaaaatatgcgacctcgtgaaggacatgaggggcggcaagtcggcgctcatcggcggcgggtcgctcaatacggcgatggtcaaaatcctcaaagaacggctcgtcgggctcgacgtccccgacaccgcctcggtgttcgaggcttacggggccgcgctctgggccgtcgacaacgaatgcgtcgcgcttcccgaagatctgtccgaggcgattcacgacgcgccgacctccttcggccgccacgcccccctcgccgaagctctgccgctcgtgtcgttcaaagagatgaagaaggacgccgtgaagccgggcgacgggtgcgtgctggggctcgacgtcggatcgaccaccaccaaggcggtgctgatgaggcggcgcgacaaggccgtcgtagcctccgtctacctgaggaccaacggcgatcccgtcggcgcgtcgcgcaactgctacaaggccgtccgcgaacaggtcgggaatacgaagttcgacattacggggctcggggtgacggggtcgggccgccagatcgcggcgctccacgcgctcaccgataa

SEQ ID NO: 54432 - protein, 297 aa, Unknown
  Obtained from environmental sample
  misc_feature (1)..(297): Xaa is any amino acid
MRPAPRLSGRRYPASCDKLRRRDAARVRHQLQRRGKFRPLRQQVRFGDGRVLFAADTPDGPHAGRGGRARQARHAPQDRRAVQRLLQKRLHPRPQQGRAEGQYRGGALPDDGGQNMRPREGHEGRQVGAHRRRVAQYGDGQNPQRTARRARRPRHRLGVRGLRGRALGRRQRMRRASRRSVRGDSRRADLLRPPRPPRRSSAARVVQRDEEGRREAGRRVRAGARRRIDHHQGGADEAARQGRRSLRLPEDQRRSRRRVAQLLQGRPRTGREYEVRHYGARGDGVGPPDRGAPRAHR

SEQ ID NO: 54433 - DNA, 2001 bp, Unknown
  Obtained from environmental sample
  misc_feature (1)..(2001): n is a, c, g, or t
ttgataaaccgctggctgccgttagttgtaagctttaagtccggcgaggggaaagcgctggagcttttctgcgagatgaccaagcgcttgggcatcgacgaggctgaaacaaaggcggctttcaatatcgcaatgtccaaacagcaagcttattctgacgcgatacacgcgatgggcaaagaggcgctggaagaggcgcggaagtccgacaggcccgtcatcgccacgctgggccggccctacaacgcctttacgccggaagcgaatatgggcataccccgcaagttcaccacgcgcggctactcgatcatccccttcgatatacttcctttccatgacgaggtcatcttcccgaatatgtactggtattacgggcagcaggatctgaaagccgcgaacctccttaaaaaagaagataatatttatcttgcttttattaccaatttttcctgcgcccccgattcctttattctgcactacgtcaaatgggtgatggggcagaagcccttcctcgttctggagcttgattcccattcagccgacgcgggcgtggacacgagggttgaggcgttcctcgacattattgacggttaccgcgccaagaaaaacgagcttgaggccgatcgttatgacaacggctggcgctttattaccgagaagaaaaccgacgggaattttgatctgcgtatagataatataaacacaggtgagaaggttcctattgtagggaacaaacgggtgaagctgcttctttccaacatgggagccatatccaccgagtacgtgggcgcggccgtccgcagccagggcataaacggggaagctctgcctgtggccaccgccaaaacgatacagattgcccgcgcccatgcgtcgggaaaggagtgcgtccccagccatctggttttgggcagcgccctagaattcttcttcagcgaaaaataccgcaaggacgaactgtacctgctctttgtccccataaccaccggcccatgccgcacgggccagtactacgtgttttacgaaaatttattccgcgatttaaggcttgagaacgtcgttgttttcatactttcagcggacaattcctacaccgagcttggaggcggcttcgccaaagaaatgtggaggggacttgtgctttccgattacctcaaggacatacagtgcgccctcaaggcctgcgccgttgatccgaaaaaagcgcagtcggaatttgaacattcgtggcgcagggtaatgcacgcggtggagcataatcccaaatacctgtggaaggaactgaaaaatgtcgctaatgacgttagaaagattccactgaagcgaaaggtcgttgactgcccccgcgtgcttgtcgtgggcgaaatctacgtccgccgcgacgattttgccgtgggcgaactgaccgacctgatgagcgagcggggcattgtggtaaaggttgcgggcatttccgagtggatacactaccttgattttgtgcgggaatacgccctcaaaaaattgatcaggctgagaaaaccgggcaacaggcttttttccaaaccctggaaagatctaaaaaaacttgagatagaggaatggtggaagcactctgttgaaaaaaaagtgctttccatcctaaagcccacgggccttatccctgaaacgccccatgacatgcgcgagatcatgaagtacacccaggagcattttgtcaaccttgagcttaattcggagatagccgtctcctcgggctcggccgccgcggcaatggacactggctactccggcatcgtgaacatcagccccttcgcctgccttataggcagggtcatcgagggcctgtttacgccctgggcgcgtgagcgtaactacccgatcctttccgtggaggtggacggaaacctcttgcctccgaatattgtcaataaacttaacatttttatggttaatgttttaagatttaaggggggcagtgattggtcgtcgctggtggataaagcagggattggggactag

SEQ ID NO: 54434 - protein, 666 aa, Unknown
  Obtained from environmental sample
  misc_feature (1)..(666): Xaa is any amino acid
MINRWLPLVVSFKSGEGKALELFCEMTKRLGIDEAETKAAFNIAMSKQQAYSDAIHAMGKEALEEARKSDRPVIATLGRPYNAFTPEANMGIPRKFTTRGYSIIPFDILPFHDEVIFPNMYWYYGQQDLKAANLLKKEDNIYLAFITNFSCAPDSFILHYVKWVMGQKPFLVLELDSHSADAGVDTRVEAFLDIIDGYRAKKNELEADRYDNGWRFITEKKTDGNFDLRIDNINTGEKVPIVGNKRVKLLLSNMGAISTEYVGAAVRSQGINGEALPVATAKTIQIARAHASGKECVPSHLVLGSALEFFFSEKYRKDELYLLFVPITTGPCRTGQYYVFYENLFRDLRLENVVVFILSADNSYTELGGGFAKEMWRGLVLSDYLKDIQCALKACAVDPKKAQSEFEHSWRRVMHAVEHNPKYLWKELKNVANDVRKIPLKRKVVDCPRVLVVGEIYVRRDDFAVGELTDLMSERGIVVKVAGISEWIHYLDFVREYALKKLIRLRKPGNRLFSKPWKDLKKLEIEEWWKHSVEKKVLSILKPTGLIPETPHDMREIMKYTQEHFVNLELNSEIAVSSGSAAAAMDTGYSGIVNISPFACLIGRVIEGLFTPWARERNYPILSVEVDGNLLPPNIVNKLNIFMVNVLRFKGGSDWSSLVDKAGIGD

SEQ ID NO: 54435 - DNA, 642 bp, Unknown
  Obtained from environmental sample
  misc_feature (1)..(642): n is a, c, g, or t
atggagagagaaaaacccaaaattcccgctcatgtgggaataatcatggatggaaacggccgctgggccgcaaagcggggtaaaatccgtacccagggccacttggaagggctcaacgcggcaaaacgtattgtcaaggccgcttccggtctaggggtttcctatcttaccctttacactttttccacggaaaattggaagagatctactgaagaaacaggatttatcatggccctggtaaagcaatatctccggggtgaattgaacttttaccgggagaattcgatcaggatccgtcacgcgggcagccgggaagggcttccccaggatattttaagggaactggattgggcctgtgaagaaaccaggggtttttccgggcttcaggtgattcttgcccttaactacggcggccgggacgagatagtccgggcaataaaacggatggtccggaatgaggctttggggcctgattctgtttcgggtcttacagaggatagcgtcagcaagtatatggacaaccccgatgtaccggatccggatctcatcatcagaaccgcgggcgaatttaggatcagcaacttcctgctttgggaaggagcctattcggaatactatatttccgataaactctggccctga

SEQ ID NO: 54436 - protein, 213 aa, Unknown
  Obtained from environmental sample
  DOMAIN (15)...(213): Putative undecaprenyl diphosphate synthase
  misc_feature (1)..(213): Xaa is any amino acid
MEREKPKIPAHVGIIMDGNGRWAAKRGKIRTQGHLEGLNAAKRIVKAASGLGVSYLTLYTFSTENWKRSTEETGFIMALVKQYLRGELNFYRENSIRIRHAGSREGLPQDILRELDWACEETRGFSGLQVILALNYGGRDEIVRAIKRMVRNEALGPDSVSGLTEDSVSKYMDNPDVPDPDLIIRTAGEFRISNFLLWEGAYSEYYISDKLWP

SEQ ID NO: 54437 - DNA, 1272 bp, Unknown
  Obtained from environmental sample
  misc_feature (1)..(1272): n is a, c, g, or t
atgcgaaaaacaacaatcataattttattgctggcagcggtgtttttatcgctgttttcatgtaacggttcatttctcgatccatatgtaaacaacatgcgcgacggcggatttggccctaatgtagaatataccatcaagatcaatatatcagataatgaatcaggcgacacaataacagtgacccctgaaaagggtcttgatggtgttaaggttacgcttgcctatacggtggcaaatacaaagcattacaaccaactggacttaggcggcgttaccgcgaagttcgattctgtagaaaaagcgggatcaggcacaagaacctacgccataaacgccagggactcttcaaacggagttatcaccattaccgcggtatttacccataccgatctggaaattgaccacatcgcctttgaagataccgccgggcatataacaaagacttatggagatgaatcgtttaccaacgctattacaacagcgcacaagggaagcggagcgataacttttcacagcagtgatgaaaatgtcgccacagtggacgattcagggcaggtaaccattctgaaagcaggttccgccgttatttccgccgagaaagcggctgacgatgtatacgcccacgctaaaacgacttacacgctgacggttaaccccaagccggtaaccataacaggactgtccgcggcgaataaatattatgacggcacaacaaaggcaacagttaccggaaccgcagtaatcaacggattagtcgatggcgatacggtaaccgtcatcgccggaacagcatcgttcgcgaatgcggctgttggcagcaacaagaccgtctcattcagcggctggtctttgggtggagaggactcggataattatatcctttcggcgcagcctgagaacgttacggcggctataatcaatagctattactatgacaataacaacaataataacaatactaacaaaacgctgagcggtagcatcaccattcgccccaacagcggcgttagtgtcggaacagaattgactgccacttacagcgggagcgaaaatgttagttaccagtggagaaaaaatggcgtcgttgtcggctcaaactccagcaagtacacgccggccgaagcgggaagctacaccgtaacagtaagcgcggcgggctacaacagcaaaaccagcgcggcggttattgtaggcaatccggtttccatagaatatacaatcacgatcaaaatgatcgacaatgacactggcgatctcggccgaatctga

SEQ ID NO: 54438 - protein, 423 aa, Unknown
  Obtained from environmental sample
  SIGNAL (1)...(26)
  misc_feature (1)..(423): Xaa is any amino acid
MRKTTIIILLLAAVFLSLFSCNGSFLDPYVNNMRDGGFGPNVEYTIKINISDNESGDTITVTPEKGLDGVKVTLAYTVANTKHYNQLDLGGVTAKFDSVEKAGSGTRTYAINARDSSNGVITITAVFTHTDLEIDHIAFEDTAGHITKTYGDESFTNAITTAHKGSGAITFHSSDENVATVDDSGQVTILKAGSAVISAEKAADDVYAHAKTTYTLTVNPKPVTITGLSAANKYYDGTTKATVTGTAVINGLVDGDTVTVIAGTASFANAAVGSNKTVSFSGWSLGGEDSDNYILSAQPENVTAAIINSYYYDNNNNNNNTNKTLSGSITIRPNSGVSVGTELTATYSGSENVSYQWRKNGVVVGSNSSKYTPAEAGSYTVTVSAAGYNSKTSAAVIVGNPVSIEYTITIKMIDNDTGDLGRI

SEQ ID NO: 54439 - DNA, 1083 bp, Unknown
  Obtained from environmental sample
  misc_feature (1)..(1083): n is a, c, g, or t
atgggttacgggcttgcaagcagaatggccgcggcttttggttatggcgcgattaccataggagtgtcacgggaaaagcccgcgtcgaaaacccacaccgccacaccgggtacctacaataatctagcttttgatcaggaggccgcaaaagcgggccttatagccagaacattgaaagggaacgccttcctcggcgagatgaaagccgaaacagcaaaggctgtccgcgaggccgccgcggccgcgaatatcccggcaaaaattgatcttatcgtttattcgcttgcctcccctgtgaggacctgcccaaggacggggattcaatataagtcggcaatcaaacccgtgggagaaactttctcgggcaaaaccctgaacgtgatgaacgggactttcaatactgttcaggcggaacccgccacggaagaagaaatctacaacaccgtaaaagtcatgggcggcgaggattgggaatattggatcgaagcgctggataaagaaggcctgctttactccaagtcccgcaccgtagcctattcctacctcggccccgaacactcctggcccatttacaaaaacggaaccatcggcaaagccaaagaagatctggaaagggcctgcgatgaaatcaacgagacatacgcctcaaagggtaaaatcgccggcgcatgggtctcggtaaacaaggcgctggtaacccgctccagcgcggtcatccccatcatcccgctgtacatttcctgccttttcaaagtgatgaaaaacatgnggcttcacgagggctgcattgagcagattgtacggctctaccgtgacaggctttacgccgcggaaagtggagacccggaaatggttccggttgatcgcaaaggccggattcgcatcgacgactgggagatgcgggaagatgtccaaaaggcggttatgaaaaaaatgaaatccgtaacgccggaaaatgtaaataccgaaaccgatgtcgccgggtttaaacatgattttcttgaagtccacggcttcgatgtggcgggtattgattacaatgccgatgtagacccaagcggacatggtatactaacttcataa

SEQ ID NO: 54440 - protein, 360 aa, Unknown
  Obtained from environmental sample
  DOMAIN (1)...(350): Short-chain alcohol dehydrogenase
  misc_feature (1)..(360): Xaa is any amino acid
MGYGLASRMAAAFGYGAITIGVSREKPASKTHTATPGTYNNLAFDQEAAKAGLIARTLKGNAFLGEMKAETAKAVREAAAAANIPAKIDLIVYSLASPVRTCPRTGIQYKSAIKPVGETFSGKTLNVMNGTFNTVQAEPATEEEIYNTVKVMGGEDWEYWIEALDKEGLLYSKSRTVAYSYLGPEHSWPIYKNGTIGKAKEDLERACDEINETYASKGKIAGAWVSVNKALVTRSSAVIPIIPLYISCLFKVMKNMXLHEGCIEQIVRLYRDRLYAAESGDPEMVPVDRKGRIRIDDWEMREDVQKAVMKKMKSVTPENVNTETDVAGFKHDFLEVHGFDVAGIDYNADVDPSGHGILTS

SEQ ID NO: 54441 - DNA, 825 bp, Unknown
  Obtained from environmental sample
  misc_feature (1)..(825): n is a, c, g, or t
gtgaatgttattgttctggtaaaacaggtgcctgacacccagaatatcagcggggaggccatgacgccggagggcacggtaaaccgggcggcccttcctgctatttttaaccccgacgacctctacgccctggaagcggctttacaaataaaagacgccaaccctgataccaaggtgagcgtgataaccatgggcccaccgtcagcttcggcggtgctaaaggaatgcctttacaggggagcggattttaccgcgctggtttccgaccggggctttgccggagcggatacccttgcaacttcctatgcgctcaaatgcgcgataaacaaagccggggcttttgacctcgtgctatgcgggcggcaggcgatagacggggacaccgcacaagtaggcccccagaccgcggaaaaacttggcgtcaaccagatcacctgcgtttccaaaatcgaagccctggacgccgcgaaaaaagaaattaccgcggtacgttccattgaaggcggctgggaaaaggttaaagcgaagcttcccgtccttgttaccttcaacgccgaaggtgaaatgccccgcccggcgtcggccattaaaaccatgacctacaaacgcgcggctcccgttcctgacgccgtacctatggccctttggaacattcccgccatcaacgccgacccgcagcagtgcggtcttgccggttctcccaccaaagtaaagcatatcaattccgtggtattgaccgccgcggacatcaggtacatcgatcccggcgaagcgggaatcacagagctgatccacggcctcatcgcggatcatactttcggttaa

SEQ ID NO: 54442 - protein, 274 aa, Unknown
  Obtained from environmental sample
  DOMAIN (24)...(218): Electron transfer flavoprotein domain
  misc_feature (1)..(274): Xaa is any amino acid
MNVIVLVKQVPDTQNISGEAMTPEGTVNRAALPAIFNPDDLYALEAALQIKDANPDTKVSVITMGPPSASAVLKECLYRGADFTALVSDRGFAGADTLATSYALKCAINKAGAFDLVLCGRQAIDGDTAQVGPQTAEKLGVNQITCVSKIEALDAAKKEITAVRSIEGGWEKVKAKLPVLVTFNAEGEMPRPASAIKTMTYKRAAPVPDAVPMALWNIPAINADPQQCGLAGSPTKVKHINSVVLTAADIRYIDPGEAGITELIHGLIADHTFG

SEQ ID NO: 54443 - DNA, 1689 bp, Unknown
  Obtained from environmental sample
  misc_feature (1)..(1689): n is a, c, g, or t
gtgtttcagattgcgggagggaatcatcacgcggtggagtctttgtattttgagaccgccggggtaattatcgacctgattctgctcggcaagtcccttgaggcggtgtccaaaggccgcaccagcgaggcgataaaaaaatttatgggccttgcccccaaaacggctgttattattgagaaagacagttccggcgcggatattgaaaaagaaattcccattaatgaagtagtattaggcgacattatagtggtaaagccgggcgcgaaaatacccgtggacggagtggtaaccgaggggtacagcgccgttgacgaatctatgctcaccggggagagtatgccggttgacaaaaatcccggtgatccggtttacggggcgaccattaacagtaacggcgttatgcgctttaaggcggaaaaaatcggcaacgaaaccgcgctggcgcagatcatcaaactggttgaagacgcgcaaggctcaaaagcgccgatagcgcagatggcggacattgtttccggttactttgtgccggttgtctgcgccgtcgctcttgccgccggtatcgcgtggtttattgcggcttcttccggcgcggtcaatgtgcccgacggaaagtccgtaacggaattcgccctgacgatttttatttccgtgctggtcattgcctgcccctgcgccctgggacttgccacgcctacggcgattatggtggcaaccggcaaaggcgcggaaaacggcattttgattaagggcggcgaagcgctggaaaccgccggcaaaattcaaacgatagtgtttgataaaaccggcacgattaccgaaggcaagccggaagtaacggatatagttattagtgaagagtggatagtaggtagtatggaacaaaaggaagaattttttcttcaaattgtcgccgcagttgaaaaaaattcagagcatccgcttgcttccgctattgtgcgcgaagcggtgaaacgcgaacttacactgccgtctgtaactaattttaaagccatacccggcagaggcatagaagcaaaaatttcctctctctctctatccgctactaactattcactaccagctacaaactaccaactgcctattctcgtaggaaaccgcaaactcatggatgagcggagtatttcatttaccgaacttgaagccgcttccgacaagcttgccggtgaaggaaagacgccgatgtttgccgcccttgacggaaaagccgcgggaattgtggcagtggccgatgtgcttaaaccttcaagcaagacggctcttgaaaagcttcataaaatgggaattcaaaccgccatgatcacgggggacaataaaaaaacggcggacactatcgctaaacaggtagggatagaccgcgtactcgcggaagttttgccgcaggataaatccgccgaagtaaaaaaattacagaacgaagggaaaaagatagcttttgtgggagacggcattaatgacgctccggcgctggcgcaggcggacataggaatcgccataggaagcgggacggacgtggctatggaatccgccgacatagtgcttatgcgctccgacttgggcgacgttcctacggctgttaatttaagcaaacggacaatccgcaatataaagcaaaatctgttctgggccttcggttacaatgtgctggctcgtgccgaattctga

SEQ ID NO: 54444 - protein, 562 aa, Unknown
  Obtained from environmental sample
  DOMAIN (262)...(511): haloacid dehalogenase-like hydrolase
  misc_feature (1)..(562): Xaa is any amino acid
MFQIAGGNHHAVESLYFETAGVIIDLILLGKSLEAVSKGRTSEAIKKFMGLAPKTAVIIEKDSSGADIEKEIPINEVVLGDIIVVKPGAKIPVDGVVTEGYSAVDESMLTGESMPVDKNPGDPVYGATINSNGVMRFKAEKIGNETALAQIIKLVEDAQGSKAPIAQMADIVSGYFVPVVCAVALAAGIAWFIAASSGAVNVPDGKSVTEFALTIFISVLVIACPCALGLATPTAIMVATGKGAENGILIKGGEALETAGKIQTIVFDKTGTITEGKPEVTDIVISEEWIVGSMEQKEEFFLQIVAAVEKNSEHPLASAIVREAVKRELTLPSVTNFKAIPGRGIEAKISSLSLSATNYSLPATNYQLPILVGNRKLMDERSISFTELEAASDKLAGEGKTPMFAALDGKAAGIVAVADVLKPSSKTALEKLHKMGIQTAMITGDNKKTADTIAKQVGIDRVLAEVLPQDKSAEVKKLQNEGKKIAFVGDGINDAPALAQADIGIAIGSGTDVAMESADIVLMRSDLGDVPTAVNLSKRTIRNIKQNLFWAFGYNVLARAEF

SEQ ID NO: 54445 - DNA, 429 bp, Unknown
  Obtained from environmental sample
  misc_feature (1)..(429): n is a, c, g, or t
ttgaagaaaaaattcttccttttgttccatactacctactatccactcttcactaataactatatccgttacttccggcttgccttcggtaatcgtgccggttttatcaaacactatcgtttgaattttgccggcggtttccagcgcttcgccgcccttaatcaaaatgccgttttccgcgcctttgccggttgccaccataatcgccgtaggcgtggcaagtcccagggcgcaggggcaggcaatgaccagcacggaaataaaaatcgtcagggcgaattccgttacggactttccgtcgggcacattgaccgcgccggaagaagccgcaataaaccacgcgataccggcggcaagagcgacggcgcagacaaccggcacaaagtaaccggaaacaatgtccgccatctgcgctatcggcgcttttga

SEQ ID NO: 54446 - protein, 142 aa, Unknown
  Obtained from environmental sample
  misc_feature (1)..(142): Xaa is any amino acid
MKKKFFLLFHTTYYPLFTNNYIRYFRLAFGNRAGFIKHYRLNFAGGFQRFAALNQNAVFRAFAGCHHNRRRRGKSQGAGAGNDQHGNKNRQGEFRYGLSVGHIDRAGRSRNKPRDTGGKSDGADNRHKVTGNNVRHLRYRRF

SEQ ID NO: 54447 - DNA, 435 bp, Unknown
  Obtained from environmental sample
  misc_feature (1)..(435): n is a, c, g, or t
ttgtttcttggcgccttgactacgcccgcttcgcctcgccttagctcagctcgctgtcgcgcctcgcctgcggccgtttcccccggccccaatagcttggcgcttcgaccggggcaaccgtcgcccggccgggtctcgcctcacgcgtcatcccttgaaaccaagaacggtactggaataatgaccagtttcccatcggctacgggcttccccctcgccttaggggccgacttaccctgggcagatgacctttacccaggaatccttaggcttccggcggacgggcatcccacccgtcttttcgtctacttatacctgcattctcccttccactgcctccagcagccctcgcaggctgccttcgtcggcccgtggaatgctcccctaccgtctcgcaatcgcttgcgaaacccgcggcttcggttgcatgcttag

SEQ ID NO: 54448 - protein, 144 aa, Unknown
  Obtained from environmental sample
  misc_feature (1)..(144): Xaa is any amino acid
MFLGALTTPASPRLSSARCRASPAAVSPGPNSLALRPGQPSPGRVSPHASSLETKNGTGIMTSFPSATGFPLALGADLPWADDLYPGILRLPADGHPTRLFVYLYLHSPFHCLQQPSQAAFVGPWNAPLPSRNRLRNPRLRLHA

SEQ ID NO: 54449 - DNA, 342 bp, Unknown
  Obtained from environmental sample
  misc_feature (1)..(342): n is a, c, g, or t
atgattacagcaaaacaaaacggtacagccgacgttgtaggcgtggacggcgcagcaggtgctggcggcatggacgatggctgccactatttcggttccagtccgtctattgagagcgtcaaaaacgatgtcggctcggtcgcggcgacggattgcgcggtgctaatactgggcgagaccggcacgggcaagagcgtgctcgcgcgtcagatccatgaccgcagcacccgcagcgacaaggcgttcgtcgacataaattgctcggcgttgcgcggtgagttgctcaagagcgaggtactgggccacgcccgcgggtcctcggccgatctgatcattgggtaa

SEQ ID NO: 54450 - protein, 113 aa, Unknown
  Obtained from environmental sample
  DOMAIN (30)...(113): Sigma-54 interaction domain
  misc_feature (1)..(113): Xaa is any amino acid
MITAKQNGTADVVGVDGAAGAGGMDDGCHYFGSSPSIESVKNDVGSVAATDCAVLILGETGTGKSVLARQIHDRSTRSDKAFVDINCSALRGELLKSEVLGHARGSSADLIIG

SEQ ID NO: 54451 - DNA, 864 bp, Unknown
  Obtained from environmental sample
  misc_feature (1)..(864): n is a, c, g, or t
ttggatagggaaaactgggttactatgaccttttctttaactaatcctgataaccctgaaaataatatttccgaaattagtaatcagcaaataagaggaagaggtaacacaacatggtttgcgcctaaaaaaccttaccgtataaggtttagaaacgatcaacaacaggctcctttcgggcttcccgccgcaagaaattgggtattgcttgcaaattattacgacagatcgttaatgcattccgcatttgcatttgagttaggaaaaagattaggattggaatatacttgttcatacgattatgttgaattatatctaaatggtaaatatcaaggaatttacattctcacagaacatatgcaggttgatcaggctaaaattggcgctcccggaaggccaaaagttgacttgaatgaaggttggtttgtagaaattgattttcactatgatgaagaaccgcgattcagaacagtaaaatataatttgcctgttatgataaaatcacctgaatttaccccagcagatataaataatctattatacaattttgtaagaagtgatttgaacaaattaaccaacttaatgttttcagaagatttccccgaaaatggttatcgtgatttaatagaaatagactcatttatcaaatattttatggtgcaggttattactaataatttggattttaatattcatacgtttgattcacgaacagaacccggcagtattctcctttacaaggacaaaggagctaaaataagcgcaggacctctttgggattttgatcgtacttttggcgacaatccggaagtgaccgcaaattcgtatccatatcccattatccttttttcaaaggttttttga

SEQ ID NO: 54452 - protein, 287 aa, Unknown
  Obtained from environmental sample
  misc_feature (1)..(287): Xaa is any amino acid
MDRENWVTMTFSLTNPDNPENNISEISNQQIRGRGNTTWFAPKKPYRIRFRNDQQQAPFGLPAARNWVLLANYYDRSLMHSAFAFELGKRLGLEYTCSYDYVELYLNGKYQGIYILTEHMQVDQAKIGAPGRPKVDLNEGWFVEIDFHYDEEPRFRTVKYNLPVMIKSPEFTPADINNLLYNFVRSDLNKLTNLMFSEDFPENGYRDLIEIDSFIKYFMVQVITNNLDFNIHTFDSRTEPGSILLYKDKGAKISAGPLWDFDRTFGDNPEVTANSYPYPIILFSKVF

SEQ ID NO: 54453 - DNA, 441 bp, Unknown
  Obtained from environmental sample
  misc_feature (1)..(441): n is a, c, g, or t
ttggcagaggataagctcttcgccactctggattccacttcccgcaggctgcatcttccccagggtacggaagttctccttgttgacacagtcgggtttataaggcggcttccccacagccttataaaagcctttcgttcaaccctggaagaagcaagccatgccgctcttatcctgaacgttcttgacgcctcggatattgattctgaaattcagtatgaaaccactctgtctgttctaagagagcttaacgccggagaaatcccgatgatcacggttctgaataaggctgatagagttgattctatacaaacatttttaaaccgctatccggagagtattgcggtatcggcgctaaaaggtagcggccttgctgagctttgtgcgcgtatagaaaataccctcgcatcacagaaacaattgaaccaaataggagcttaa

SEQ ID NO: 54454 - protein, 146 aa, Unknown
  Obtained from environmental sample
  DOMAIN (1)...(98): GTPase of unknown function
  misc_feature (1)..(146): Xaa is any amino acid
MAEDKLFATLDSTSRRLHLPQGTEVLLVDTVGFIRRLPHSLIKAFRSTLEEASHAALILNVLDASDIDSEIQYETTLSVLRELNAGEIPMITVLNKADRVDSIQTFLNRYPESIAVSALKGSGLAELCARIENTLASQKQLNQIGA

SEQ ID NO: 54455 - DNA, 351 bp, Unknown
  Obtained from environmental sample
  misc_feature (1)..(351): n is a, c, g, or t
ttgtcagggaaaaacatgcctcatacggcatgggaaccggaaaagccgaataactggcgcaaaaagccaaagcaattgggggttgactgcattgttttcgacaaggaaataagcccatcccatcagcgcaattgggaggaattcaccggtatccccgctattgaccgccaggagctgattattcagatttttgccagccacgccagctcacgcgaggcccagcttcaggttcggcttgcggatcttatttattcactaccaaggcttcatcataagtacatccatctttccacggccgaggggtggccgctatcctaccaaggcttcacgctacacccggctggagactga

SEQ ID NO: 54456 - protein, 116 aa, Unknown
  Obtained from environmental sample
  misc_feature (1)..(116): Xaa is any amino acid
MSGKNMPHTAWEPEKPNNWRKKPKQLGVDCIVFDKEISPSHQRNWEEFTGIPAIDRQELIIQIFASHASSREAQLQVRLADLIYSLPRLHHKYIHLSTAEGWPLSYQGFTLHPAGD

SEQ ID NO: 54457 - DNA, 1572 bp, Unknown
  Obtained from environmental sample
  misc_feature (1)..(1572): n is a, c, g, or t
atgtcaactacagaaaataccgccgcagattttataagcgagtttataaaagaagatcttgcctcaggcagatttagttatgtgcatacacgttttccgcctgagcccaacggctggctgcacataggccactgtaaggcgttttacattgactttgttatggcggagcgtttcggcggaaaatgcaatcttcgctttgacgataccaatcccgaaaaagaagacatttcgtatgtagaagcaataaaacgcgacataaaatggatgggctatgactgggatgaccgtgaatattacgcttccgattattacgagtacctgtacgatcttgcggtgaaaataataaaaaagggaaatgcgtatgttgacgaccttaccgaaactgaaatcagcgagtatcggggaaccgctgttgcggataaaaacaatatcaccgtaacgccgcccggcaggaacagtccgtaccgcgaccgttctgttgatgaaaaccttgatctctttgtgcgtatgcgagcaggcgaatatgccgacggagcaaaaaccctgcgcgcaaaaattgatatgacccatcccaacctgatgatgcgcgaccctgttatgtacaggatacgccgtgaatatcattaccgcacgggaaattcatggtgcatttatccgatgtacgatttccagcacccgttgtctgacgccaaagaaggaataacccactccctttgctcgctggagtatgaaatccaccgtccgctttatgaatggtttatccgtgaagcggaagtttttccttcacgccaaatagagtttgcgcgtcttaaccttacctataccgttatgagcaaacgctggcttttaaagcttgtgcaggataagtatgtttcaggctgggatgatccgcgtatgccgaccattgccggtcttcgcaggcgcggttacacgcctcaggcaatacgcagttttgtttcacagattggcattgcaaaaacagacagtacggtagacatcgcctttcttgaatactgcctccgtgaagatttaaacaaacggtcgttgcgcgtaatggcggttttgcgtccgttgaaactgataatcgaaaattgggacgaaactaaaaccgaagaactggaagctgtgaacaatcctgaagatgaaggcgcgggaagcaggcgcgtaccattttcccgcgaattgtggattgagcgcgaggattttgaagaagtcccgccgcccaaatatttcaggctctttccgggaaattccgtgcgtctgcgttatgcgtatattgttacctgcaccggctttgacaaagacgcggacggtaacattaacgccgtgcgctgcacctacgatccgcagacaaggggcggaaacgctcccgataacaaaaaggttaaaggtacaattcactgggtttccgcggcacacgccgtaccgcttgaagtgcgtctttatgactatctgttcaaaacggaaaagccgatggagatttcaccgcgtcctgacggcagcgcgggcgagtttaccgacaaccttaaccctaattcgctggaagtaatgaaaacacctcggccgatctga

SEQ ID NO: 54458 - protein, 523 aa, Unknown
  Obtained from environmental sample
  DOMAIN (350)...(521): tRNA synthetases class I (E and Q), anti-codon binding domain
  misc_feature (1)..(523): Xaa is any amino acid
MSTTENTAADFISEFIKEDLASGRFSYVHTRFPPEPNGWLHIGHCKAFYIDFVMAERFGGKCNLRFDDTNPEKEDISYVEAIKRDIKWMGYDWDDREYYASDYYEYLYDLAVKIIKKGNAYVDDLTETEISEYRGTAVADKNNITVTPPGRNSPYRDRSVDENLDLFVRMRAGEYADGAKTLRAKIDMTHPNLMMRDPVMYRIRREYHYRTGNSWCIYPMYDFQHPLSDAKEGITHSLCSLEYEIHRPLYEWFIREAEVFPSRQIEFARLNLTYTVMSKRWLLKLVQDKYVSGWDDPRMPTIAGLRRRGYTPQAIRSFVSQIGIAKTDSTVDIAFLEYCLREDLNKRSLRVMAVLRPLKLIIENWDETKTEELEAVNNPEDEGAGSRRVPFSRELWIEREDFEEVPPPKYFRLFPGNSVRLRYAYIVTCTGFDKDADGNINAVRCTYDPQTRGGNAPDNKKVKGTIHWVSAAHAVPLEVRLYDYLFKTEKPMEISPRPDGSAGEFTDNLNPNSLEVMKTPRPI

SEQ ID NO: 54459 - DNA, 585 bp, Unknown
  Obtained from environmental sample
  misc_feature (1)..(585): n is a, c, g, or t
atgagaaataattctcaatcaaaaaataattttttgcncaatgagtaccgtaaaacagcagaaaacctgtttcccaaagacggattttttaaggctcacaagccggaagtcaaagccgcttctgaatttgcgaaagcgcttggcatcggcgttgaatatcagcgtttactcgcccttgacaaaaacagcgatgaactacggacttttttggaacattttcaaaacaatcttgatttattgatacaaaaaacatgggtagaaaaagcggaagaaagacgcaaagagaaattgcagaacgaagtcccatcgttaatgactacaatagaaaagggtgatttatcagcagccatagaagaatttaatatgattttggaagaattatcctatctctttttcggctctcaaagtgaaaaagaagattttaccgaatatactttccgcatagacgcgcaaatgggacttttttggtggtacgggaacaaacttttttcattaaaagactttggcagcaagaacggagccaaagatgaaaaagttttatgggcagtcctgcttctaggcatttgttatctgacgaatttttaa

SEQ ID NO: 54460 - protein, 194 aa, Unknown
  Obtained from environmental sample
  misc_feature (1)..(194): Xaa is any amino acid
MRNNSQSKNNFLXNEYRKTAENLFPKDGFFKAHKPEVKAASEFAKALGIGVEYQRLLALDKNSDELRTFLEHFQNNLDLLIQKTWVEKAEERRKEKLQNEVPSLMTTIEKGDLSAAIEEFNMILEELSYLFFGSQSEKEDFTEYTFRIDAQMGLFWWYGNKLFSLKDFGSKNGAKDEKVLWAVLLLGICYLTNF

SEQ ID NO: 54461 - DNA, 1023 bp, Unknown
  Obtained from environmental sample
  misc_feature (1)..(1023): n is a, c, g, or t
atggaagccctgctctcagcagggcatattgagtacaaatacgcagttcggttaaaaagcgtactgaaccgtgccagaagcgtttcgacaacaaatatcgcattagttctcggtattgatctgaacagcgtgagtaactatgtgaaacgctataacgaaggcggggtggaatccctgttaagcgataaaaccagaaagccgggaaaagcccccataccgataaagctccaaaacaagatagcccaatttgtctgtcaagaaaaaccgaaagacgggacgcactggagcacccgtgaattgagcagacgttttgggataagccataacgcgataagtaaaatattaagagaacgcggaattaagccgcatctggtaaaacggtttcagttcagcacggacaaagaattcgagagcaagctcgcggacgtcgttgggctttatcttgacccgccggagaactcaattgtgttttgcgtggatgaaaagacccagattcaggcgcttgagaggacgcagccgatactgccgctgcgtccggggattcccgaaaggcaaacccacgattacgagcgccacgggacgacgacgctgtttgctgcgctgaatgtcgccagcgggaaagtgatagggaaatgcaaagcaagccacaaagcgcaagactatgttgattttctgaagttgcttgaccaaaagacaccaaagaaaaaagtattgcatatcatagcggataacaattcatcgcataaagcgccggtagtaaaagaatatcttgaaaagaaatccggtcggtttgtcgagcatttcatcccgacatattcatcctggctgaacatggttgaacggtggttcgcggaaataacaaacaaacggatacggagggaaagctggagtagccttaaagagcttgaagaggcgataaccgattatatcatttcatggaacgagtcagggcgtaaatttatctggacaaaaaacttcaaaactattaaagcatctattaaaaaagcaaaacattctttatga

SEQ ID NO: 54462 - protein, 340 aa, Unknown
  Obtained from environmental sample
  DOMAIN (163)...(323): Integrase core domain
  misc_feature (1)..(340): Xaa is any amino acid
MEALLSAGHIEYKYAVRLKSVLNRARSVSTTNIALVLGIDLNSVSNYVKRYNEGGVESLLSDKTRKPGKAPIPIKLQNKIAQFVCQEKPKDGTHWSTRELSRRFGISHNAISKILRERGIKPHLVKRFQFSTDKEFESKLADVVGLYLDPPENSIVFCVDEKTQIQALERTQPILPLRPGIPERQTHDYERHGTTTLFAALNVASGKVIGKCKASHKAQDYVDFLKLLDQKTPKKKVLHIIADNNSSHKAPVVKEYLEKKSGRFVEHFIPTYSSWLNMVERWFAEITNKRIRRESWSSLKELEEAITDYIISWNESGRKFIWTKNFKTIKASIKKAKHSL

SEQ ID NO: 54463 - DNA, 966 bp, Unknown
  Obtained from environmental sample
  misc_feature (1)..(966): n is a, c, g, or t
ttgttttcagtgaattctgtcggcattgtaacagcaaaggattctgtttttgtgaacgcggataaaagtaccttattgaaaaacataaaggattgttttggtataaatcctgacaagaaattaatacaacctatcaactatcgtccttttgatcgacaatacgtttattacgatgtagagaaaatagaaagagcgcgagaaaaaatcatgtcgcatcttttgaatggtgaaaatgtaggattaatggtgtgccgtcaacaaaagacagacggtttctatcattgcttggttcacaaacatatcgcagagtcaagttttgtatccaataagacatcggagatcgggtactcattccctctctatctttaccacaaccacgaaaaccgcaaaccaaacctgaacgccacaaccgtcaacgaaatatccaaacggatagacgtgcggtatgttgaagaaaaagaaataggttcatacaaaaaatgcttcgcgccgatagaccttttggattacatctatgcggttttgcactcaccagcctatcgcgagcgttacaaagaattcctaaaaatagacttcccgcgcatcccctatcccaaagacgccaagcaattccgcacccttgcaaaacttggtgaaaaactccgctgtttgcacctattggaagatgtggagccgctacggaacacagcggactatcccatccccggcagcgacgaagtagagaaaatccaatacgatgaagacggcggtaaaggcaaggtattcatcaacagcaagcaatattttaggaacgtcccccgcgaggcgtgggagttctacatcggtggctaccaacccgcccaaaaatggctaaaagaccgtaaagggcgggttttgagctatgacgatacgttacattaccggcgaatcataatggttttgctgaaaactattgagataatggaggaaattagactcataacctaa

SEQ ID NO: 54464 - protein, 321 aa, Unknown
  Obtained from environmental sample
  misc_feature (1)..(321): Xaa is any amino acid
MFSVNSVGIVTAKDSVFVNADKSTLLKNIKDCFGINPDKKLIQPINYRPFDRQYVYYDVEKIERAREKIMSHLLNGENVGLMVCRQQKTDGFYHCLVHKHIAESSFVSNKTSEIGYSFPLYLYHNHENRKPNLNATTVNEISKRIDVRYVEEKEIGSYKKCFAPIDLLDYIYAVLHSPAYRERYKEFLKIDFPRIPYPKDAKQFRTLAKLGEKLRCLHLLEDVEPLRNTADYPIPGSDEVEKIQYDEDGGKGKVFINSKQYFRNVPREAWEFYIGGYQPAQKWLKDRKGRVLSYDDTLHYRRIIMVLLKTIEIMEEIRLIT

SEQ ID NO: 54465 - DNA, 594 bp, Unknown
  Obtained from environmental sample
  misc_feature (1)..(594): n is a, c, g, or t
atgcccagctcaatgggcaaggccgtaccgatgtacgatattatgctggccgatgccgaaggccaccgggtacccacgggcgcaaccggggaaatctgcattaaatcaacgccggagaaccgcacgaaaggcctgtttatgggctattataaaaacagcgcagctactgacaaggtatggcatgatggctatttccacacaggcgatctggcgtattacgacgagcagggctatttgtggtacgttggtcgcaacgatgatgtgatcaaatcgtcaggctaccgcatcgggccctttgaggttgaaagcgttttactgcaacacccggcggtggcagaagcggcggtaaccggtgtgcccgatcccatacgcggctttaacgtcaaggcgacaatcgtgcttaaaaagaacttctcgccgtctgacgcgctgattagggaattgcaggactttgtgaaaaaaatcaccgcgccttataaatacccgcgcgtaattgaatttgtcaacgaactgcccaaaaccattaacggcaagatccggcgcgtggcaatacgcgacaaggacatgggcaaggagacagagagagacgtgtaa

SEQ ID NO: 54466 - protein, 197 aa, Unknown
  Obtained from environmental sample
  misc_feature (1)..(197): Xaa is any amino acid
MPSSMGKAVPMYDIMLADAEGHRVPTGATGEICIKSTPENRTKGLFMGYYKNSAATDKVWHDGYFHTGDLAYYDEQGYLWYVGRNDDVIKSSGYRIGPFEVESVLLQHPAVAEAAVTGVPDPIRGFNVKATIVLKKNFSPSDALIRELQDFVKKITAPYKYPRVIEFVNELPKTINGKIRRVAIRDKDMGKETERDV

SEQ ID NO: 54467 - DNA, 1473 bp, Unknown
  Obtained from environmental sample
  misc_feature (1)..(1473): n is a, c, g, or t
atggacacaaatgaaagcggcgaanataaaatatggatcgcgaccggaaagaaccctgtctacatgaatcccaaaatggtaaaccggcacgggcttgtcgccggggccaccggtaccggaaaaaccgtatccattanagtgctggcggagcttttagtgatttgggcgtacctggtttttatggccgatatcaaaggcgacgtttcagggctttgcaaggcgggcgaaccgaacagccgcgtcgacgagcgcgtaaagagcatgaacatcatggattttgcatacggagcttatcctgtgcgttttttcgatgtttacggcaaaaaaggactccctgtacgcacgaccatatccgaaatggggccggttcttatgtcgcgcattctcggactgaacgagacgcaggccggtattttacagatcatatttaaaatcgcggacgacgacggcctcttgctgatcgatctgaaagatctgcgcgcgatgatacagttcgtgggcgacaacgcgaaggagttcacaaccaaatacggcaacattaccacgcaaagcataggcgcaatacaacgcggcctgttgacgctttcttcaggcggaggagaactcttcttcggcgaaccggcgctcgatatccacgactggctggcctttgacgaaaagggacgcggctttatcaacattctggactgcgttaccctttttcaaaacccgctgctttattccaccttccttttatggatgctgtcggcgttatacgaaatgatgccggaagtcggcgatcctgacaaacccaaaatggtgttcttttttgacgaggcgcatttattgtttactgacgcgcccaaaacgcttttacagaaaattgagcaggtggtacggcttatccgctccaaaggcgtgggcatttactttatcacccagtcgccgtcggatattcccgataccgttttgtcccaactgggcaacaagatccagcatgcgctcagggcttacacaccgaaggatcaaaaggcggtgaaggccgccgcggcgtctttccgcacaaaccccgaattctcaagcgagaccgttttgggcgagctttccaccggcgaggcgctcatatccgtcctcgacgaaaaaggcgcgccgcagatggtacagcgcgcttttatgctgccgcccaggagttttatgggggccgttgagccgcagatgataaccgagttgacgcgcagttgtccgctgtactcaagatacggacaggcgattgaccgtgaatcggcttacgaggtcctggaaaaacagaaaaaacaacaggcaaacgcgccgcagccaaaacagccagcgcagcaaaagcaggctgccaagcctaagacgagcaagcgcggcacaagcatggcaagcaaagccgcttcaagcgcgatgaacacaattgggcgggaagtgggaaaagccttaatacgcggcttgctgggcaacatgaaaaggtaa

SEQ ID NO: 54468 - protein, 490 aa, Unknown
  Obtained from environmental sample
  DOMAIN (8)...(490): Bacterial protein of unknown function (DUF853)
  misc_feature (1)..(490): Xaa is any amino acid
MDTNESGEXKIWIATGKNPVYMNPKMVNRHGLVAGATGTGKTVSIXVLAELLVIWAYLVFMADIKGDVSGLCKAGEPNSRVDERVKSMNIMDFAYGAYPVRFFDVYGKKGLPVRTTISEMGPVLMSRILGLNETQAGILQIIFKIADDDGLLLIDLKDLRAMIQFVGDNAKEFTTKYGNITTQSIGAIQRGLLTLSSGGGELFFGEPALDIHDWLAFDEKGRGFINILDCVTLFQNPLLYSTFLLWMLSALYEMMPEVGDPDKPKMVFFFDEAHLLFTDAPKTLLQKIEQVVRLIRSKGVGIYFITQSPSDIPDTVLSQLGNKIQHALRAYTPKDQKAVKAAAASFRTNPEFSSETVLGELSTGEALISVLDEKGAPQMVQRAFMLPPRSFMGAVEPQMITELTRSCPLYSRYGQAIDRESAYEVLEKQKKQQANAPQPKQPAQQKQAAKPKTSKRGTSMASKAASSAMNTIGREVGKALIRGLLGNMKR

SEQ ID NO: 54469 - DNA, 786 bp, Unknown
  Obtained from environmental sample
  misc_feature (1)..(786): n is a, c, g, or t
atgatgattgaagccgttgaccgggagattatcgctaaagaccctacagccaaagttgaacggctgataaataactgtaaaacaatcaaaattattactccgcttgaatttaaaaaattgtttgtcggggattggcgcaaggtttgggaagataaccgcattgtttataccgtgaataaactggcggctttgtcgggtatgagggtgtcggagattttggggcttaaaggggattgtctgtttgatgaccatatttacgtttatatgcaatatgacgtttacggttacagacttactaaaacgaaagataaacataatataccgcttccggcttctcttattgaagatttgaaatttctgaaagaaaaaagcggggacggctacctgttttctactgacggcgggggcagccctatttgcagaaagacggttttaatgtatttgcgaaaggctttgataaatatcgggattaccgccgccgagattaaagagcgcaatttgcatatccacgcatggaggcattttttcaatactgaaatgctgaagggcgggatgactacggaacaggcgcaggcgataaccacgcataaaagcgaaaggatgaccgaacgctacacgcattttgacccgcttgaatttgtaaaggcgaaagaaatacaagaggcattgttgcagcctgtcggcgaaaaaccgcaagggctagaagctgaaaaaaaggaaatgccgcttaacgtgttttccttccctgcatccggcattccgcaagaggaacggaaacaagcttag

SEQ ID NO: 54470 - protein, 261 aa, Unknown
  Obtained from environmental sample
  DOMAIN (42)...(215): Phage integrase family
  misc_feature (1)..(261): Xaa is any amino acid
MMIEAVDREIIAKDPTAKVERLINNCKTIKIITPLEFKKLFVGDWRKVWEDNRIVYTVNKLAALSGMRVSEILGLKGDCLFDDHIYVYMQYDVYGYRLTKTKDKHNIPLPASLIEDLKFLKEKSGDGYLFSTDGGGSPICRKTVLMYLRKALINIGITAAEIKERNLHIHAWRHFFNTEMLKGGMTTEQAQAITTHKSERMTERYTHFDPLEFVKAKEIQEALLQPVGEKPQGLEAEKKEMPLNVFSFPASGIPQEERKQA

SEQ ID NO: 54471 - DNA, 804 bp, Unknown
  Obtained from environmental sample
  misc_feature (1)..(804): n is a, c, g, or t
atgaattttcgatcattgaaagacgtagataaagttattgaagtattaagaaatcaaaagatagatttaaaattatttccccatttaaattcagacgcaaccagacagaaagctgaaattgtgaacagagctattgataatttacttgaaaaagcaagtattcttcaaggtaaaatcaatattcagaaattacatattgacaagattatacaagaaaataacgaagaaataaatggatttttaaaaaatgctggttataattattctgttgatataaaggaagatacaaaaaatcattattgtttaaaactaatacataatgatattacaaatgaaataactgatgttaaaaaccatcttagcttcggtgaaaagaatgcgtttgccgtaatactttttatgtatgatgctttaaaaagtaatgcggagttaattattcttgatgatcctatttcatcttttgataaaaataaaaaatacgcaataattgatatgttgtttaggaaaggggagaaaagttttagaaataaaacagtattattattgacgcatgactttgaaccaattattgatatggtatatcatcatagtgatagatttgataaaccttattcttgctttgttgaaaatgatcacggtgctttatcagaaaaagaaatattgaaagaaaatattaaaacatttattgaaatatgtaatgaaaatcttcaaaaaaatattaatgatattacaaaattagtttatctcagaagatattatgaagtaattaataaaaaaagaaatggcatatcaacttatttctaa

SEQ ID NO: 54472 - protein, 267 aa, Unknown
  Obtained from environmental sample
  misc_feature (1)..(267): Xaa is any amino acid
MNFRSLKDVDKVIEVLRNQKIDLKLFPHLNSDATRQKAEIVNRAIDNLLEKASILQGKINIQKLHIDKIIQENNEEINGFLKNAGYNYSVDIKEDTKNHYCLKLIHNDITNEITDVKNHLSFGEKNAFAVILFMYDALKSNAELIILDDPISSFDKNKKYAIIDMLFRKGEKSFRNKTVLLLTHDFEPIIDMVYHHSDRFDKPYSCFVENDHGALSEKEILKENIKTFIEICNENLQKNINDITKLVYLRRYYEVINKKRNGISTYF

SEQ ID NO: 54473 - DNA, 675 bp, Unknown
  Obtained from environmental sample
  misc_feature (1)..(675): n is a, c, g, or t
atgactgaggagcaggttaaggttctgtttgaggaatacacccgttttaattcggaaagcaaccggaatatttcaggcacggggcttggcatggccatcacacatagcctggtcagcctgatgaacggaaatttaaccgtggacagcgcgcttggcaggggaaccgtgattaccgtcaggataccgcaggggcttaccggttccggaacacttggcagggaaatcgcggaaaattttaaattattcaatttttcatccgaggctcaaaagaaaaacagaaaaataacccgcgagcccatgccgtacggaaaagtgcttgtcgtggacgacatgaaatccaacctggatgtcgccgtattgctgctggccccgtaccagcttcaaattgacatcgcggaaagcggcgccgaagcggtcgccttgattaaaagcaaaaaagagtatgacattattttcatggatcacatgatgccggatatggacggcattcaaaccacgtggaggatccgctcccttggatacaagaaaccgatattcgccctgacggcgaacgccctggcctggaagcaggaatctttccttgagagcgggtttgacggctacatcttcaagcccatagacatacgccagttaaacgacacccttaacaagtacgtgcgcgataaatactgctaa

SEQ ID NO: 54474 - protein, 224 aa, Unknown
  Obtained from environmental sample
  DOMAIN (103)...(216): Response regulator receiver domain
  misc_feature (1)..(224): Xaa is any amino acid
MTEEQVKVLFEEYTRFNSESNRNISGTGLGMAITHSLVSLMNGNLTVDSALGRGTVITVRIPQGLTGSGTLGREIAENFKLFNFSSEAQKKNRKITREPMPYGKVLVVDDMKSNLDVAVLLLAPYQLQIDIAESGAEAVALIKSKKEYDIIFMDHMMPDMDGIQTTWRIRSLGYKKPIFALTANALAWKQESFLESGFDGYIFKPIDIRQLNDTLNKYVRDKYC

SEQ ID NO: 54475 - DNA, 612 bp, Unknown
  Obtained from environmental sample
  misc_feature (1)..(612): n is a, c, g, or t
atggagagctgtaccttcggctcagcgaacgattcaggcgttcacgccgtcgggcaaaccgcaaatttttacacggatatcgaaagcataccggcagaccgtttcgctcccgcgctgaactcgtccctgcccaatgaggtaagagtgcttgaatccggcgagacagacaaggaatttcacgcccgtttcagcgcaaaggcgcggacttatcgttatcaatttatctgccgccctcttttgccgcatgaaagccgttataatctgcaattacgccgttttccgcgcttggaacttcttaacgaatacggcaggcttctcttgggagaaacagactgctccattttcgccggagctggagacacaagcgcttctaaaaaccgttatgtttacagagcctatttttatatggaaaaagacacgctgatttttgaaatttgcgccaacgccttccttcgcaacatggttcgctcggtcgccggaacattccttcactacgaagaaaccgacacgccgcccgagaaattacgggaaatcatcgcatcaagagagagagctctcgcaggccccaccttgccgcctcaagggcttttcctgtggcaagtggaatactga

SEQ ID NO: 54476 - protein, 203 aa, Unknown
  Obtained from environmental sample
  DOMAIN (102)...(203): tRNA pseudouridine synthase
  misc_feature (1)..(203): Xaa is any amino acid
MESCTFGSANDSGVHAVGQTANFYTDIESIPADRFAPALNSSLPNEVRVLESGETDKEFHARFSAKARTYRYQFICRPLLPHESRYNLQLRRFPRLELLNEYGRLLLGETDCSIFAGAGDTSASKNRYVYRAYFYMEKDTLIFEICANAFLRNMVRSVAGTFLHYEETDTPPEKLREIIASRERALAGPTLPPQGLFLWQVEY

SEQ ID NO: 54477 - DNA, 360 bp, Unknown
  Obtained from environmental sample
  misc_feature (1)..(360): n is a, c, g, or t
atgtggagcgctttgttatggacgcttttaaggaatggcaaaccggaaccaggaatatgttcgctccctgacatgagcgcgattgttcttgccactatcaacgccaagtggattcatccctcattggccttacggcttttaaaagcaaacctcggaaaccttgaagctcactgcacgattctggaatttgccctaaggcagcccttagatgaaaaaaccgcccccatccttgcggaacatccacgggttatcggtctttccgtttcaatatggaaccatttggcaactttggaactgcttaaggcatggaagcggaatggaaaaataaacgcaaaaacccttcgtgtctcggccatctga

SEQ ID NO: 54478 - protein, 119 aa, Unknown
  Obtained from environmental sample
  misc_feature (1)..(119): Xaa is any amino acid
MWSALLWTLLRNGKPEPGICSLPDMSAIVLATINAKWIHPSLALRLLKANLGNLEAHCTILEFALRQPLDEKTAPILAEHPRVIGLSVSIWNHLATLELLKAWKRNGKINAKTLRVSAI

SEQ ID NO: 54479 - DNA, 612 bp, Unknown
  Obtained from environmental sample
  misc_feature (1)..(612): n is a, c, g, or t
atggacgaaagcagtttcatttttggcgtagaccttgacggggtagtgggggacttttacggagcgatgcgaaaaattgccgctgcctggctgaataaacccgtgaaggccctgacaaccaatgtgagctttggccttgaagaatggggtcttgatgaatacggcggctatgaaaggcttcaccgtttcgccgtaacccagcgtaaccttttccgcgacatggagccaatcaaagacgccccctccgttttgcgaaaactttcaagcaatcacattagaattcgcatcatcacacacagactttttcttaaatattcccacaaggcaacaattacccagactgtggattggctggattcctgggacattccctactgggatctttgctttatggccgacaagggcgctgtaggcgcccatgtgtatattgatgattccccggcaaacattgtgcgcttaagggatcagggctgcaacacgattattttttcaaattctaccaatctggaactggacggcccaagagcatataactggcaggatgtggagcgctttgttatggacgcttttaaggaatggcaaaccggaaccaggaatatgttcgctccctga

SEQ ID NO: 54480 - protein, 203 aa, Unknown
  Obtained from environmental sample
  misc_feature (1)..(203): Xaa is any amino acid
MDESSFIFGVDLDGVVGDFYGAMRKIAAAWLNKPVKALTTNVSFGLEEWGLDEYGGYERLHRFAVTQRNLFRDMEPIKDAPSVLRKLSSNHIRIRIITHRLFLKYSHKATITQTVDWLDSWDIPYWDLCFMADKGAVGAHVYIDDSPANIVRLRDQGCNTIIFSNSTNLELDGPRAYNWQDVERFVMDAFKEWQTGTRNMFAP

SEQ ID NO: 54481 - DNA, 738 bp, Unknown
  Obtained from environmental sample
  misc_feature (1)..(738): n is a, c, g, or t
ttgcgctcccgttgcatgcaacgcggcatacgcctgggctccgacatggtgcccaaccacacgggcattgacagccgctgggtcagtgagcatcccagccgctttttacagctcccataccctccattcccgacttacacctattcctgcgaaaatctttcgggcagaaacgatgttacagtacagatcgaagaccattattttagccgcagcgatgcggcggtggtctttaaacgcatagacaacaatacaggcgaagtccgctacatctaccacggcaacgacgggacatccatgccgtggaacgataccgcccagatcgacttcctaaacccggaagcgagggaagctgtaatccgcacgataatcggcgtgtgccagcaattttccatcgtgcgctttgacgcggcaatgacgctggcgaaacggcacattcagcggctttggtacccagcgccaggtcatggcggagcgatagcaagccgtgccgaaaacgcgattaccactgatgaattcaactctcgcattcccaacgagttctggcgcgaagttgtggatcgctgtgccgccgaagcgccgcataccttgcttcttgctgaagctttctggatgatggaaggctacttcgtccgtaccctcggaatgcaccgagtttacaactcggcctttatgaacatgctaaaaaacgagggaaaacgcaaaataccgctcaacgataaaaaacaccctggaatttga

SEQ ID NO: 54482 - protein, 245 aa, Unknown
  Obtained from environmental sample
  misc_feature (1)..(245): Xaa is any amino acid
MRSRCMQRGIRLGSDMVPNHTGIDSRWVSEHPSRFLQLPYPPFPTYTYSCENLSGRNDVTVQIEDHYFSRSDAAVVFKRIDNNTGEVRYIYHGNDGTSMPWNDTAQIDFLNPEAREAVIRTIIGVCQQFSIVRFDAAMTLAKRHIQRLWYPAPGHGGAIASRAENAITTDEFNSRIPNEFWREVVDRCAAEAPHTLLLAEAFWMMEGYFVRTLGMHRVYNSAFMNMLKNEGKRKIPLNDKKHPGI

SEQ ID NO: 54483 - DNA, 390 bp, Unknown
  Obtained from environmental sample
  misc_feature (1)..(390): n is a, c, g, or t
atggtcccgcacgcttttctctgggttcctgattgtcttaaagacgattttttgcataggtttcgtgatttttttaactttcttgacagctcctgtctgctttcccgcgaagaagagctaaaaggccgaacatggtattttattgtcttcgataggtttagatcatcaaaaaaacaatttgaatttttctcgagttttgcgcccgttataggaattgacgagggaggcccttttaggagtcgttttgattttctgatcaatcttttaccgtctttaaaagaggaggcggtcaatcttttttctcccgctcttctttcattgccgaggaacaggcgggcagactctgccccaaaaaaccacgcccgaattcccccgttacgccatacctga

SEQ ID NO: 54484 - protein, 129 aa, Unknown
  Obtained from environmental sample
  misc_feature (1)..(129): Xaa is any amino acid
MVPHAFLWVPDCLKDDFLHRFRDFFNFLDSSCLLSREEELKGRTWYFIVFDRFRSSKKQFEFFSSFAPVIGIDEGGPFRSRFDFLINLLPSLKEEAVNLFSPALLSLPRNRRADSAPKNHARIPPLRHT

SEQ ID NO: 54485 - DNA, 783 bp, Unknown
  Obtained from environmental sample
  misc_feature (1)..(783): n is a, c, g, or t
gtgaccgccctcattttgcaggcgcgcctcgattcaagccgcctttgcgacaaggcgatgcttccccttggggacaggccaattgtcttccgtgtgatggaagcgctcgcttttcttccgtgcgaaaaaaaaatacttgcctgccctgaagacagcgtttcagcctttgccctcctggcggaggaagccggctttgttctggttcccggcccgaaagaagacgtgcttgcgcgttactgccttgcgatacgcaagtccggcgcggacagggtcgtccgcgcaacagcagataacccctttgtctttatcgacgccgccgccgcaattaacagggaagcggccgaattgggcgcagactactcaggctatttcggcctgccctacggcgcgggtgtgaatctgtcgcgtcggaggcgcttttgcgcgctgaaagggaagctgaggcgcctgacgaacgggagcatgtctgcccttacctttacaggcatcctgagcttttccgccttcacaggccgcttgctccaagacgctggcaaggctctgaatacaggatcactgtggacactagggaagattacgatcgcgccaatttgctgtacgggcgtctttctaccatgcaaccgggcgagcggaacctgggcgagaatattctttcacaatgcgaacgtttatggatgggtaaatgaaaaacgcttcagttctaatagttccagcctgccagaggggctgcggcggcggtcatttgatccgatcgctcctgatcctccaggcgctgcaggctaa

SEQ ID NO: 54486 - protein, 260 aa, Unknown
  Obtained from environmental sample
  DOMAIN (3)...(192): Cytidylyltransferase
  misc_feature (1)..(260): Xaa is any amino acid
MTALILQARLDSSRLCDKAMLPLGDRPIVFRVMEALAFLPCEKKILACPEDSVSAFALLAEEAGFVLVPGPKEDVLARYCLAIRKSGADRVVRATADNPFVFIDAAAAINREAAELGADYSGYFGLPYGAGVNLSRRRRFCALKGKLRRLTNGSMSALTFTGILSFSAFTGRLLQDAGKALNTGSLWTLGKITIAPICCTGVFLPCNRASGTWARIFFHNANVYGWVNEKRFSSNSSSLPEGLRRRSFDPIAPDPPGAAG

SEQ ID NO: 54487 - DNA, 798 bp, Unknown
  Obtained from environmental sample
  misc_feature (1)..(798): n is a, c, g, or t
ttgttcggcttatcattccccaggggcagatcanccgtggggaagagatcacccttgccgcgtcggaattgtcctgcccccgttttttgtcctctgaaacgatctaaagtttctcgaagcggcaatgcggaacgcatggcggagcgcctccatccggcagaagaagaaaagagaatctataaaaggctttgcaccacgcctttaatacaggacgcacgttctgaaaccatgcctacccttattgttccggctcttgttcccgaaaaaaaaaccgggaaaatcataagaacaatcccttacattccgcagaaagaagggcaattaaccttgtacccttttgatggcatcggcatttacgacagggagcggtttatccgcctgggcggattcgatccttttattaaaaatttccactggcagctgatggattttggttttcgttccagcctttggggcgaagaaatcgccgcgacccagctggtaaagctttcgtacgaaacccttgtccccgaggaggacataactgtgggcgaaggcttctatagattctttctgaaaaatatatcgccggttttcaagggcgattacgcccacatccccttgcggcgctttcctggatacttaaaaaggcgcaggggtctttttaccgcgtgggatgaatttttctctgcccgcgcctgggtcaaaaccaaccgttttcgttttagatcggacgccagaatcatgactgagctattcgcttctggggttgaggctgaagcaggggatgctactggtgagtcaagggaggaaaagtga

SEQ ID NO: 54488 - protein, 265 aa, Unknown
  Obtained from environmental sample
  misc_feature (1)..(265): Xaa is any amino acid
MFGLSFPRGRSXVGKRSPLPRRNCPAPVFCPLKRSKVSRSGNAERMAERLHPAEEEKRIYKRLCTTPLIQDARSETMPTLIVPALVPEKKTGKIIRTIPYIPQKEGQLTLYPFDGIGIYDRERFIRLGGFDPFIKNFHWQLMDFGFRSSLWGEEIAATQLVKLSYETLVPEEDITVGEGFYRFFLKNISPVFKGDYAHIPLRRFPGYLKRRRGLFTAWDEFFSARAWVKTNRFRFRSDARIMTELFASGVEAEAGDATGESREEK

SEQ ID NO: 54489 - DNA, 903 bp, Unknown
  Obtained from environmental sample
  misc_feature (1)..(903): n is a, c, g, or t
atgaggcgtgttgtcattacgggcgggtctgtcataagcgcgttgggcaatgaatggcatgatatattgaaaaatttgaaatcaggaaagaactgcgtccggcgcatggatgactgggacaaatatacccgcatgaatacaagactcgcagcccctgtcgattatacactgccggattatcccagaaaaataatccgcggtcttggaagggtcgcgcagcttgcctttgtctcagcggacaaagcgctgtcgaatgctggtatcagccgcgacgatcaaatgctgaaaaacggcaggtgcggcgtcgcgtacggctcttcaatgggcagtctcgattcacttcttgatttttacagtatgctcatacttaacgatcttaacaaaatgaacgccactacttatataaaggcaatgccgcagacatgcgccgcaaatatcggagttattctgggattaacagggaggcttattacaactaacacagcctgtacgtccggcagtcaggcaatcggttttgcgtacgaagctataaagcatggtcatcaggatttaatgctggcgggaggagcggaagaattgagcgccgcggatgccgctgtctttgacaccttgtttgcggcgagctgtaaaaatgacactcccgaaaaaactccggccgcttatgacaaaaaccgtgacggtcttgtggtcggcgaaggagccggaactattattcttgaagaatatgaacacgcaaaaaaacgcggagcaagaataattgcggaagttgccggatttgggacaaatactgacggcagccatattacgcagcccaatcgccccacaatgggaattgccatgcggcttgctctgcaggatgcaggcattgagccttccgctataggttatgctcggccgatctga

SEQ ID NO: 54490 - protein, 300 aa, Unknown
  Obtained from environmental sample
  DOMAIN (2)...(245): Beta-ketoacyl synthase, N-terminal domain
  misc_feature (1)..(300): Xaa is any amino acid
MRRVVITGGSVISALGNEWHDILKNLKSGKNCVRRMDDWDKYTRMNTRLAAPVDYTLPDYPRKIIRGLGRVAQLAFVSADKALSNAGISRDDQMLKNGRCGVAYGSSMGSLDSLLDFYSMLILNDLNKMNATTYIKAMPQTCAANIGVILGLTGRLITTNTACTSGSQAIGFAYEAIKHGHQDLMLAGGAEELSAADAAVFDTLFAASCKNDTPEKTPAAYDKNRDGLVVGEGAGTIILEEYEHAKKRGARIIAEVAGFGTNTDGSHITQPNRPTMGIAMRLALQDAGIEPSAIGYARPI

SEQ ID NO: 54491 - DNA, 321 bp, Unknown
  Obtained from environmental sample
  misc_feature (1)..(321): n is a, c, g, or t
atgggctgggcggcttacgcaaatcgttttacaatcgcggcggaagacggcggaaacgctcttaacggcaggataaccgactttcttttctcgccgcaggattttgacgtaattctggggtgcggtccatcgcctatgttaagcgttctgaagaaaaaatgcgaagagaaaaacgttccctgttttatctccatggaaaacaagtttgcctgcggcacaggcgcgtgtatgggctgcacaattaaaacaataaacggaaaccgccgctgctgcatggaaggccctattttttcagctcgtgaggtgtttttcaatgagtga

SEQ ID NO: 54492 - protein, 106 aa, Unknown
  Obtained from environmental sample
  misc_feature (1)..(106): Xaa is any amino acid
MGWAAYANRFTIAAEDGGNALNGRITDFLFSPQDFDVILGCGPSPMLSVLKKKCEEKNVPCFISMENKFACGTGACMGCTIKTINGNRRCCMEGPIFSAREVFFNE

SEQ ID NO: 54493 - DNA, 660 bp, Unknown
  Obtained from environmental sample
  misc_feature (1)..(660): n is a, c, g, or t
gtgaggtgtttttcaatgagtgataatactaataacaagcttgacatgtcggtggaaattgccggcgtaaaattcaataatcccgtcattgcgtcttcgggaacattcggcaaaggcagagaatacagcaatatttttgacatttcgctccttggcggaatatgcacaaagggactgacttttactccgcgctcaggaaacccaggagagcgcgtttgggaaacttcaagcggactgataaattcaatcgggcttgaaaaccccggcattaaatcatttatagaaaacgatcttgactatatgcgccgcctgggacccgtgataatcgccaacctttccggctcgtcttctgacgagtatgttaaaggcgccgccatgctggacaattcttccgttgacatgattgaacttaacatttcatgtcccaatattaaaggcggcggcattgccttcggccttgatccgggaacatcggcggcattggtcgtggcagtccgccgcgtctgccggaataagccgcttatggtaaaactttcacctaactgcccttccgtcgcttccgtagccatcgcctgcgtaaacgcgggagccgacgccctgtcgcttgtaaacacattcagggctattgcgattacactgaaaaacgcaagctgtatttga

SEQ ID NO: 54494 - protein, 219 aa, Unknown
  Obtained from environmental sample
  DOMAIN (15)...(219): Dihydroorotate dehydrogenase
  misc_feature (1)..(219): Xaa is any amino acid
MRCFSMSDNTNNKLDMSVEIAGVKFNNPVIASSGTFGKGREYSNIFDISLLGGICTKGLTFTPRSGNPGERVWETSSGLINSIGLENPGIKSFIENDLDYMRRLGPVIIANLSGSSSDEYVKGAAMLDNSSVDMIELNISCPNIKGGGIAFGLDPGTSAALVVAVRRVCRNKPLMVKLSPNCPSVASVAIACVNAGADALSLVNTFRAIAITLKNASCI

SEQ ID NO: 54495 - DNA, 1167 bp, Unknown
  Obtained from environmental sample
  misc_feature (1)..(1167): n is a, c, g, or t
gtgcaggattttctggaaaagggagttccggagacagacgccgcaaacataaaaataattgaatggcggccttcgatgaatctttacaaacaagcctatgtaaatttgctgtcttttaccgttgattttattaaacgcatggatgccggaaaaagaacgaccgccactttcgggaaaaaatggattggtaattttttcagaaaccttaaatttttgcaaaaaattctcctttacaaatctatggatatgcccgtaatcattacaggctccggtccgaatctggaaaaagtgatacctgttattcaaaaagcacaggaagaatgtttaattattgccgcttcttcttctgtaatggcgctttcccattacaacattcaggcggatattgtaatgagtacggatggcggcagttgggcgctgcggcacatctatccttttttcagaaaatcatataacggcgtttttaactgcattgataacgacgcgtcttttgccgtaaacctctgcgcggcgcttccctcccagtgcggcgggaaacccatgttaataatgaacgacggaagtttttggcagagccttatcctgcatgaactttcgataccgtctgttatcattccgcaaaaaggaaccgttaccgcctgcgccgtggaacttgcactcgcgttgacaagcggcaatatttttcttgctggcatggatctttgcgtaagagacataagaagccatgtgcggccttatgcttttgatcatctgttgtttgaccgcgcgagccgctttacgcctgtttactcgcaaagttttgcccgctcaaatcaaatacaggaaggcggaagccttgatatttacgcggcatggttcaagaaacagcttgcctcatggccaaaacggattttctctctgggcggcaataacgaagtatttgaaaacacactttacaaggaaaaggcaatcagaaaaaacacatccgtttatttaaaagctgaaaacataaaagacaacccggaaaattttagcaaaagaagcgccgccgccctgatcgccgctttgaaggacagcgaatactcaactaatcttaaaacagaacttgcgccactgctttttccatgtgaaaaaaatgtaacagaacatcaaatggagacggcaattaacgaggcggcttatgggtag

SEQ ID NO: 54496 - protein, 388 aa, Unknown
  Obtained from environmental sample
  DOMAIN (64)...(234): Protein of unknown function DUF115
  misc_feature (1)..(388): Xaa is any amino acid
MQDFLEKGVPETDAANIKIIEWRPSMNLYKQAYVNLLSFTVDFIKRMDAGKRTTATFGKKWIGNFFRNLKFLQKILLYKSMDMPVIITGSGPNLEKVIPVIQKAQEECLIIAASSSVMALSHYNIQADIVMSTDGGSWALRHIYPFFRKSYNGVFNCIDNDASFAVNLCAALPSQCGGKPMLIMNDGSFWQSLILHELSIPSVIIPQKGTVTACAVELALALTSGNIFLAGMDLCVRDIRSHVRPYAFDHLLFDRASRFTPVYSQSFARSNQIQEGGSLDIYAAWFKKQLASWPKRIFSLGGNNEVFENTLYKEKAIRKNTSVYLKAENIKDNPENFSKRSAAALIAALKDSEYSTNLKTELAPLLFPCEKNVTEHQMETAINEAAYG

SEQ ID NO: 54497 - DNA, 990 bp, Unknown
  Obtained from environmental sample
  misc_feature (1)..(990): n is a, c, g, or t
ttggacacagggtccgcagacattgattctttggacgccgaatctgccgtttctgattctgcggaatccgtgactgtcacggacgaacagcctgacctttccgtagacgcgttggatgaaaatatcgaaatagactttgacgcgataaaagatcatgatcacgacgaacttgaagcgttgcgcgaaaatggcgctacaccggtaactttcccccctgaagacacctcctatcttgaagaagacgatcatatcaatttagatctttccgaagcggtaattgacgagcctgaattatcaaccgaaggcattgacgaaccgcctataacagagccttctttggacatagattctcttgatgatctcaatatttccattgatgactcggatgtaccatccgctgatgtaccatctgaagaagcatcatctatcgatgattcatcatctatcgatgatgttgacattgatgttgccatgccgctgggtgatgtaaaagatgacgggcaggacttgtctcttgacaacggatttcagagcggcggcgaaatatctattgacgatcaaatgcccgaaggttttgaagacgaacttcaggacgcttctgttccgcttgaagaagcggcggatacctcagacttaatgtcttcagacttaacgtctgttgaagaagccgaacctgcggaaataaccgcacccgatgaatctgccgaagatattgataaaatagaagacatcggcgagatagacgacattggcggaattgccgatattgacgaaatacccgtagaagcggaaagcgcgcccccaagcacagccgagcaaaaaaccggcaatttccaaattccttcggacttaaaaaaggaacttaaaaatattctgggttatatggatcagcttcttgaatcactgcccgaagaaaaaatcgaagaattcgcaaagtctgaatactttgattcctacaagaaactctttaaggatttggggctggtataa

SEQ ID NO: 54498 - protein, 329 aa, Unknown
  Obtained from environmental sample
  misc_feature (1)..(329): Xaa is any amino acid
MDTGSADIDSLDAESAVSDSAESVTVTDEQPDLSVDALDENIEIDFDAIKDHDHDELEALRENGATPVTFPPEDTSYLEEDDHINLDLSEAVIDEPELSTEGIDEPPITEPSLDIDSLDDLNISIDDSDVPSADVPSEEASSIDDSSSIDDVDIDVAMPLGDVKDDGQDLSLDNGFQSGGEISIDDQMPEGFEDELQDASVPLEEAADTSDLMSSDLTSVEEAEPAEITAPDESAEDIDKIEDIGEIDDIGGIADIDEIPVEAESAPPSTAEQKTGNFQIPSDLKKELKNILGYMDQLLESLPEEKIEEFAKSEYFDSYKKLFKDLGLV

SEQ ID NO: 54499 - DNA, 795 bp, Unknown
  Obtained from environmental sample
  misc_feature (1)..(795): n is a, c, g, or t
atggcgggctgccgcatcgcgttagatgattacggaaaagaagccagcaatattgacagactggcaaaacttcagcctgatattataaaaataaatatcgattatatccataactgcgaaacgtcttatcattatcgcgagtatttacgctctaccgcagtctttgccgatgctgtaggtatcgaagttctgcatgaaggagtagagactaagcgtcagcttgatgtttgtatttcctcaaagggaagattttatcaggggtttttacttgcccttcctcaaccctctatgatcaatcctgagactaacacatttgttttttctgaattaatcgcagccgcttataatggaatacagactactgtcgtcaatatggaaactttaagaaattccattgatgttcaaattgagcgttttttgaaagaaaacccgtttgataacgaaaaaacaaacgatgacgaatacctaaaaaaacttcttctggaattgccggaagtaatacgcgtttatatttgcaatagaaagggttttcagctttccgataatattgagaggcaatccggcaatattgtatgccgcgatttaaaaaataaaaattgggcgtggcgcggattttttcatgaaacaataaaagcttttatcagaggcagaaagacttgcctgtcaaatccgtaccgcgattttacaacaaaatacaagatatgtacctattgttacgcgataaccgatgatatatttttatttgctgatatgataaaagaaccggaaaaggtgaacgattatgccgctggatag

SEQ ID NO: 54500 - protein, 264 aa, Unknown
  Obtained from environmental sample
  misc_feature (1)..(264): Xaa is any amino acid
MAGCRIALDDYGKEASNIDRLAKLQPDIIKINIDYIHNCETSYHYREYLRSTAVFADAVGIEVLHEGVETKRQLDVCISSKGRFYQGFLLALPQPSMINPETNTFVFSELIAAAYNGIQTTVVNMETLRNSIDVQIERFLKENPFDNEKTNDDEYLKKLLLELPEVIRVYICNRKGFQLSDNIERQSGNIVCRDLKNKNWAWRGFFHETIKAFIRGRKTCLSNPYRDFTTKYKICTYCYAITDDIFLFADMIKEPEKVNDYAAG

SEQ ID NO: 54501 - DNA, 774 bp, Unknown
  Obtained from environmental sample
  misc_feature (1)..(774): n is a, c, g, or t
atgccgctggatagaacagtaagcaccgggatgccgggtttagaccaggccattgatatgcttaggcttggtgataatgtggtttggcaggtacaatccattgatgattaccttaaggttttgggaccttatatccggcaggcaaaaaaggacgagcgcaggcttgtttactttcgtttcggcaatcacgcgccattaatggcggataacgaaccttctgtcgtttataatcttgatacgtccgaaggctttgaattatttgccctgaaagtacatgacattatcgccagcgaggggcttaaggccttttacgtgttcgactgcctgagcgatttgctggaaagctggtgttccgacatgatggtaggcaattttttccgcataacctgtccttttttatttatacttgatactatcgcctattttgcccttatccgcggcgctcacacccacgacacgattgcccgcatacgcgaaaccactcaacttttgcttgatgtgtacaatgttgacgataaattttatattcatccgcttaaagtatgggaacgctattcgcccaccatgttttttccgcacttgatagacggcgacaaggccttctcaattacctccagcgcggatgccgcaactttgttttcacgcgtcagccgcggcggacacccaagagatcattggcatatcacgtttgatcacgcgcgttcatttttaacccgcgatgaaaaatctcaggaagaaatgaaaatgcttcttgccggctggattatcgggtag

SEQ ID NO: 54502 - protein, 257 aa, Unknown
  Obtained from environmental sample
  misc_feature (1)..(257): Xaa is any amino acid
MPLDRTVSTGMPGLDQAIDMLRLGDNVVWQVQSIDDYLKVLGPYIRQAKKDERRLVYFRFGNHAPLMADNEPSVVYNLDTSEGFELFALKVHDIIASEGLKAFYVFDCLSDLLESWCSDMMVGNFFRITCPFLFILDTIAYFALIRGAHTHDTIARIRETTQLLLDVYNVDDKFYIHPLKVWERYSPTMFFPHLIDGDKAFSITSSADAATLFSRVSRGGHPRDHWHITFDHARSFLTRDEKSQEEMKMLLAGWIIG

SEQ ID NO: 54503 - DNA, 885 bp, Unknown
  Obtained from environmental sample
  misc_feature (1)..(885): n is a, c, g, or t
atgcttcttgccagaaaaattcttgagaaggaagccggtgacgttatacgaaatcattgggaaccgcatgattcatattacttgggttctgatattttttatacttacattgtgcataacgggttgtgggatttacggataaaacaaaaaactacggaaggttattttaccgtagctaaggaactgcaggaaaagatgcggcagggcaaattcccggataatatcagggagcagtttatacagatgctggaacattttgggcaagcgcccattattgtccgttcaagttccctgcgtgaggataatttcggcaatgcgtttgcgggtaagtacgaaagcgtcttctgcgccaatcagggtacgccggaagagcgttatgcggcatttgagcaggctgtccgcactgtctacgcaagcaccatgaacgacgatgcgcttgcttacaggcagcgccgagggcttaccaatcaggacgagcagatggcgatacttgttcagcgtgtttcaggcaaccattacgatgagctgtttttcccgcatattgcaggcgtcgggaattctattaatttatatgtgtgggacaaatcaatgaatcctgaagccggtatgctgcgtattgtattcggacttggaacccgcgctgttgaccgcgtttcaggcgattacgcgaaaatagttcctttggattgccctaacaagggaccgcctgtaaactacggcgatgaaaagaaattttctcagcataaagccgatgttcttgacctgctaaacaataaattgacagaagtacctttggagaaacttgcagacggcgatttgaaaaccgacaaagatattttttttacaacagatactcaggcgaataaccgtatgcggggaacttaa

SEQ ID NO: 54504 - protein, 294 aa, Unknown
  Obtained from environmental sample
  misc_feature (1)..(294): Xaa is any amino acid
MLLARKILEKEAGDVIRNHWEPHDSYYLGSDIFYTYIVHNGLWDLRIKQKTTEGYFTVAKELQEKMRQGKFPDNIREQFIQMLEHFGQAPIIVRSSSLREDNFGNAFAGKYESVFCANQGTPEERYAAFEQAVRTVYASTMNDDALAYRQRRGLTNQDEQMAILVQRVSGNHYDELFFPHIAGVGNSINLYVWDKSMNPEAGMLRIVFGLGTRAVDRVSGDYAKIVPLDCPNKGPPVNYGDEKKFSQHKADVLDLLNNKLTEVPLEKLADGDLKTDKDIFFTTDTQANNRMRGT

SEQ ID NO: 54505 - DNA, 396 bp, Unknown
  Obtained from environmental sample
  misc_feature (1)..(396): n is a, c, g, or t
ttgctatttgtgggcataccagaaattctggtgaatatttttgtccctcatatcatacccccagaatggtccgaatcaaaagctcttgctgtaaatatgattcgcctagcagcgatttatgttacagttgaaaccgttatggttatttatgccggagcactgcgaggcacaggagacacattagcggttatgtgcatatctagcggattgcattggttattaaccattaccgcctgggtattttttaatattttaaaaattggagttatagagacttgggctttaaccgtgcttatatggactctatttcctctatttttgtatttgcggtggagaggcgaaaagtggagaaaagcttgggaggtagctgaacatattcgaagctactcctcataa

SEQ ID NO: 54506 - protein, 131 aa, Unknown
  Obtained from environmental sample
  misc_feature (1)..(131): Xaa is any amino acid
MLFVGIPEILVNIFVPHIIPPEWSESKALAVNMIRLAAIYVTVETVMVIYAGALRGTGDTLAVMCISSGLHWLLTITAWVFFNILKIGVIETWALTVLIWTLFPLFLYLRWRGEKWRKAWEVAEHIRSYSS

SEQ ID NO: 54507 - DNA, 966 bp, Unknown
  Obtained from environmental sample
  misc_feature (1)..(966): n is a, c, g, or t
gtgaagatcgtcatattggacggctatcctgaaaaccccggcgatttaagctgggcagagtttgaaaaattcggcgagcttaaagtctatgaccggacttctttaactgaccccaaagaatccatcgcgagaattggagatgcggaggcggtgtttacaaataagaccccgctaactgcggaagtattcaacgcctgcccctcgataaaattcgtcggtgtgcttgccacaggttacaatgtagtggatgtgaatgccgccagggcaaagggcattccggtctgcaatattcctacctatggaaccgcggctgtgggccagtttgccatcgccctgcttctggaaatctgccaccacatcgggcatcacgacaaggcagtccacgagggcaggtgggaaaacaacgtagactggtgtttctgggactaccccctgattgaactcgcaggaaaaactatcggcatcatcggctttggccgcatcgggcagacaaccggcgcgatagcaaaagctctgagcatgaaggtcattgcctttgacagcactcccactgacagcggcaagcagatagcggagtatgttagcctcgacaagcttttcgccgagtccgatgtaatcgcgctccactgccccttgttccccgaaacccagggcataataaacaaggccaacatcgccaggatgaaagacggcgtaataattctgaataattcacgcggacccctggtagtggaacaagacctggccgatgcccttaacagcggcaaggtatacgcggcgggcctcgatgtcgtttcctcagaaccaataaagggaaacaaccccttgctcaaagcgaaaaactgctttattaccccgcacatttcctgggccccaaaagaaagccgccagaggcttatggatatagccgtaggtaatctggctgccttcgttaagggcagtccgataaatgtagtaaacaagtaa

SEQ ID NO: 54508 - protein, 321 aa, Unknown
  Obtained from environmental sample
  DOMAIN (3)...(320): D-isomer specific 2-hydroxyacid dehydrogenase, catalytic domain
  misc_feature (1)..(321): Xaa is any amino acid
MKIVILDGYPENPGDLSWAEFEKFGELKVYDRTSLTDPKESIARIGDAEAVFTNKTPLTAEVFNACPSIKFVGVLATGYNVVDVNAARAKGIPVCNIPTYGTAAVGQFAIALLLEICHHIGHHDKAVHEGRWENNVDWCFWDYPLIELAGKTIGIIGFGRIGQTTGAIAKALSMKVIAFDSTPTDSGKQIAEYVSLDKLFAESDVIALHCPLFPETQGIINKANIARMKDGVIILNNSRGPLVVEQDLADALNSGKVYAAGLDVVSSEPIKGNNPLLKAKNCFITPHISWAPKESRQRLMDIAVGNLAAFVKGSPINVVNK

SEQ ID NO: 54509 - DNA, 444 bp, Unknown
  Obtained from environmental sample
  misc_feature (1)..(444): n is a, c, g, or t
gtggaatatataaactggtcagaaaaaaagatacctgttgcaggcagttatgatcttttcatcgcgggcggcggatgcgccggggtaggcgcggctatcgcggcggggcgttcgggaataaaaaccttcgcggctgaacggatgtttgcgttaggcggaaccatgaccaacgccctgatgagcaaaatcgcgatttcctcctgcaatcacgggattgccgaagagtttatcaaacgcctggacgcttatcaaaaatcaaacttccttgcctcgcgtcacgaggttccggttgatcctgagctatgcaagtggatgctggacaggatggttattgatgaagcgggaacggaagttcgattcgggacgacgatctgcgatgtaattgccaataaccgtaagattgaatacgtgatcattgacagcatcaacggtttgaggctgtaa

SEQ ID NO: 54510 - protein, 147 aa, Unknown
  Obtained from environmental sample
  misc_feature (1)..(147): Xaa is any amino acid
MEYINWSEKKIPVAGSYDLFIAGGGCAGVGAAIAAGRSGIKTFAAERMFALGGTMTNALMSKIAISSCNHGIAEEFIKRLDAYQKSNFLASRHEVPVDPELCKWMLDRMVIDEAGTEVRFGTTICDVIANNRKIEYVIIDSINGLRL

SEQ ID NO: 54511 - DNA, 864 bp, Unknown
  Obtained from environmental sample
  misc_feature (1)..(864): n is a, c, g, or t
ttggagtacgcccccctgggtctcgttgagcttgccgtgaaccttgtcccccgtcggctcgccttgggcttaggcggcgcggtcggcaggttgctttgtctattgggcgtctaccgtcgtatcgtccgaaagaactttgaccacgtcggtctctgggacaagggcaaagttgaccgaattatctctaagctttacaggaacatgggccgttacgccgtggacttcctccgacgcggccggctcccgccgtaccgtctgaacaggtacgtcatatacgcgaacgctcacgataggggcaagggcgttataattgtcttggcgcatttcggcaactgggagcttttggcctccatttgggggaggcagctgagcgacctgagcgtggtcgccaagcccatgggcaacccgcttgtggagggttggctgttcaagaagcggacggcgctcggggtcaagaccatctacacggacagcgcgttacgcggtatgcttgccgccctcaagaggaacggcgttacggccatactcatagaccaatatatgcgggacatgggcaccccggcgccctttttgggcaagattgcctacacggtgaggacggtggccggcttgatccgcagaatcggggcggccgccgtccccatgtacgctataatgaggaacgacgggacttacgacatagactttttcgaggccgagccgccgcctatgccggaggaggacgggggcggggaggcggcgatagcggcgattcaggcgcagcacaacgatatactgtcgcagtgggtgacgaaacatccggagcactggttcgggtggttccataggcggtttagaggattcgtggactacaaaaacagttaa

SEQ ID NO: 54512 - protein, 287 aa, Unknown
  Obtained from environmental sample
  DOMAIN (2)...(280): Bacterial lipid A biosynthesis acyltransferase
  misc_feature (1)..(287): Xaa is any amino acid
MEYAPLGLVELAVNLVPRRLALGLGGAVGRLLCLLGVYRRIVRKNFDHVGLWDKGKVDRIISKLYRNMGRYAVDFLRRGRLPPYRLNRYVIYANAHDRGKGVIIVLAHFGNWELLASIWGRQLSDLSVVAKPMGNPLVEGWLFKKRTALGVKTIYTDSALRGMLAALKRNGVTAILIDQYMRDMGTPAPFLGKIAYTVRTVAGLIRRIGAAAVPMYAIMRNDGTYDIDFFEAEPPPMPEEDGGGEAAIAAIQAQHNDILSQWVTKHPEHWFGWFHRRFRGFVDYKNS

SEQ ID NO: 54513 - DNA, 936 bp, Unknown
  Obtained from environmental sample
  misc_feature (1)..(936): n is a, c, g, or t
gtggccgttcttccctgtatttgcttgatacaaacctgggaagaaaaccccaacgatatacgcggcataacctcgacgctttacggcggcgacaaggaaacccgtatacaacaggagattctcctgggtataggcggaattcgcgctctgcgcgccctggggattaaccccgccgctacccacatgaacgaaggtcatgcggctttccttgggcttgagcgcgtccgcgaagttatgactgaaaggaatttcacctttgaagaggcaagggaagcgatctggccgaccaatatctttaccacccatacgccggttccagccggtaatgagcgttttgacatcagcctggttgaaaaatatttccgctcctggccgcaggtcctcgggatatcctggaaggattttcttggccttggacggattaatgtcaacgatgacaaagaaactttctgccttaccgtgcttgccttaaagatggcggcttacgccaacggcgttgccaaattgcacggggttgtttcccgcgatatgtggcagggcctttggccgggagttccgataaaagaagtccccataggccatgttaccaacggcgtgcatccccgcacctggatttccagcggcatgatagagcttttggaccgctattttggcccccattttgagaacaagccgacagacctgtcgatttgggagcgcatgagcagaatcagcgatgaggagttatggcgtacccatgaacgccgccgtgaacggctggtggtctttgtccgtgaacgcatacgcgaacagtacaagcgcacgggcgcggtggaacgccgcatccagcaggcggaagacgccctttcgccctatgctcttaccctgtgttttgcccccccgcttgccacttacaacggggcaatttgctgctgcgcgatccggaacggcttttaa

SEQ ID NO: 54514 - protein, 311 aa, Unknown
  Obtained from environmental sample
  misc_feature (1)..(311): Xaa is any amino acid
MAVLPCICLIQTWEENPNDIRGITSTLYGGDKETRIQQEILLGIGGIRALRALGINPAATHMNEGHAAFLGLERVREVMTERNFTFEEAREAIWPTNIFTTHTPVPAGNERFDISLVEKYFRSWPQVLGISWKDFLGLGRINVNDDKETFCLTVLALKMAAYANGVAKLHGVVSRDMWQGLWPGVPIKEVPIGHVTNGVHPRTWISSGMIELLDRYFGPHFENKPTDLSIWERMSRISDEELWRTHERRRERLVVFVRERIREQYKRTGAVERRIQQAEDALSPYALTLCFAPPLATYNGAICCCAIRNGF

SEQ ID NO: 54515 - DNA, 954 bp, Unknown
  Obtained from environmental sample
  misc_feature (1)..(954): n is a, c, g, or t
gtgttttgcccccccgcttgccacttacaacggggcaatttgctgctgcgcgatccggaacggcttttaaaactggtaagggacaacgaccgtcccattcagcttattttcgccggcaaggcccacccacacgatatgccgggcaaggatcttatccgcgagatcgtccactttgccgaaaggtacgatgtcacaagccgaattgtgtttgtagagaattatgacatgaccgttgccaagtaccttacatccggcggcgacgtgtggttgaatacgccaaggcgcccaatggaagcgtcgggcaccagcggcatgaaggccgcgatgaacggcgtccttaactgttccatcctggacggctggtgggacgaggcttacaatccggaagtgggctgggccataggccacggcgagcagtatgccgatgagagactccaggacgatattgaaagcaaggccctgtacgatcttcttgaacgggatataatcccactcttttaccagcgcggcagggacggccttccccgcgaatggataaagaggatgaaggactgcatgcgccagatagggcattccatgtcctgccaccggatgttaatggattattccaacaactactatttccccgcgcttaaaaactaccgcaaactgataaaagatgaatatgccgacgcaaaatcccttgcggcgtattttggcaagctgcgtgactcctgggacagcctcagaatcgtaaagctcgaggccaataccaagccggtaatgcagcggggtgattcgctcaatgttacagcccacatcgatcttgggaaaatgtcgcctaacgatctcctggtggagttgtattacggcgcggtatcgaaccatagcaacgagattaccaatgcccacaggattgagatgaaatgggtcagcaacaaagacggcctgaacccagtaccatgtgcgggttga

SEQ ID NO: 54516 - protein, 317 aa, Unknown
  Obtained from environmental sample
  misc_feature (1)..(317): Xaa is any amino acid
MFCPPACHLQRGNLLLRDPERLLKLVRDNDRPIQLIFAGKAHPHDMPGKDLIREIVHFAERYDVTSRIVFVENYDMTVAKYLTSGGDVWLNTPRRPMEASGTSGMKAAMNGVLNCSILDGWWDEAYNPEVGWAIGHGEQYADERLQDDIESKALYDLLERDIIPLFYQRGRDGLPREWIKRMKDCMRQIGHSMSCHRMLMDYSNNYYFPALKNYRKLIKDEYADAKSLAAYFGKLRDSWDSLRIVKLEANTKPVMQRGDSLNVTAHIDLGKMSPNDLLVELYYGAVSNHSNEITNAHRIEMKWVSNKDGLNPVPCAG

SEQ ID NO: 54517 - DNA, 687 bp, Unknown
  Obtained from environmental sample
  misc_feature (1)..(687): n is a, c, g, or t
gtgtttccatctcaatcacccaagtcctcttacaggtactttgacattataatgacgttttttgtcgttgttcttgttctgagtaatatcgcttcgtcggcgaaaattgttgacctgtgtttttcggttttcgggatccgccttgcctttgacggcggtactttgctttttccgcttgcttatgtgctcggagacatactcacggaagtgtacggctttaaggccgccaagcgggttatttggacaggctttgcggtactggcgttttcagcgctggtgttttttgtcctgaagatacttcccggcgagagttcctgggaagccgaaacgggctccgccgcgtacaacgccattcttggcgggatgagctcaggcggcattgtcctcgcaagcctcgcgggatacctggttggagaattgtccaattcagcgtcactttcaaagatcaaggttttaacgaaggggcgctggctttggttcagggccatggtttccagccttatcggcgaactcctggacagtttaatttttgtgtttattgcctgtcttatgggagtttttggctggaacctttttcttagccttgcgctgaccaactatatcntgaaatgcctcatcgaagcgctggtactgccgcttacatatacagtggtaaggatgttgaagaaaggcgaggggttagaataa

SEQ ID NO: 54518 - protein, 228 aa, Unknown
  Obtained from environmental sample
  DOMAIN (43)...(204): Uncharacterized ACR, YhhQ family COG1738
  misc_feature (1)..(228): Xaa is any amino acid
MFPSQSPKSSYRYFDIIMTFFVVVLVLSNIASSAKIVDLCFSVFGIRLAFDGGTLLFPLAYVLGDILTEVYGFKAAKRVIWTGFAVLAFSALVFFVLKILPGESSWEAETGSAAYNAILGGMSSGGIVLASLAGYLVGELSNSASLSKIKVLTKGRWLWFRAMVSSLIGELLDSLIFVFIACLMGVFGWNLFLSLALTNYIXKCLIEALVLPLTYTVVRMLKKGEGLE

SEQ ID NO: 54519 - DNA, 654 bp, Unknown
  Obtained from environmental sample
  misc_feature (1)..(654): n is a, c, g, or t
gtgaaaaaagccgatctggaaaaggaaaaccttgccgctctggaagcgggtcttccgaatctgcttcagcatatcgagaacatcaccggggtgtacaagctgccggcggtagttgcgattaacgctttcccaaaggatacaaaggcagagcttgaccttgtcgaggcaaagtgcagggccctgggcgtaaacgtcgccctttccgaagtttgggcaaaaggcggcgaaggcggggaacagcttgcgcgggaggttgtgcgtctctgcgaacagccaaacagttttgaattcgcctacgacattaacctgccggtgcgggaaaaaatcgaagccattgcccgaaagatttaccatgcggacggcgtcacgattcttcccaatgcgcaaaaacaaattgaacagattgaaaagctcggtttagacaaggttccgatctgcatagcgaaaacccagtacagcttttccgatgacccttcccttttgggagcgccaaggggctggacgctaaccgtgcggaacatcaaaatctcggccggcgcgggttttatcgtcgcccttaccggtgaaataatgaccatgcccggcctgcctccggttcccgccgccgaaagaatagacgtggacagcagcggtaaaatttcaggcttattctaa

SEQ ID NO: 54520 - protein, 217 aa, Unknown
  Obtained from environmental sample
  DOMAIN (1)...(217): Formate--tetrahydrofolate ligase
  misc_feature (1)..(217): Xaa is any amino acid
MKKADLEKENLAALEAGLPNLLQHIENITGVYKLPAVVAINAFPKDTKAELDLVEAKCRALGVNVALSEVWAKGGEGGEQLAREVVRLCEQPNSFEFAYDINLPVREKIEAIARKIYHADGVTILPNAQKQIEQIEKLGLDKVPICIAKTQYSFSDDPSLLGAPRGWTLTVRNIKISAGAGFIVALTGEIMTMPGLPPVPAAERIDVDSSGKISGLF

SEQ ID NO: 54521 - DNA, 621 bp, Unknown
  Obtained from environmental sample
  misc_feature (1)..(621): n is a, c, g, or t
atgggagacgaaaagaaatttgttattctggtagacgataaccccacaaatcttaaaattggcaaacatgttctgtccgaaaaatacagggtcgccacttatccttcggcggaaaaattgttaagcgctttggaaaacaaccatcccgcgataatccttcttgatattgatatgccggaaatgaacggttatgaggcaattaaaatactcaagtcaaaaccggaaactaaaaatattcccgttatctttcttacaggaaaaacagaatctgacgatgaactggaagggctttccctgggcgcgattgactatatcaccaaaccgttcaatcccgcgcttcttctgaaacgcattgaagtacacctgctggttgaagaacagcggaagacgctggaaaaacaggcctcggatcttcaatacttcaacaataacctccgcagggcattctcaacatatttatcggaagacgtggtagaagaaattatttccgaccctacccgcctccagcttggcggaataaaacgcaaaatgacggcgttatttaccgatattaaaggctttaccggcattgcggagactcttgcccctgaaaagcttgtggatcttcttaactattattaa

SEQ ID NO: 54522 - protein, 206 aa, Unknown
  Obtained from environmental sample
  DOMAIN (6)...(119): Response regulator receiver domain
  misc_feature (1)..(206): Xaa is any amino acid
MGDEKKFVILVDDNPTNLKIGKHVLSEKYRVATYPSAEKLLSALENNHPAIILLDIDMPEMNGYEAIKILKSKPETKNIPVIFLTGKTESDDELEGLSLGAIDYITKPFNPALLLKRIEVHLLVEEQRKTLEKQASDLQYFNNNLRRAFSTYLSEDVVEEIISDPTRLQLGGIKRKMTALFTDIKGFTGIAETLAPEKLVDLLNYY

SEQ ID NO: 54523 - DNA, 1695 bp, Unknown
  Obtained from environmental sample
  misc_feature (1)..(1695): n is a, c, g, or t
atgatcagatcggccgagcggttatattatccgaagcgaataggggaaaaacctttgcgcttttttacaaatatagacagcgccattcccaacggccttatcggagacgaaatacggcttaggcaaattatacttaacctccttaccaacgctgtaaagtacacggataaagggcatttcagtttgtccattacgattgacaagcggacggaaaaacaaatatggcttaagatctccgttacagacacaggcaagggaattaaacctgaagacaaggaaaaacttttcggggattttgttcaggtagacacaaagaagaaccgcggcatagaggggaccggccttgggcttgccatcacaagacggctctgtattgttatgggcggaaacatcaccgtggaaagcgaatacggcaaaggcagcgtgttcacggcggttattcctcaggatattgattccagcgttcccttcgcatcggtgcatgaaccggagaaaaagaaagtgctggtttacgaaagcagggtagtctacgccaaatctgtgtgctggtctttggaaaatatgcgtgtcccgtataaaatggtaacaaatccggaagattttaccttggctctgcaaaaggaagaatggttctttgtgttttccggatacggcctttatgaaaaaattaaaacaataatggacagcgcggtctacccgaacgggaaaaagccgcctcttgcccttatggttgagttagggaatgagtcttacattccgaacgtgcactttgtctcactgcctatacagtgcctgtctattgccaacacattaaacggaggcgccgacagcaggagttatgttgacagcaacagaaccggcggtacaatccggtatacattcccaagcgctcggatattagtggcggatgacatttccacaaacctcaaagtagcattaggcttgctttccccctacaaggttgaagttgacacctgcttaaacgggcttcaagccatagaacatgtgaagcgctcagttgaagagaaacgcaaatacgatatagttttcatggatcacatgatgccggaaatggacggtatagaggcaaccgccgcgataagaaaatttgaaactgagaatgaggactcctcaggagagagcgggaagaaaatacctataatagcgcttacagctaacgcggttgtgggaatgcgggaaatgtttgtggaaaaaggttttaatgattttctcgccaaacctatagatatcaataaactggatgaaatgttaagcctgtggataccgaaagaaaaacgggaatcggcggcggtaaacaagaaacaggaaaagccggaagccgtaaagaaatatgttatccttgttgacgataatccggcgaatttaaaactgggaaaaaatattctgtcggaaaaattcagagttgccactttcccttcggcggaaaaattgttcggcgttctggaaaacaaccatccggctgtaattcttctggatattgatatgccgcaaatgaacggttatgacgcgcttaaagaacttaaatcgaaaccggaaacaaaagacattccggtaatattaatcgcggaagagggtggttcgccggacaaagaaaaaggtcttggggcggcggactatgtttccaagccatttgatccgcagacgctgatcgcctgcatagaaaaacattcctga

SEQ ID NO: 54524 - protein, 564 aa, Unknown
  Obtained from environmental sample
  DOMAIN (35)...(150): Histidine kinase-, DNA gyrase B-, and HSP90-like ATPase
  misc_feature (1)..(564): Xaa is any amino acid
MIRSAERLYYPKRIGEKPLRFFTNIDSAIPNGLIGDEIRLRQIILNLLTNAVKYTDKGHFSLSITIDKRTEKQIWLKISVTDTGKGIKPEDKEKLFGDFVQVDTKKNRGIEGTGLGLAITRRLCIVMGGNITVESEYGKGSVFTAVIPQDIDSSVPFASVHEPEKKKVLVYESRVVYAKSVCWSLENMRVPYKMVTNPEDFTLALQKEEWFFVFSGYGLYEKIKTIMDSAVYPNGKKPPLALMVELGNESYIPNVHFVSLPIQCLSIANTLNGGADSRSYVDSNRTGGTIRYTFPSARILVADDISTNLKVALGLLSPYKVEVDTCLNGLQAIEHVKRSVEEKRKYDIVFMDHMMPEMDGIEATAAIRKFETENEDSSGESGKKIPIIALTANAVVGMREMFVEKGFNDFLAKPIDINKLDEMLSLWIPKEKRESAAVNKKQEKPEAVKKYVILVDDNPANLKLGKNILSEKFRVATFPSAEKLFGVLENNHPAVILLDIDMPQMNGYDALKELKSKPETKDIPVILIAEEGGSPDKEKGLGAADYVSKPFDPQTLIACIEKHS

SEQ ID NO: 54525 - DNA, 1266 bp, Unknown
  Obtained from environmental sample
  misc_feature (1)..(1266): n is a, c, g, or t
atgaaatggattgtccttgttgcggccgtgctgatgtacggatttatcattgtttttccggatcggaaatcgtgggcctcgctgggcgcggcggtttttatgctgataatacgggcacttagccctatcgaagcgttaggacaaatcaactggatagtgcttatgatatttgtgggcagtctggttttggccgacctctttatttactcgcgggttccggcggccattgccgattccatagtacttcattcgccaaacgtaggcttcgcaatcgtggcggttttaatcatgacggggataatttcggcttttgtagagaatgtcgccaccgtgctggtcatggcccccattgccctggccttctgccagaaactcaaactatccccaaaaatgtttatggttggccttgcggtgatggcaaacctccagggcacggcaacacttgtaggcgatccgccctcgatgatctttgccgattactccggctttaatttcaataactttttcttttatgacggcaggccgtcaattttctttgcggttcaaatcggcatgatcgccggagcgttgtttttttactgcttttttgcaaaggcgggaaaggaaaaggctcaaattgaaaaggagaaaattctctctatcgttccttccattttattgatacttatgatcgtggggcttgccgcgttctcgtttatatttaacgggcttaccctggcttcgggtattctggttattgtgttgggcatattcggtttaatttggttcgctccccgggagggaactgccaaatcatggaagatgatgaaagaacttgactgggacacggtgttgttccttgtagggatttttgtagttataggcgcggtcgcccagacgggcctcctggaagatttcgcggttttcttgtcgcgtataatcggcagcaatgtactcctgggctttctgctgatcatcgcggtttccatatttatttcaggctttgttgacaatgtgccttacatcatcgctatgctgcccgttgcggcaactttggcaagggagctttccctaaagccggaactctacatgtttgccctgctgatcggctcctgtcttggaggaaaccttactccattcggcgcttcggcaaacgtggtcgcggtgggcatactccgcaagcaggatgtttcgatgagtttcggccagtggctgaaaatcggcattccttttaccttaatcaccacggcggcctccgcggtcttcctatggctggtgtggcggtag

SEQ ID NO: 54526 - protein, 421 aa, Unknown
  Obtained from environmental sample
  DOMAIN (2)...(421): Sodium:sulfate symporter transmembrane region
  misc_feature (1)..(421): Xaa is any amino acid
MKWIVLVAAVLMYGFIIVFPDRKSWASLGAAVFMLIIRALSPIEALGQINWIVLMIFVGSLVLADLFIYSRVPAAIADSIVLHSPNVGFAIVAVLIMTGIISAFVENVATVLVMAPIALAFCQKLKLSPKMFMVGLAVMANLQGTATLVGDPPSMIFADYSGFNFNNFFFYDGRPSIFFAVQIGMIAGALFFYCFFAKAGKEKAQIEKEKILSIVPSILLILMIVGLAAFSFIFNGLTLASGILVIVLGIFGLIWFAPREGTAKSWKMMKELDWDTVLFLVGIFVVIGAVAQTGLLEDFAVFLSRIIGSNVLLGFLLIIAVSIFISGFVDNVPYIIAMLPVAATLARELSLKPELYMFALLIGSCLGGNLTPFGASANVVAVGILRKQDVSMSFGQWLKIGIPFTLITTAASAVFLWLVWR

SEQ ID NO: 54527 - DNA, 1371 bp, Unknown
  Obtained from environmental sample
  misc_feature (1)..(1371): n is a, c, g, or t
atgaaagactacccgccagctatcaacgatcccgctttggacagattcagccgcctggccgccctggagtccctggcgacggaagctccaaaagacatcttccgcgatttcgatcgagcttctgcagagataaacaaccacattcacacgatttatagtttcagcccctacagcccaagcatggcggctctgcttgcaaggaacgcggggcttggcgcagcgggttcggtggatcacgattcaatcgccgctgctgaggagatgcttgcagcctgcgcgattttgggcattggaggctgcataggtgcggagattcgcgtcagcttcagaaccggcatggacggaaaacccggcgccttcgcttccagaaagctcaacaaccccgattcagccggttacgcttacacgaccatacagggcgttccaaagcagtcgattcaaaagatggcggactttctatcgccagtcagggcggaacggctcaagcggactcaggcaatggcagtgtcggctaacgccctgctgtcggaggcgggtttttccgtgattgattttgaaagcgatattatcgcaaagtcaaagtacaacgaaggagggggaatcaccgagcggcacttgctggcagcgatggcggaaaagataatcattaaattcggaaaggggcctagcctcgccgaagggctgaagcaaaaactggggatggatatttcgccaaagttagcagccttgctttccgatcccgataacccgcattacctttacgatcttttaggtgtcttgaaagccgaattactgccaggaatatacattcagccagatgaaaaagaatgcattcccgcggcggaggcaacagcttttgccggagcaatcgccgccattcctgcctatgcgtatcttggcgacgtgggcgaatcccccacaggcgacaaaaaagcggaaaaattcgaggacgaatacctggatgagcttttcgcggaaatctcccggcttggctacaaggcgtttgcctatatgcctccccgtaacactcccgagcagctcgccagggtaaggaagctttctaccgaatggggcttcatggaaatttccggagtagacatcaacagttcccgccagtcctttaactgtcctgaggtgctcagggacgattcccgccatcttttggataccacctgggctctgattgcccacgaaaggcttgcgtcggtagatgaacgctacgggcttttttcggataaaaaccctgtcgcttccatgagcctctcagaaaggctagctttctacgccggtttggggaaaaagcttaaccttcatcatcccgatgaatccgccgctatgttggctaataaagtagaaaaaggtggtacttaa

SEQ ID NO: 54528 - protein, 456 aa, Unknown
  Obtained from environmental sample
  misc_feature (1)..(456): Xaa is any amino acid
MKDYPPAINDPALDRFSRLAALESLATEAPKDIFRDFDRASAEINNHIHTIYSFSPYSPSMAALLARNAGLGAAGSVDHDSIAAAEEMLAACAILGIGGCIGAEIRVSFRTGMDGKPGAFASRKLNNPDSAGYAYTTIQGVPKQSIQKMADFLSPVRAERLKRTQAMAVSANALLSEAGFSVIDFESDIIAKSKYNEGGGITERHLLAAMAEKIIIKFGKGPSLAEGLKQKLGMDISPKLAALLSDPDNPHYLYDLLGVLKAELLPGIYIQPDEKECIPAAEATAFAGAIAAIPAYAYLGDVGESPTGDKKAEKFEDEYLDELFAEISRLGYKAFAYMPPRNTPEQLARVRKLSTEWGFMEISGVDINSSRQSFNCPEVLRDDSRHLLDTTWALIAHERLASVDERYGLFSDKNPVASMSLSERLAFYAGLGKKLNLHHPDESAAMLANKVEKGGT

SEQ ID NO: 54529 - DNA, 921 bp, Unknown
  Obtained from environmental sample
  misc_feature (1)..(921): n is a, c, g, or t
ttgggttctatggcggataatgtaaataacgtatattctatgcgggcgggctggttagggtaccagcgggacatcggggtcgaaagtctcgttttcggtcacgaatcggcggtcggggagattttggcgggcggcgggaggccgcggtctagcccaaaggcctccgtcggcgggtcgggcggcggcgttgttgacggcgggggcggcagggtggccgcgcaacggccgcaagtagccgaaaaaccgcctgcctacggagggtcggcgctctctaaattggccgccaagatgaagcccattgacgagcttgacgtcggaatgttggagaggaagaagccggcggcgcccgtaagggttgattcggtgaggcgtgagaggcttgccggactctaccgcgaggttatggggtgcgaaaagtgtcccatgtcgtcgagcagggccaaggtcgtcttcggggcgggcagcgccgacgggcggctctttgtgctgggcgacgcgccgagcgccgccgacgacggcgctgggttgcctttccaaggcgagaccggcgccctcttagacagcatactgggcaagatgaggatagacaggaagagcggcatcttcgcgacgtatcttcaaaagtgcaagagcgccgacgcggagtttgtacgagggtgcgccgaggtgtgccggtcgattttggacaggcagatagcgataatcgaaccaaaggcgtttctcgttttcggggagtcggcggcgggcgctctcttgggggacggcgcgggggatattgagcggatgcgcttgggtgatcattcgtacatgggggcgccgcttgtggcgacgtatggattgccgcttatggtcaaggatacgtcgcttaggcggggcgcttggaaggatatagagagagttttgaatattataagagggtag

SEQ ID NO: 54530 - protein, 306 aa, Unknown
  Obtained from environmental sample
  DOMAIN (151)...(306): Uracil DNA glycosylase superfamily
  misc_feature (1)..(306): Xaa is any amino acid
MGSMADNVNNVYSMRAGWLGYQRDIGVESLVFGHESAVGEILAGGGRPRSSPKASVGGSGGGVVDGGGGRVAAQRPQVAEKPPAYGGSALSKLAAKMKPIDELDVGMLERKKPAAPVRVDSVRRERLAGLYREVMGCEKCPMSSSRAKVVFGAGSADGRLFVLGDAPSAADDGAGLPFQGETGALLDSILGKMRIDRKSGIFATYLQKCKSADAEFVRGCAEVCRSILDRQIAIIEPKAFLVFGESAAGALLGDGAGDIERMRLGDHSYMGAPLVATYGLPLMVKDTSLRRGAWKDIERVLNIIRG

SEQ ID NO: 54531 - DNA, 933 bp, Unknown
  Obtained from environmental sample
  misc_feature (1)..(933): n is a, c, g, or t
ttgatgttaattgatccttcgctgacgtcccggctacttgccggtgacaaacgggcctgtgcccgccttatatctatagtagaaaacgaaagccccggatatctggacgcgcttaaagccgtatatccacgttcaggtggagcgtatgtcatcggcgttacagggccgcccggttccgggaaatccacattgactgacaagctggcaaagacgctcgcagacaggggcgagaaaatcggtgtcatcgcaacagacccgacaagcccgttcacaaagggcgcgatacttggggatcgcatacgcatgggcggcgtgtcagaaaacaaaaacgtgttcatccgctccatgggcgcgcgctgccatttgggcggcctttccaaagcaacagcaaacgccctggtcatcctttccgcttatggctgcacttatatttttgttgagaccgtcggggtgggccaatcggaaatcgacatcgtgcgatgcgccgacaccacgatgattgtgctggcaccaggacttggcgacgatattcaggcaataaaagcgggggtgatggaaatcggcgacctttttgccgtgaacaaagctgacagggaaggcgcggaaaggactctgctggaaacaaaggccatgctggattttaaaaccgactgggacttcaagcctcccgtctgtctgaccgtggcggaaaccggcgaaggggtggataccctcttggagaatattttcaaccataagaattatatgctaaattccggaaaactcgccgaaaagcgcgagcgcagaaaagccaccaaggtcagggacatcgtaagggacactctggatcggcgcatagaagagctgataacatcatatccggacgttacggacgaagaaaaaaacgacccttattcgttggcggaagatattatcaatcgaatggaattttaa

SEQ ID NO: 54532 - protein, 310 aa, Unknown
  Obtained from environmental sample
  DOMAIN (51)...(230): CobQ/CobB/MinD/ParA nucleotide binding domain
  misc_feature (1)..(310): Xaa is any amino acid
MMLIDPSLTSRLLAGDKRACARLISIVENESPGYLDALKAVYPRSGGAYVIGVTGPPGSGKSTLTDKLAKTLADRGEKIGVIATDPTSPFTKGAILGDRIRMGGVSENKNVFIRSMGARCHLGGLSKATANALVILSAYGCTYIFVETVGVGQSEIDIVRCADTTMIVLAPGLGDDIQAIKAGVMEIGDLFAVNKADREGAERTLLETKAMLDFKTDWDFKPPVCLTVAETGEGVDTLLENIFNHKNYMLNSGKLAEKRERRKATKVRDIVRDTLDRRIEELITSYPDVTDEEKNDPYSLAEDIINRMEF

SEQ ID NO: 54533 - DNA, 405 bp, Unknown
  Obtained from environmental sample
  misc_feature (1)..(405): n is a, c, g, or t
atgagaccgatacgggttttggtagccaagcctgggcttgacgggcacgacaggggagccaaggttttagcgagggcgtttcgcgacgccggcatggaagttatttacacaggcctcaggcagacgccggaacaggtggttcaggctgctgtgcaggaagacgtggacgtggtggcgatgagcatcttgtcaggagcgcatatgcacctgatgcccagggttgtttcacttttaaaagaagagggcgtctatgacgaaacgctggtcataggcggcggcgttattccacaagaagatatcccccttcttaaagaacagggcgtgcaggaaattttcaccccgggaacaacaacaactcaagcaattgattatatacgcaataacttaaagcgagagcttgtttga

SEQ ID NO: 54534 - protein, 134 aa, Unknown
  Obtained from environmental sample
  DOMAIN (4)...(127): B12 binding domain
  misc_feature (1)..(134): Xaa is any amino acid
MRPIRVLVAKPGLDGHDRGAKVLARAFRDAGMEVIYTGLRQTPEQVVQAAVQEDVDVVAMSILSGAHMHLMPRVVSLLKEEGVYDETLVIGGGVIPQEDIPLLKEQGVQEIFTPGTTTTQAIDYIRNNLKRELV

SEQ ID NO: 54535 - DNA, 1617 bp, Unknown
  Obtained from environmental sample
  misc_feature (1)..(1617): n is a, c, g, or t
atggccgacggccgagttcaaatttccggaacaaaacagaaatatgaatttgataccggagtcgaggttaaaaggctctacacgccgcttgacctgccggattttgattacgaaagcagtctgggctacccgggacagtatccgtttacacgcggcgtccaacccacgatgtaccgaggcaagcattggacaatgcggatgtacgccggtttcgctaccgctgaagaatccaacaagcggtacaagtaccttatagagcagggttccatgggcctctcggtggcctttgaccttccgacgcagatgggctacgactctaccgactccatcgcgcaaggcgaagttggcaaggtcggtgtcgccatcgactctctggcggatatggagatcctctttgacggcataccgctagacaaagtttccacctccatgacaataaacgctccggctggcgttcttttggcaatgtacatagcggttgccgaaaagcagggcgtgtcccccgacaaacttcgaggcacgattcagaacgatattttaaaggagtacatagccaggggcacatatatttttccggtaaagccgtccatgcggcttattacaaatatttttgagtactgttcgaagaatgttccccaatggaacacgattagcatatccggctatcatatacgggaagctggctcaaccgccattcaggaagtggcctttacgctggctaacggcatcgcctatgtgcaggcagcggtggatgccgggcaggacgtggatgattttgggccaaggctttccttcttttttaactcccacaacaatctactggaagaggtagccaagttccgcgccgcaagacggctttgggccaaaatcatgcgggagcgttttggtgcgaaagaccccaagtcctggcagttgaagttccacacgcagacggcgggatgcacgctcaccgcgcagcagccggacaacaacatagtccgcgtggcgatacagacgctcgccgccgtgcttggcggaacccagtcgctccacaccaactcgcgcgatgaagcaatggccctgcccagcgagcagtcggtgatgatcgccctgcgtacccagcagatcgtcgcgaacgagagcggcgcggctgacagcgtggatccgcttgccggctcctactacgtggaatcgctgacggacaccatcgaaaaagaagccgcaaagctcatcgcccgcatagacgatctgggcggagcccccgccgcgattgacacaggctttatccaaaaggaaattatggacgcggcttacaagtaccagaaagcgattgaaagcggtgaaaagatcatagtaggccttaacaagtaccaggtaaaagaggaagcgccaaagggccttttaaaggtcgatccggcggcggaacagatgcagaaggaaagcgttcagcgacttaaggaaaagagggacaacgggagggtaaaagaggcgcttgaaaagctgggcgctgcctgtaagtcaagcgacaacgttatgcccttcattcttgaggcggtcaaagcttacgccaccctcggcgagatatgtaacgttatgcgcaatgtctttggcgaatacaagcagaatattattatctga

SEQ ID NO: 54536 - protein, 538 aa, Unknown
  Obtained from environmental sample
  DOMAIN (15)...(532): Methylmalonyl-CoA mutase
  misc_feature (1)..(538): Xaa is any amino acid
MADGRVQISGTKQKYEFDTGVEVKRLYTPLDLPDFDYESSLGYPGQYPFTRGVQPTMYRGKHWTMRMYAGFATAEESNKRYKYLIEQGSMGLSVAFDLPTQMGYDSTDSIAQGEVGKVGVAIDSLADMEILFDGIPLDKVSTSMTINAPAGVLLAMYIAVAEKQGVSPDKLRGTIQNDILKEYIARGTYIFPVKPSMRLITNIFEYCSKNVPQWNTISISGYHIREAGSTAIQEVAFTLANGIAYVQAAVDAGQDVDDFGPRLSFFFNSHNNLLEEVAKFRAARRLWAKIMRERFGAKDPKSWQLKFHTQTAGCTLTAQQPDNNIVRVAIQTLAAVLGGTQSLHTNSRDEAMALPSEQSVMIALRTQQIVANESGAADSVDPLAGSYYVESLTDTIEKEAAKLIARIDDLGGAPAAIDTGFIQKEIMDAAYKYQKAIESGEKIIVGLNKYQVKEEAPKGLLKVDPAAEQMQKESVQRLKEKRDNGRVKEALEKLGAACKSSDNVMPFILEAVKAYATLGEICNVMRNVFGEYKQNIII

SEQ ID NO: 54537 - DNA, 1740 bp, Unknown
  Obtained from environmental sample
  misc_feature (1)..(1740): n is a, c, g, or t
atggaaaagtccgctgttattgaacgcgccaaagattatatcgcaagggaaaaagacgcaaacttccgcgcggaagttgagaagcttctggaaaaggaagattttaaagagttggaagaccgcttttaccgcgaccttgaattcgggacgggagggttgcggggggtaatcggcggcggctataaccgcatgaacacccttgttgtaaaaagcgcaacgcaggggcttgcttcatatttaatcaaggcatttcccgataaagccgcgtccggcggattgaaagccgtaatcgcttttgacagccgtcattattccgccgaattttccgaagccgccgccctgatattggcggctaacggcatcaagacctatcttttctccgcgctcaggcctacgccggagctttcctttgctattcgccagcttggctgtgatacgggcattgttgttaccgccagccacaacccgccgcagtacaacggctacaaggcgtactggaacgacggctctcaggttatctccccgcatgatacgggtatcattgatgaggtaaacgccgtaaagacgataaaagaaatttcacggaaggaagcgctggacaaggggcttttggcaataatcgacaaagagatagacgagcagtatcaggcgatggtaaagtcccatcttttcaggccgcagcttataaaagaaaaggcgaaagaagtaaaaatcgtttacaccccgcttcacgggacaggcgcgtatcatgttgaaaaagtactgggcgatctcggcttaaaggtaataacggttccggaacagcgcgaaggaaacggggattttccgaccgtatctttccctaacccggaagaagccgccgcgcttgaaatggcgataaaacttggcattaaagaaaaagccgacgtagtaatggccacagaccccgacgccgaccgtttcggcgtagcccttcccggcgcggacggtaatttcgtgcttgttacgggaaatcagatgggcgtccttctcgccgactacattttcctgtcgcttaaagaactcgggaagcttccgaaaaacgccgcaatggtgaattcaatcgttaccacgggaatgcagaaaagagtagccgaatattacggcgccgaatgcgcggaatgccttaccggtttcaagtggattgccgatgttatgcgcaaatgggaacacggggaggcgggcggcaaaagttacgtcttcggaaccgaggaaagctacggttacaacatagaaaccgaagtccgcgacaaagacggagtgtcagccgccgcccttaccgccgagatgaccttatactggcgaagcaaaggaaaaagccttcttgaccgcctgaacgatctttatgcaatttgcggctactggcaggaaatcggtatttccaaatatttccagggaatagaaggcccggcaatcatggacggcataatggaagagtaccgcaaaaatccgcccaagactttaggcggcatagagataaaaagagtccgcgacataaagaacggcgcagacggtctgccgcccagcgacgtccttcaattcttcctcgtagacggcactgtagtaagcgcccgccccagcggcaccgaaccaaagattaaattttacgcctcatgctgcgccgagttaggctcaggcggccttgtggccgccaaagccgaagtccagcgcaaactggacgcaattaaaaaggatatccgcgcggttatggagataaaataa

SEQ ID NO: 54538 - protein, 579 aa, Unknown
  Obtained from environmental sample
  DOMAIN (329)...(454): Phosphoglucomutase/phosphomannomutase, alpha/beta/alpha domain III
  misc_feature (1)..(579): Xaa is any amino acid
MEKSAVIERAKDYIAREKDANFRAEVEKLLEKEDFKELEDRFYRDLEFGTGGLRGVIGGGYNRMNTLVVKSATQGLASYLIKAFPDKAASGGLKAVIAFDSRHYSAEFSEAAALILAANGIKTYLFSALRPTPELSFAIRQLGCDTGIVVTASHNPPQYNGYKAYWNDGSQVISPHDTGIIDEVNAVKTIKEISRKEALDKGLLAIIDKEIDEQYQAMVKSHLFRPQLIKEKAKEVKIVYTPLHGTGAYHVEKVLGDLGLKVITVPEQREGNGDFPTVSFPNPEEAAALEMAIKLGIKEKADVVMATDPDADRFGVALPGADGNFVLVTGNQMGVLLADYIFLSLKELGKLPKNAAMVNSIVTTGMQKRVAEYYGAECAECLTGFKWIADVMRKWEHGEAGGKSYVFGTEESYGYNIETEVRDKDGVSAAALTAEMTLYWRSKGKSLLDRLNDLYAICGYWQEIGISKYFQGIEGPAIMDGIMEEYRKNPPKTLGGIEIKRVRDIKNGADGLPPSDVLQFFLVDGTVVSARPSGTEPKIKFYASCCAELGSGGLVAAKAEVQRKLDAIKKDIRAVMEIK

SEQ ID NO: 54539 - DNA, 480 bp, Unknown
  Obtained from environmental sample
  misc_feature (1)..(480): n is a, c, g, or t
ttgcagtcaatacttgttccgttgttcctgatgataaacgcggtgaacctttacaatacacggctgggcgtattgattccatacatcggcatagggcttcctatgggggtttacctcagtacggaatatatcaaaagcattcccaactccctgatcgaatcggcccggctggacggcgcaaagtatctgcgtgttttcagcagcattatcatgccgatgtcggctcctgtagcagccacggtggcgattctggggataacgggaacatggaacgagttcatgctgataaatatcctggtatccaggaatgaaatgaaatccctgcccgtaggcgtaaatatgttttccggggccttgtcgtcggattacggcaaacagtttgccgccctggttatcggcatggcgccaatggtggttttttatctggttttcagaaaacggattaccaggggggtttccgccggagccgtaaaagattag

SEQ ID NO: 54540 - protein, 159 aa, Unknown
  Obtained from environmental sample
  misc_feature (1)..(159): Xaa is any amino acid
MQSILVPLFLMINAVNLYNTRLGVLIPYIGIGLPMGVYLSTEYIKSIPNSLIESARLDGAKYLRVFSSIIMPMSAPVAATVAILGITGTWNEFMLINILVSRNEMKSLPVGVNMFSGALSSDYGKQFAALVIGMAPMVVFYLVFRKRITRGVSAGAVKD

SEQ ID NO: 54541 - DNA, 867 bp, Unknown
  Obtained from environmental sample
  misc_feature (1)..(867): n is a, c, g, or t
ttggcgcggacagcctggatacttacgagcttgtatatgccattgaagaggcaatgggcgtttccattcccgatgaaaaagcaaacgaattcgaaacagtcaaggacgcctacgagtttattaagtcccagcaaaaatagcctgaacgggcttccgacgctggggccggaaagaaaaaaaaaattggcggcttttctgaaggccgccggaatcaggttcaagagcgttgagcttttgaacctgtcttttatacaccgctccgtatccaatgaaaccgccgcgggcgccttgaacaacgaacggcttgagtttctgggcgattccattctgggcgccgcctgttctaccctgttatacgaaaagtaccccgaaaaaaacgaaggcgatcttgcgaagataaaatccgtggtcgtctgcgaggatgtgctgtccattgtcgcaaggcttctgcagatcgataccatgctgctgctgggcaagggcgaggagcttacgggcggccgggaaaaaaaagccattcttgccgacactctggaagcccttatcggggcaatgtaccttgactcgggctacacgacggcttttaagtttataagccgttactttacccccgaaatcgaccgtgtcacggaaaaagactaccaccgcgattacaaatcgctgctgcaggaaatatgccagcacagttacggctcatacccccaataccatttgattaagcgttccggccccgaccacgagcgggtctactggatagaagtcagcgcaggaggcgtcgtgtacggccccggcacgggcaggaacaagaaaagcgccgagcaggaagccgcgagaatggcgtaccanaaatttaggatgaggaattag

SEQ ID NO: 54542 - protein, 288 aa, Unknown
  Obtained from environmental sample
  DOMAIN (218)...(284): Double-stranded RNA binding motif
  misc_feature (1)..(288): Xaa is any amino acid
MARTAWILTSLYMPLKRQWAFPFPMKKQTNSKQSRTPTSLLSPSKNSLNGLPTLGPERKKKLAAFLKAAGIRFKSVELLNLSFIHRSVSNETAAGALNNERLEFLGDSILGAACSTLLYEKYPEKNEGDLAKIKSVVVCEDVLSIVARLLQIDTMLLLGKGEELTGGREKKAILADTLEALIGAMYLDSGYTTAFKFISRYFTPEIDRVTEKDYHRDYKSLLQEICQHSYGSYPQYHLIKRSGPDHERVYWIEVSAGGVVYGPGTGRNKKSAEQEAARMAYXKFRMRN

SEQ ID NO: 54543 - DNA, 846 bp, Unknown
  Obtained from environmental sample
  misc_feature (1)..(846): n is a, c, g, or t
atgacaagaactttagatactgcagaacttatccctataatcgccgaacttgcgaagaaagcttgttacgaattgggcgatgatgtaatagacgctcttcgttatgcgcaaaacagggaggagtctccttacggaagggactgcctgagccagcttgtcgaaaacgccgaatacgcgaaaaaagaacaaatcgcctgctgccaggacacaggaacctgcaatgtcatcatggaaataggccaggaagtttcatggcaaggcatgccccttttagatgcggtcaacgagggagtgcgccggggctacgaggaaggataccttagaaaatccatggtggcggatccattcgacagggttaacacaggtgacaatacgccggcaatgctgcacacggagatagtgtctggcgacagggtgtcagtcaccgtcatgccaaaaggcggaggctgcgaaaacatgggggcgttttgcaccctgctgccctccgacggcgtacggggggtaaaggactttgtaatacaaaccgtagacagatctggcggcaaggcctgccctcccctgcttgttggcgtggggatcggcggcagcatggacaaatgcgtgtggctcgcaaaaaagtccctgctccgttcaataggcagtcgcagtcccaatcccttctactcaaacatggaaacagaactgctggaaaaaataaacggcctgggcataggccccatgggaacggggggcaggatcaccgccctggacgtgcatatcgaatactatccatgtcatataacggccctgcccgtggcggtcaacctccagtgccacgccgcccgcgtcgccagagcggagctataa

SEQ ID NO: 54544 - protein, 281 aa, Unknown
  Obtained from environmental sample
  DOMAIN (10)...(281): Fumarate hydratase (Fumerase)
  misc_feature (1)..(281): Xaa is any amino acid
MTRTLDTAELIPIIAELAKKACYELGDDVIDALRYAQNREESPYGRDCLSQLVENAEYAKKEQIACCQDTGTCNVIMEIGQEVSWQGMPLLDAVNEGVRRGYEEGYLRKSMVADPFDRVNTGDNTPAMLHTEIVSGDRVSVTVMPKGGGCENMGAFCTLLPSDGVRGVKDFVIQTVDRSGGKACPPLLVGVGIGGSMDKCVWLAKKSLLRSIGSRSPNPFYSNMETELLEKINGLGIGPMGTGGRITALDVHIEYYPCHITALPVAVNLQCHAARVARAEL

SEQ ID NO: 54545 - DNA, 936 bp, Unknown
  Obtained from environmental sample
  misc_feature (1)..(936): n is a, c, g, or t
ttgcaccctgctgccctccgacggcgtacggggggtaaaggactttgtaatacaaaccgtagacagatctggcggcaaggcctgccctcccctgcttgttggcgtggggatcggcggcagcatggacaaatgcgtgtggctcgcaaaaaagtccctgctccgttcaataggcagtcgcagtcccaatcccttctactcaaacatggaaacagaactgctggaaaaaataaacggcctgggcataggccccatgggaacggggggcaggatcaccgccctggacgtgcatatcgaatactatccatgtcatataacggccctgcccgtggcggtcaacctccagtgccacgccgcccgcgtcgccagagcggagctataatggaaacaaaagtattacaactaacaactccgttaaccaacgcggatattgccggactggaaatcggggatgtcgtcgagctgagcgggtttgtctacacggccagggacgccgcgcacaagcgcatggaaagcgcatggaagcggggattgcccctgccccttgaccttaagggacagcttgtcttttacgcgggcccctgccccgccaaaccgggacacgccgtgggttccatagcccccacgaccagtatgcgcatggacggctttgtcgagatgacttttgaactgggccttatcggcatgattggcaagggggatcgttccgacttcgttcccggcctctgcaaaaaatacggcggaatctacctcctcggcgtcgggggcgcttccgcgctgatctcaaaacaggttaaaagctgcgaagtggtcgcatgggaagatttgggaacggagtccgtcaagaaactggaagtcgaaaaattacgcctgattgtcgggatagattcccaagggcgtgtttttcaggacagggagatcgctaagtatcgtcgatga

SEQ ID NO: 54546 - protein, 311 aa, Unknown
  Obtained from environmental sample
  DOMAIN (105)...(307): Fumarase C-terminus
  misc_feature (1)..(311): Xaa is any amino acid
MHPAALRRRTGGKGLCNTNRRQIWRQGLPSPACWRGDRRQHGQMRVARKKVPAPFNRQSQSQSLLLKHGNRTAGKNKRPGHRPHGNGGQDHRPGRAYRILSMSYNGPARGGQPPVPRRPRRQSGAIMETKVLQLTTPLTNADIAGLEIGDVVELSGFVYTARDAAHKRMESAWKRGLPLPLDLKGQLVFYAGPCPAKPGHAVGSIAPTTSMRMDGFVEMTFELGLIGMIGKGDRSDFVPGLCKKYGGIYLLGVGGASALISKQVKSCEVVAWEDLGTESVKKLEVEKLRLIVGIDSQGRVFQDREIAKYRR

SEQ ID NO: 54547 - DNA, 882 bp, Unknown
  Obtained from environmental sample
  misc_feature (1)..(882): n is a, c, g, or t
atggaacaaggctttatcgacattctgaaacaactggtggaagagcaagtcaacgccgtaatgctggactcaaaacaatttaagtccgttttgactgactacactaaaaacgaatacaagaaagaaagccgctttcttatacaggcagtcgaggcaggtgtggcgaaagcgattaaggaaacggacaatcttcccgcttgcaagagagggaagatcagggaacttgtggaagattatgggctttcaccggaagtatcggcggcgatagttgacaccctcgctctggttctgcgtggggacacaagcaaaagcgaaactcaaaccgaaaccaaaacagaaaagccgcaagttgaaaaatcagccgcttctcagcctgcaccgaagctggagggaggctcgtataaaatcgaggttaatgtaagtttccgcgaccatcgtgggggcggaatgaaggttgagtgtataaatccgtttgctaaatctttctcttatgtttctgaaacagtaataaactgtaaagccaaacgttgtaatgtatatctgcaatccgcagccaaacctgttacgggtgttaccgcatggattggttttaccggcgacattgaaggccgccttctgcttactatgtccaaagaaaccgcgttatacgcggccagcgccatgaatggcgaaactcttacggtttttgatgatcttgtcaaagctacgattgaggagcttgtcaacatgaccgccggcgtagcgaagaacaaattaaatgaaatcggtataaaaattggctccataaccaagccgtccttttttgatgatggttatacagagaaggatgcaaatttggttgataaagacgcaatggtcatgccttttgaggtaacgaaatga

SEQ ID NO: 54548 - protein, 293 aa, Unknown
  Obtained from environmental sample
  misc_feature (1)..(293): Xaa is any amino acid
MEQGFIDILKQLVEEQVNAVMLDSKQFKSVLTDYTKNEYKKESRFLIQAVEAGVAKAIKETDNLPACKRGKIRELVEDYGLSPEVSAAIVDTLALVLRGDTSKSETQTETKTEKPQVEKSAASQPAPKLEGGSYKIEVNVSFRDHRGGGMKVECINPFAKSFSYVSETVINCKAKRCNVYLQSAAKPVTGVTAWIGFTGDIEGRLLLTMSKETALYAASAMNGETLTVFDDLVKATIEELVNMTAGVAKNKLNEIGIKIGSITKPSFFDDGYTEKDANLVDKDAMVMPFEVTK

SEQ ID NO: 54549 - DNA, 474 bp, Unknown
  Obtained from environmental sample
  misc_feature (1)..(474): n is a, c, g, or t
atgcgaataattccaatagcaagcggaaaaggtggcgtgggaaaatcacttgttgcagctaacttaggagtagcttttgcccaagcaggtcagcgtgtagtgcttgcggaccttgaccttggagcttcaaatctccacctggtacttggtcatcattcgccgcagatgggcatcgggacattcctcagcaataccaaatcagattttaccggcgtaattgcagacaccgatgtacggggtttacgttttattcccggagacaatgaaattcctggaactgcaaatcttaccattatacagagaaaaactcttgtaaaacagcttcttgcccttaaaaacgaaaccgacattctaatacttgatctaggcgcaggaacacatcagtctattctcgaatttttcctgctttcaaatcaaggaatcgtagtttcagctccggcagttacagcagttctcaacgcctatgtattttaa

SEQ ID NO: 54550 - protein, 157 aa, Unknown
  Obtained from environmental sample
  SIGNAL (1)...(27)
  DOMAIN (4)...(120): CobQ/CobB/MinD/ParA nucleotide binding domain
  misc_feature (1)..(157): Xaa is any amino acid
MRIIPIASGKGGVGKSLVAANLGVAFAQAGQRVVLADLDLGASNLHLVLGHHSPQMGIGTFLSNTKSDFTGVIADTDVRGLRFIPGDNEIPGTANLTIIQRKTLVKQLLALKNETDILILDLGAGTHQSILEFFLLSNQGIVVSAPAVTAVLNAYVF

SEQ ID NO: 54551 - DNA, 573 bp, Unknown
  Obtained from environmental sample
  misc_feature (1)..(573): n is a, c, g, or t
ttgagtaaagtaaaaagccgtaataaaaacggaaccggtacaaaacaacgcattgtctcagcgcttgtagaaaacagagcgggaaccctgagcagggtatccgggcttttcagcaggcggggttttaacattgacagtctgacagtcggcgaaactgaagattcttcagtttcaagaatgacaattgcggtaacaggagaagaatgcatacttgagcagattgtcaaacaacttgaaaaacttgttgatgtcatagctgtgaaggaacttgacggcgattcatgcctgcgccgcgagattatgcttgtaaaaatcggagcgaatgaagaaaatcgtcccgccgttcttgaaatagctgggattttccgcgctcgtgttgtagacgtttcacaaacgacaatcacaatagaagctacaggcaatatggaaaaattgaacggaatgcttttgcttctgcattcctacggcatccttgaacttgcgcgcacaggccttgtggcgcttgagcgcggtacaagggtgctttcggccgggtctgttgaaacgcttaaattgaaaaaaacggaacagtga

SEQ ID NO: 54552 - protein, 190 aa, Unknown
  Obtained from environmental sample
  DOMAIN (17)...(90): ACT domain
  misc_feature (1)..(190): Xaa is any amino acid
MSKVKSRNKNGTGTKQRIVSALVENRAGTLSRVSGLFSRRGFNIDSLTVGETEDSSVSRMTIAVTGEECILEQIVKQLEKLVDVIAVKELDGDSCLRREIMLVKIGANEENRPAVLEIAGIFRARVVDVSQTTITIEATGNMEKLNGMLLLLHSYGILELARTGLVALERGTRVLSAGSVETLKLKKTEQ

SEQ ID NO: 54553 - DNA, 300 bp, Unknown
  Obtained from environmental sample
  misc_feature (1)..(300): n is a, c, g, or t
gtgacagacattacccgtaaaataatagagcagatacttgctgttccgaagggtaaagtttcctgttaccgcgacatcgcttttaaagcaggacttccgaacggagcgcgtcagactgtaagggtgcttcattccatgtccgagaaattcaatctgccctggtacaggattatccgttccgacggcagtatcgctcttgccgaaggtgagggaagggaactgcagataaaacttctgcgcggcgaaggagtgaaagtttcagataacggaaaggttgattttaacaggtacggaatttga

SEQ ID NO: 54554 - protein, 99 aa, Unknown
  Obtained from environmental sample
  DOMAIN (1)...(87): 6-O-methylguanine DNA methyltransferase, DNA binding domain
  misc_feature (1)..(99): Xaa is any amino acid
MTDITRKIIEQILAVPKGKVSCYRDIAFKAGLPNGARQTVRVLHSMSEKFNLPWYRIIRSDGSIALAEGEGRELQIKLLRGEGVKVSDNGKVDFNRYGI

SEQ ID NO: 54555 - DNA, 759 bp, Unknown
  Obtained from environmental sample
  misc_feature (1)..(759): n is a, c, g, or t
atgaaaagccagtacggcattaccccctggggttcctggtttattgatgtgcttaacagctacggattggaaggccggctggacaggggcagaacntacgccaacaccggcaaggtgctttcgcttaagctggaagccggcagagccgtcgcgaaagtcaagggcaattaccgcccttcttacaaagttgaaataatttttccacccctaaaagaagcggaacttgtttataaaatgatagaggaagatccgcttttgcttgcccacattgcctctggcgagctgcctgaaactttcttgcaaaagctaaagcaaaaaaacatcagccttatcccgcggcactggcgcgaaatgaaaaagtcctgcacctgccctgacgaatacggcgacccctgcaagcatctggcggccctttattttattatcgcaagggagatagacacagacccccatttgcttttccggctcaggggaatggatctggctgcgcggttcggaaagttggcggttcagcggattttaccgcctttcacgatcagccatagcgtcagtgacaacggcaacattggcgaaaaagaaagcaccgcgcttactgtgcggccttctcccccgatactggaagaaattccaaactgcgtgaatctaattaccgcgctgcttccttccgctccggcgttttgcaaaagggacttcgccgttgttatggcggagttttaccatcgcacagcccattacaaagcctggaagcggcggaggtaa

SEQ ID NO: 54556 - protein, 252 aa, Unknown
  Obtained from environmental sample
  DOMAIN (114)...(143): SWIM zinc finger
  misc_feature (1)..(252): Xaa is any amino acid
MKSQYGITPWGSWFIDVLNSYGLEGRLDRGRTYANTGKVLSLKLEAGRAVAKVKGNYRPSYKVEIIFPPLKEAELVYKMIEEDPLLLAHIASGELPETFLQKLKQKNISLIPRHWREMKKSCTCPDEYGDPCKHLAALYFIIAREIDTDPHLLFRLRGMDLAARFGKLAVQRILPPFTISHSVSDNGNIGEKESTALTVRPSPPILEEIPNCVNLITALLPSAPAFCKRDFAVVMAEFYHRTAHYKAWKRRR

SEQ ID NO: 54557 - DNA, 1500 bp, Unknown
  Obtained from environmental sample
  misc_feature (1)..(1500): n is a, c, g, or t
atggaagctttaaggaatggcaaaccggcaccaggaatatgttcgctccctgacatgagtgcaatcgtccttgctaccattaacgcaaagtggattcatccttcgctcgcattaaggcttctaaaagcaaatctgggcagccttaaaattcactgcacaattctggaatttgccctaaggcagcccctaaaagaaaaaaccgttcccataatagcggagcggccaagtattttaggcctttctgtttcaatatggaaccaccttgccactctggagctgctcaaggctcttgaagcgaaatggaaaaatgaaacgctaaaacctttcgttgttcttggcggcccggaagcttcctggctgcctgaagacgcagagattttttatttcgccgattacgtgatccggggcgaaggcgaggaaagctttcgttccctttgttttgagctgttaggcgaaaccaaagtgaccgagaaaacaaaaaccggcaaagcggtatttttaggcaaaggcaacgccatagctaacataaacgaaatatcctctccctaccgcctttacactactgaagacctgacgcgaaaactcatttacgttgaagcatccaggggctgtccctttagctgcgaattttgtctgggctcatcaagaaaccagcctgcggcgcaaaaaatgcgcgaatttccgcttgagcttttttttgcagacatggaaactttgataaaaagaggcggcaaaacttttaagtttttagaccgtacctttaatctggacattgatcgggcgcggaggataatcgagttttttcttgaaaaaataaacgttaaacccttttgcgtccatttcgagatggttccttcccgttttcccgaaccgttaaaagaactgctttgccgttttcctgccggaaccctgcgactggaacttggaatccagaccttcaacacgcagaccagagcgctgctccaaatgtcagggaacatagatgaagagcttaagaccctggaattcctaagagaggaaaccaacgcgatacttcacgttgaccttattgccggacttccgggcgagggcctcgcctctttcaaaagcggttttgatcggctctggcaggttttatcgaaacaggaaagcgaagataaaacgccaggcgggctttttgaaattcagcttggtatcttaaaatgtcttcccggaactcccattgcgcgccacaatgaagcgtacaaaatgaagtattccctcactcccccctacgaagtgattgaaacaggcgcgctctccgccgcagagctggacaaaataaaaaacttcgcccgcttctgggagctcatcgtcaaccgcgttccttttccagctttaacttccgttttgctgcctgcgggtaaacctgctttcgacaggtttatggatctttctgacaagctccttgaacgcttcggcaagaactggggcattgatcgaagcgaacttcaatcatatcttagtcaggtacttctatga

SEQ ID NO: 54558 - protein, 499 aa, Unknown
  Obtained from environmental sample
  DOMAIN (21)...(148): B12 binding domain
  misc_feature (1)..(499): Xaa is any amino acid
MEALRNGKPAPGICSLPDMSAIVLATINAKWIHPSLALRLLKANLGSLKIHCTILEFALRQPLKEKTVPIIAERPSILGLSVSIWNHLATLELLKALEAKWKNETLKPFVVLGGPEASWLPEDAEIFYFADYVIRGEGEESFRSLCFELLGETKVTEKTKTGKAVFLGKGNAIANINEISSPYRLYTTEDLTRKLIYVEASRGCPFSCEFCLGSSRNQPAAQKMREFPLELFFADMETLIKRGGKTFKFLDRTFNLDIDRARRIIEFFLEKINVKPFCVHFEMVPSRFPEPLKELLCRFPAGTLRLELGIQTFNTQTRALLQMSGNIDEELKTLEFLREETNAILHVDLIAGLPGEGLASFKSGFDRLWQVLSKQESEDKTPGGLFEIQLGILKCLPGTPIARHNEAYKMKYSLTPPYEVIETGALSAAELDKIKNFARFWELIVNRVPFPALTSVLLPAGKPAFDRFMDLSDKLLERFGKNWGIDRSELQSYLSQVLL

SEQ ID NO: 54559 - DNA, 462 bp, Unknown
  Obtained from environmental sample
  misc_feature (1)..(462): n is a, c, g, or t
atgagtgaaggcgtaaaaataatagcgcagaaccgtaaagcgcggcacgattattctgtcgatgaaacttatgagtgcggcatagaactattggggacggaagtaaaatcattccgcgacggtaaaatctcattccccgattcgtgggcggaagtgataaacggcgaagtatggctgcgttcactggtagttgcggaaaatccgttttcatcgatttttaaccacgaaccggacaggaaaaaacgccttcttttgcacaaagacgaaataaaaagaatccagcgaaaggtggaagaaaagggctatacgcttatcccgttgtcattttattttaaaaaaagcagggtaaaagtcgaaatagggttgtgtaaagggaaaaaagcctatgacaagcgcgcgggaatacgcgaaaaagacttaaaacgtgaaatcgcccgtgaattcaggcatggactccaataa

SEQ ID NO: 54560 - protein, 153 aa, Unknown
  Obtained from environmental sample
  DOMAIN (6)...(73): SmpB protein
  misc_feature (1)..(153): Xaa is any amino acid
MSEGVKIIAQNRKARHDYSVDETYECGIELLGTEVKSFRDGKISFPDSWAEVINGEVWLRSLVVAENPFSSIFNHEPDRKKRLLLHKDEIKRIQRKVEEKGYTLIPLSFYFKKSRVKVEIGLCKGKKAYDKRAGIREKDLKREIAREFRHGLQ

SEQ ID NO: 54561 - DNA, 351 bp, Unknown
  Obtained from environmental sample
  misc_feature (1)..(351): n is a, c, g, or t
atgcaattaatgccgaagacggcgaaggatatggcggagcgtcttaagcgcgcgggagggcctgattattttggcgaagacggtattgttgattccacaaacccttcgcataatgttcacattggcacttattattttaaatatttacaggattattttaaggatacagtcctcgcgttattggcttataacggcggacagaacagggtgcgcagattacgcgccgccagcaaactgcctgtcgatttatttgttgaaaccattacgaatcttgagaatagggattatggcaagagggttccgggtatagcgagggtttatcaggaactgtattacaaggagactcagtag

SEQ ID NO: 54562 - protein, 116 aa, Unknown
  Obtained from environmental sample
  misc_feature (1)..(116): Xaa is any amino acid
MQLMPKTAKDMAERLKRAGGPDYFGEDGIVDSTNPSHNVHIGTYYFKYLQDYFKDTVLALLAYNGGQNRVRRLRAASKLPVDLFVETITNLENRDYGKRVPGIARVYQELYYKETQ

SEQ ID NO: 54563 - DNA, 726 bp, Unknown
  Obtained from environmental sample
  misc_feature (1)..(726): n is a, c, g, or t
gtgcgttttatacccggaatcgagataagcattaactggaaaagggctccgggcgtctgcggtcttggccgcggcggggagatgcaccttttgggtctgggcattaaggccccaagccccgcttttttggaaagaatagccgaactgtcccgccgccgcgaagagcgaaacctgataattctggataatatgaacgcactgggcatagaggcaagcctggatgatattcgcgccgaagccgccttatccccgaaccacgccggcgggaacctttcaatagggaggccgcactttgccaattttcttgtaaagaaaagaatcgtcaggaaccgggatcaggcttttgcccgctatctaaagccgggaaagccgctatacgcgcccaaggcgggcctcccctttgagcaggccgcggccattatccgcgaatccggcggcattccaatccttgcccatcccatgtcgctttacgtttcctggggctgccttcccgatctgataaaggtattgaaaagccagggcctgatgggcattgaggcgtggcatccgattgccaaggcaaaggactgccgccgccttgaggaactgggcaaaagccttggcctgtacataaccgagggaagcgacttccacgggactaaccgccttggccgcagcctgggcttttccaacaagcagcggcagataagcgacgccgtgcttgaggcgatcccggaactgctttag

SEQ ID NO: 54564 - protein, 241 aa, Unknown
  Obtained from environmental sample
  misc_feature (1)..(241): Xaa is any amino acid
MRFIPGIEISINWKRAPGVCGLGRGGEMHLLGLGIKAPSPAFLERIAELSRRREERNLIILDNMNALGIEASLDDIRAEAALSPNHAGGNLSIGRPHFANFLVKKRIVRNRDQAFARYLKPGKPLYAPKAGLPFEQAAAIIRESGGIPILAHPMSLYVSWGCLPDLIKVLKSQGLMGIEAWHPIAKAKDCRRLEELGKSLGLYITEGSDFHGTNRLGRSLGFSNKQRQISDAVLEAIPELL

SEQ ID NO: 54565 - DNA, 1188 bp, Unknown
  Obtained from environmental sample
  misc_feature (1)..(1188): n is a, c, g, or t
ttgacggatggtttacagaacattacggcggcgacgggacgcagaatatatcggcaaacccgggacgggttaaagaaaccctggcaaaagaaaaacacccggaaattggacgctatcaggaatgaaatagataatttaaatcttgacgaagtgagtaaagctgtcgcgattaccagccttatttttgctttggatcaggttgacagcactcttgggcatttcgcttcatatttaaatgaatggtcgccgagatcatacaatgacatgaagcttgaagtgcctgatttatggataaatgaaaataataattgtgtaatgaattatgatatttttgaagcgctgaaaaaactgcctgataatattaatatctgttattatgatccgccctatggttcaaataacgaaaaaatgcccccttcaagggtaaggtatgcttcatattaccatatctggacaacaatctgcttaaatgacaagccggatttattcggcaaagcgaaaaggcgctcggatacttcagatacaatagcttgctcggtttttgaagaattcagaaaaggctcatcaggcaaattcattgttattgaagcaatagaaaaattaatcagacttacccccatgaattatataattttgtcatatagttccggcggcagggcaacagcccaggaattaaatgacgtccttaacgcttatggacgtatcattgaaatagaaaaaataaattataaaaaaaatgttatgagcgggatgaaatggacaaatgactggataaaagacgcggaagaagataattacgagtatttattttctaatggaaaaactgccgtaacgctaaagcagttccgggatcgcctcaagcacggcgtcgcttatctgccgctgcttgttggaaaagcccaggctgcggccaaggcggttagtcccgtggaagtcgcttccctcggttatgtacaggccaaggcttttgcccagttcctcaaggcggcggcagtcctttgccttggcaatcggatgccacgcctcaatgcccatcaggccctggcttttcaatacctttatcagatcgggaaggcagccccaggaaacgtaaagcgacatgggatgggcaaggattggaatgccgccggattcgcggataatggccgcggcctgctcaaaggggaggcccgccttgggcgcgtatag

SEQ ID NO: 54566 - protein, 395 aa, Unknown
  Obtained from environmental sample
  misc_feature (1)..(395): Xaa is any amino acid
MTDGLQNITAATGRRIYRQTRDGLKKPWQKKNTRKLDAIRNEIDNLNLDEVSKAVAITSLIFALDQVDSTLGHFASYLNEWSPRSYNDMKLEVPDLWINENNNCVMNYDIFEALKKLPDNINICYYDPPYGSNNEKMPPSRVRYASYYHIWTTICLNDKPDLFGKAKRRSDTSDTIACSVFEEFRKGSSGKFIVIEAIEKLIRLTPMNYIILSYSSGGRATAQELNDVLNAYGRIIEIEKINYKKNVMSGMKWTNDWIKDAEEDNYEYLFSNGKTAVTLKQFRDRLKHGVAYLPLLVGKAQAAAKAVSPVEVASLGYVQAKAFAQFLKAAAVLCLGNRMPRLNAHQALAFQYLYQIGKAAPGNVKRHGMGKDWNAAGFADNGRGLLKGEARLGRV

SEQ ID NO: 54567 - DNA, 447 bp, Unknown
  Obtained from environmental sample
  misc_feature (1)..(447): n is a, c, g, or t
ttgtcctgtgtattatttgatgacttaattattgacactcctgaaacacaggcaataaagtataccggctctaaattgaagttactgccgtatatactatctttatcaaaaaaagccgacggcggttatagcaacaccgctgtttttgacggtttctccgggtcgacaagggttagccaggcttacgcgaaaacaggttacaaagtatacgcaaatgacaccgctccgtattcaaaagtatttaacacggctttcttaatgaatacaaaagcgcctgaagattatcagccgttaattgaacacctgaatacgctgaatcccgttgacggatggtttacagaacattacggcggcgacgggacgcagaatatatcggcaaacccgggacgggttaaagaaaccctggcaaaagaaaaacacccggaaattggacgctatcaggaatga

SEQ ID NO: 54568 - protein, 148 aa, Unknown
  Obtained from environmental sample
  misc_feature (1)..(148): Xaa is any amino acid
MSCVLFDDLIIDTPETQAIKYTGSKLKLLPYILSLSKKADGGYSNTAVFDGFSGSTRVSQAYAKTGYKVYANDTAPYSKVFNTAFLMNTKAPEDYQPLIEHLNTLNPVDGWFTEHYGGDGTQNISANPGRVKETLAKEKHPEIGRYQE

SEQ ID NO: 54569 - DNA, 345 bp, Unknown
  Obtained from environmental sample
  misc_feature (1)..(345): n is a, c, g, or t
atgagtgactgtattttctgcaggatcataaagggagaaatccccagtaaaaagatctatgaagacgatgaaatgcttgccttccatgacatcacgccgatggcccctgtgcattttctgcttatccccaaaaagcatatcaagagtcttttacatctggaaacggaagacaatgccctgataggcaggcttttgggcaaagcccaggaactggcaaaagggcagggctgcacagagaaaggcgcgcgtttcgtgataaacgcggggcgcgacggcgggcagacagtggatcatctccacatccacatccttggcggacgcgccctcggctggcctccggggtaa

SEQ ID NO: 54570 - protein, 114 aa, Unknown
  Obtained from environmental sample
  DOMAIN (4)...(109): HIT domain
  misc_feature (1)..(114): Xaa is any amino acid
MSDCIFCRIIKGEIPSKKIYEDDEMLAFHDITPMAPVHFLLIPKKHIKSLLHLETEDNALIGRLLGKAQELAKGQGCTEKGARFVINAGRDGGQTVDHLHIHILGGRALGWPPG

SEQ ID NO: 54571 - DNA, 678 bp, Unknown
  Obtained from environmental sample
  misc_feature (1)..(678): n is a, c, g, or t
atgacaaaaccatttaatttaataaaacaatatgatagtgtcggttttatctatccgacttattattggggaatgcccagaaaagttatcgaatttgttgaaaatttacaattaaacaataataaaaatacatattattattcaattgccacttatggaggacttgctggaaatgctgtttatcaaatgtatgaattgttgctcaataggcatggtataaaattaaattatggtagaaagctgaaaatgttcgcaaactatgttgttgcatatgacatgagcgtagggatagaaaaaattacaaaaaaatcaaataaaaaacttgttccaataataaattcggtaaaaaaaagaagggataataaaataaataaattaacaaaaatattcaaatccatgaatgaaaatttcgtaaaagaagtgtcaaatatggataaaaatttcacagttaataatagttgtattggctgtggtatgtgtgaaagaatttgtccagtaaaaaatattgtaatggtaaataatcgaccagaatataaacatcactgtgaacaatgtgttgcgtgtattcaattttgtccacaaaaagcaataaactataaaaatctaacccaaaataggagaagatatacaaatcctgaaataagttataaagaattatccgaatataataataaataa

SEQ ID NO: 54572 - protein, 225 aa, Unknown
  Obtained from environmental sample
  DOMAIN (148)...(170): 4Fe-4S binding domain
  misc_feature (1)..(225): Xaa is any amino acid
MTKPFNLIKQYDSVGFIYPTYYWGMPRKVIEFVENLQLNNNKNTYYYSIATYGGLAGNAVYQMYELLLNRHGIKLNYGRKLKMFANYVVAYDMSVGIEKITKKSNKKLVPIINSVKKRRDNKINKLTKIFKSMNENFVKEVSNMDKNFTVNNSCIGCGMCERICPVKNIVMVNNRPEYKHHCEQCVACIQFCPQKAINYKNLTQNRRRYTNPEISYKELSEYNNK

SEQ ID NO: 54573 - DNA, 330 bp, Unknown
  Obtained from environmental sample
  misc_feature (1)..(330): n is a, c, g, or t
atggaagaaaaagacgtaaatattagatatgctaaaagcaaagattattattggctaactgaacatgataaacatattccagaaaatatggtaaaaaataaaatagaaaatatggaattctatgttgctgaaaataatggaaaaatagttggttggttaaggtataatttattttgggataatgtaccatttatgagcatgatatattttttggaagaatataggaaattgggaataggaacaaaattaataaaatactgggaaaatgaaatgaaacaaaaaggttataaaaatgtattaacatcaactcaatcaaatgaagaagcataa

SEQ ID NO: 54574 - protein, 109 aa, Unknown
  Obtained from environmental sample
  DOMAIN (41)...(108): Acetyltransferase (GNAT) family
  misc_feature (1)..(109): Xaa is any amino acid
MEEKDVNIRYAKSKDYYWLTEHDKHIPENMVKNKIENMEFYVAENNGKIVGWLRYNLFWDNVPFMSMIYFLEEYRKLGIGTKLIKYWENEMKQKGYKNVLTSTQSNEEA

SEQ ID NO: 54575 - DNA, 1800 bp, Unknown
  Obtained from environmental sample
  misc_feature (1)..(1800): n is a, c, g, or t
atgcaagccgctattaacggtaattccgtaatttcgacaaccatgtataacccggacggtcttcttgttatgtatgtttccgcgccgataaatgacaatcttgttttggcggcggttttgcccggttcttttttcagcggcttgttatctcattttattttctgggattccgggcatttgtttgtctgtgaccctgaaggcaatactatttccaattaccgcgaagagtgggtgcaaaacaggataaattttattgaattggcgaaaaccgataagaattatgaaagcgtagccctcatgatgaagcgcgggattaacggagagcggggtatcggtaaaattatcgttgacggtacgcgccgtatgtgcgctttccgccccgtttcaagcagggaagaaggctggtttttgggagtagtcgctccgttaaatgaaagcgcgttaagcggtgttcccggcagttcatttcttatgagtttaattactttccttcttagcatacctgcggcaatcgcggcttctattattttaaggcgtccatacgaagaaattgatcaactgcgcgaagcggcggaagctatgtcgtcttccaagacaaaattcctggcaagcatgagccacgagatacgcacaccgatgaacagcgttcttggtttctcggaactggcgcttgatagtgagacgactccaaaagtaagggaatatttacataaaataaaaaccaacgccgaatggcttttgcatattattaacgatatacttgatatttccaaagtggaatccggtaaaatggagcttgaaaaaatcccctttgatatgcatgaactgttttccagctgccgcacgttgattatgccaagcgccatagaaaaaagtattttattgcatttctatgttgagccgagtctgggaaaaagacctatgggcgaccctgtaagactgcggcaggtgcttgtaaatcttctgtctaacgccgtcaaatttacaaatacgggcatggtaaaacttaacgccgtgttaaaagcgaaaaccgataaaaccataacaatgttttttgaagtaaaagattcaggcattggaatgacccccgaacaaataaacaaaatatttgatccttttacgcaagccgaaaaagacacaacccgtaaatacggcggtacggggcttgggctgtccattactaagaatatcgtggaaatgatgggcggaaaacttatggtggaaagcaccccgggcatcggcagtaaattcagttttgaattgacctttgataccatagatgtcagcgttgagcatttgtttgacgacagagtggttatgaaagagcttgataaaccggcgtttgagggcgaggttttattatgcgaagacaattccatgaaccagcaggttgtttatgagcacttggcaagagtcggacttaaaaccgttatagccgacaacggtaaaatgggttatgagatggtaaagagcaggttagataaacatgaaaagcaatttgacttgatttttatggatatgcacatgcccgttatggacggacttgaagcttccacaaaaattaaggaattggatttaaatattcccatagtggcaatgaccgcgaatattatgtttaatgacagggaaatttacaaaaacagcggcatgattgaatgtgtaggaaagccctttacctcgcaggaattatggcgttgtcttatgaaatactttacgcccatatcgtccgggattgataaaaacgctanatctggaagccaacgtggaatttcaaaagaaatttcacggtctttttgttaa

SEQ ID NO: 54576 - protein, 599 aa, Unknown
  Obtained from environmental sample
  DOMAIN (450)...(568): Response regulator receiver domain
  misc_feature (1)..(599): Xaa is any amino acid
MQAAINGNSVISTTMYNPDGLLVMYVSAPINDNLVLAAVLPGSFFSGLLSHFIFWDSGHLFVCDPEGNTISNYREEWVQNRINFIELAKTDKNYESVALMMKRGINGERGIGKIIVDGTRRMCAFRPVSSREEGWFLGVVAPLNESALSGVPGSSFLMSLITFLLSIPAAIAASIILRRPYEEIDQLREAAEAMSSSKTKFLASMSHEIRTPMNSVLGFSELALDSETTPKVREYLHKIKTNAEWLLHIINDILDISKVESGKMELEKIPFDMHELFSSCRTLIMPSAIEKSILLHFYVEPSLGKRPMGDPVRLRQVLVNLLSNAVKFTNTGMVKLNAVLKAKTDKTITMFFEVKDSGIGMTPEQINKIFDPFTQAEKDTTRKYGGTGLGLSITKNIVEMMGGKLMVESTPGIGSKFSFELTFDTIDVSVEHLFDDRVVMKELDKPAFEGEVLLCEDNSMNQQVVYEHLARVGLKTVIADNGKMGYEMVKSRLDKHEKQFDLIFMDMHMPVMDGLEASTKIKELDLNIPIVAMTANIMFNDREIYKNSGMIECVGKPFTSQELWRCLMKYFTPISSGIDKNAXSGSQRGISKEISRSFC

SEQ ID NO: 54577 - DNA, 498 bp, Unknown
  Obtained from environmental sample
  misc_feature (1)..(498): n is a, c, g, or t
ttgggatatgtaacggcttccaggcttttatcaaaacncgggctggttccttacggccgcatcatcccttcagtcgaaatggaaaccgcccccaccctcactttcaacgccattggacgccatgtctcccgaatggtacgtaccagggtaatgccgaatatctccccctggctaagcctggaagaaacaggcagcatccacatcatccccgtaagccacggcgaaggccgcgtggcgattcaaagcgaagaagccggatcattgttcgccaccgggcaggtccccttctgctacgttaacgctgacggaaaagcgacaatggctgaaccagccaaccccaatggctccgcttttgccatagagggccttaccagccccgacggcaggatcctcggcaaaatggcgcactccgaacgttgtggcgaatttgtccacatcaacattccggggaacaaacgccagaggatattcgaagctggagtcaggtattttagataa

SEQ ID NO: 54578 - protein, 165 aa, Unknown
  Obtained from environmental sample
  misc_feature (1)..(165): Xaa is any amino acid
MGYVTASRLLSKXGLVPYGRIIPSVEMETAPTLTFNAIGRHVSRMVRTRVMPNISPWLSLEETGSIHIIPVSHGEGRVAIQSEEAGSLFATGQVPFCYVNADGKATMAEPANPNGSAFAIEGLTSPDGRILGKMAHSERCGEFVHINIPGNKRQRIFEAGVRYFR

SEQ ID NO: 54579 - DNA, 1461 bp, Unknown
  Obtained from environmental sample
  misc_feature (1)..(1461): n is a, c, g, or t
gtgagtctccggagcggaagccgccgggggcttcaggaacgtttcgatggttcggtcggcgcggtttccgtactttttccatggggcggcggcgaacagggaactcccgaatgtggcatggcggccctgcttccttcaatggacaagcaaagccgtaccgcgagcattatgacctttggctacgatcccaatctgatgagcctcgatccctacataggggcgaagggttccgttctggaagctttggccaagttcgcctgccttgggggtgatcctttcactgcgcggctttccctccaggagtatttcaggcggcctgaaacgcctgagacctggggcacgcccgcagccgccctgcttggcgctctggaagcgcagctccgcctcggcattccggctattggcggcaaggattcaatgtccgggaattatcgggacgaaagtaatggcattgacatcgcggtaccgccaactctggtagcttttgccgcgggaaccgtcgcggcaaataaagtccgttccggcgcgcttagcggcaaaagcgggaatgccgttatgcttttaagccaatctccgcagtctcttttaaacagccaggatgagtgggaacttttcaaagccagcatgaaaaccctggctgccctttccgctcagggtgctctaaaagcggcatatcctgtcggccccggaggagtcgccgcaaccctcgcgctgatggctttcggcaacatgaccggcgtggaagcttacgccgcctccttttgccgcgtagacagcgaaaactaccagggcagcgtacttgccgaaattgatgaaactgccctgccttcagggtgggaagccaactgggttcttgccgcaagaactttgactgagcctgtcttccgcatcgttggtacaagatcgacaggagaacttaatgaggatgaaaaccctgaagcccttgtcgcggaaactcccctggaagtgctacgccgggcctatgaataccccctggcccaagtttatccccagacctctacgggggctacagtcgcggaacccggcgatgaaagcatgatactgaaacttccggctttttcaggcagtgcggcttcttccatcgaagctcgcaaacacatccgcctgcctttacagggcgcgccactggttacgctgcccgtttttccaggcacaaactgcgaatgggatatggaaagggcttttagggaagccggggccaggacacaacttgtgatcttcagaaaccgcagccgccaggatatagccgaatccctcgatgaattggccgcagcctttggggaggcagagataatcgctttttcaggcggctttagcgcaggggacgagccggacggttccggcaagttcatcgccaatgtgcttcgttcgcccatcattgccgccgccgtttcggaatttcttgaaaagncgcggcggcctgatgcttgggatatgtaa

SEQ ID NO: 54580 - protein, 486 aa, Unknown
  Obtained from environmental sample
  misc_feature (1)..(486): Xaa is any amino acid
MSLRSGSRRGLQERFDGSVGAVSVLFPWGGGEQGTPECGMAALLPSMDKQSRTASIMTFGYDPNLMSLDPYIGAKGSVLEALAKFACLGGDPFTARLSLQEYFRRPETPETWGTPAAALLGALEAQLRLGIPAIGGKDSMSGNYRDESNGIDIAVPPTLVAFAAGTVAANKVRSGALSGKSGNAVMLLSQSPQSLLNSQDEWELFKASMKTLAALSAQGALKAAYPVGPGGVAATLALMAFGNMTGVEAYAASFCRVDSENYQGSVLAEIDETALPSGWEANWVLAARTLTEPVFRIVGTRSTGELNEDENPEALVAETPLEVLRRAYEYPLAQVYPQTSTGATVAEPGDESMILKLPAFSGSAASSIEARKHIRLPLQGAPLVTLPVFPGTNCEWDMERAFREAGARTQLVIFRNRSRQDIAESLDELAAAFGEAEIIAFSGGFSAGDEPDGSGKFIANVLRSPIIAAAVSEFLEKXRRPDAWDM

SEQ ID NO: 54581 - DNA, 1419 bp, Unknown
  Obtained from environmental sample
  misc_feature (1)..(1419): n is a, c, g, or t
atgatcagatcggccgagcggcacgaggaatgggaacctttctcaatggaaaacgggatagttaaccttaaaaaacggctgaagggctcgaaaaattcttacggttttttcttttacgcgggtcacggagtgcaatccaatggagagaactatcttataccggttgacgctaatattcaaagtgaaagttttctccgccgccagtcaatttccgtacaggaaatgcttgacgaactgaacgacgcgggaaacgagttgaacgtggtagtgcttgacgcgtgccgcgacaatcccttcccatggaaacgctccggcagccgcggcttgcaggtggtaggcagccagcccgcggacagcatcatcgtgtttgcgacaagcgcgggttccactgcggcagacggaacaggaagaaacggtctttttacaggtcacttgctggaacgcataaaaactcccggcattgaagtagccgaagtcttccgtttaacaatgggcgacgttgtccgtgccagcggcagccggcagcgccccgccgtttacaaccagtttgcgggtcaggcatatcttggcagtaagcctcaggcaactacaacaacggttacgccgcagcctgctccggctcctacggtacagccaacgccgacaccgcagcctgctccggtagtacagcctgcatcagttcccgctaacatggtgtacataaaaggcggaaccttcacgatgggcagccccgccaacgaaccggagcgtggaaaagatgaagtccaacatcaggtaacggtaagcggtttttacatggggaagtatgaggtaacgcagaaggaatatcaggaagtgatggggacaaatcccagcaattttaaaggagacaatctgcctgttgagcaggtaagctggtatgacgcggtagagttctgcaaccgcctgagtcagcgggagggcctgacccctgcgtatacgataaacaaaacaattgtaacgtggcaccggagcgccaacggctaccgtctgcccaccgaggcggaatgggagtacgcctgccgtgccgggaaagaaacgccttttagcacgggggacaacattaccacgaaacaggcgaattacgatggttttccttacaacaacaatgcgaaggggacgttccggaataagactgtggaggtgaggagtttctcgcagaatgcctggggtttatataacatgcacggaaatgtatgggaatggtgctgggacttgtatggggactatgcgagcttggcgcagatcaacccggcgggcgcatcctcgggatctgaccgcataatacgcggcgggagctggcttgttcacgcgcagttcctgcgttccgcgaaccggtacaacatctccccttctctcgtaactaacgctattggcttccggctggtgctccctctgtga

SEQ ID NO: 54582 - protein, 472 aa, Unknown
  Obtained from environmental sample
  DOMAIN (1)...(189): Caspase domain
  misc_feature (1)..(472): Xaa is any amino acid
MIRSAERHEEWEPFSMENGIVNLKKRLKGSKNSYGFFFYAGHGVQSNGENYLIPVDANIQSESFLRRQSISVQEMLDELNDAGNELNVVVLDACRDNPFPWKRSGSRGLQVVGSQPADSIIVFATSAGSTAADGTGRNGLFTGHLLERIKTPGIEVAEVFRLTMGDVVRASGSRQRPAVYNQFAGQAYLGSKPQATTTTVTPQPAPAPTVQPTPTPQPAPVVQPASVPANMVYIKGGTFTMGSPANEPERGKDEVQHQVTVSGFYMGKYEVTQKEYQEVMGTNPSNFKGDNLPVEQVSWYDAVEFCNRLSQREGLTPAYTINKTIVTWHRSANGYRLPTEAEWEYACRAGKETPFSTGDNITTKQANYDGFPYNNNAKGTFRNKTVEVRSFSQNAWGLYNMHGNVWEWCWDLYGDYASLAQINPAGASSGSDRIIRGGSWLVHAQFLRSANRYNISPSLVTNAIGFRLVLPL

SEQ ID NO: 54583 - DNA, 1143 bp, Unknown
  Obtained from environmental sample
  misc_feature (1)..(1143): n is a, c, g, or t
ttgcttttcgactcagataaaactaaattctctattcagcaaaagggtaaaccgcaatacacatttcaaaccctttctgcgggttataaagcaatttttgatgtatacgccgatctgctcatgcgaacagaatactttagcataagtccaaccgcattggagggagttgtttttattgatgaaattgattcacacctgcatatttcgctacaacgtttgatattaccgttttttattgaatcgttcccaaaagttcaattcattgttactactcattcaccctttgtgcttatgtcatcaagggacatccttgtttttgatttgggaaaagaaatgccttacagtatatctcaggtaaaatcgcaaaatgaaatactgaacgaatatttgggtgtaccaacagtaatgccggtttgggcggaacgaagtttaactgatattcttggtaaatatctgaatcgtgaacaaaataatatatctcttacagcattgaaagaagaattgataaatgccggattggaagaatatttccctgattctgcggcaagattctggaggctaataatgatagccctgatacggcccgaatgtcccaaccctgtggcccttgctaaaggagattatgcggatccggttaataaagatgcattgcgaaaatctactgcgggaaaatgtatgtactgtgaaggtaaatttgaacagaacagttactctcatgtagaacacatcaagcctaaagtaaaatttcctgaactcaaattctcatgggataatttgggttttagttgtcaggtatgcaacacaaacaaaggcgaaaagtatgatgaaactacgccttttattgatccctacagtgaaaatccggaagaatatattgtttttttagaatattatgtgtatccacgacgagattcaaaacggggtaaatattctatagatgaattacagttaaatagggcaggtttggttgagagacgaaaagaaaaaattgatagactttatttgttgatcaaagtttttttcagtttatcagataaattattacgcacccaagtaattactgaattaagagcagaagcagacaaagataaggaatactcggcaatggttaaaagcgtgttgcttgcccagggtattttatag

SEQ ID NO: 54584 - protein, 380 aa, Unknown
  Obtained from environmental sample
  DOMAIN (223)...(274): HNH endonuclease
  misc_feature (1)..(380): Xaa is any amino acid
MLFDSDKTKFSIQQKGKPQYTFQTLSAGYKAIFDVYADLLMRTEYFSISPTALEGVVFIDEIDSHLHISLQRLILPFFIESFPKVQFIVTTHSPFVLMSSRDILVFDLGKEMPYSISQVKSQNEILNEYLGVPTVMPVWAERSLTDILGKYLNREQNNISLTALKEELINAGLEEYFPDSAARFWRLIMIALIRPECPNPVALAKGDYADPVNKDALRKSTAGKCMYCEGKFEQNSYSHVEHIKPKVKFPELKFSWDNLGFSCQVCNTNKGEKYDETTPFIDPYSENPEEYIVFLEYYVYPRRDSKRGKYSIDELQLNRAGLVERRKEKIDRLYLLIKVFFSLSDKLLRTQVITELRAEADKDKEYSAMVKSVLLAQGIL

SEQ ID NO: 54585 - DNA, 663 bp, Unknown
  Obtained from environmental sample
  misc_feature (1)..(663): n is a, c, g, or t
atggcggctacggagatagacaaatcccacaacaatccggtctggatagacataggtacggaggagctgatatatataccggaaacactgaagttcatagcgacaatcaacaacgacgaaacaacggaaaacctttcacccagattgatagatagggcgtgggtcattaaactgccggtaatccaaaaatacgagaataaagcgttgatcgccaagggagagaacgcggcatcggacacaatactatggcgagacctgaaagccgcgttttccggcggggataagccgggtgagagcgacagtgtaaaaaagcagaaggaaaacctgacggagatttatgaaaaatttgacgcctaccaaatggagataagcccgcgaataataaacgttatcgacaactatatctccgtcgccgacggcctgatggaaaaagataggaaaaacgatccgttcaaccaggaacctgaacaggccgccttagattttgcggtggtgcagaaattgctgcccaagataaacgaccgctacgacgtctacgaaaagctctttaacgaacttcttgagatatgcggcgacaacaacttggttagaaccaagaaatctattaatgagatgatagataataaggatagaaatatggggtactgccaatttttggtgtga

SEQ ID NO: 54586 - protein, 220 aa, Unknown
  Obtained from environmental sample
  misc_feature (1)..(220): Xaa is any amino acid
MAATEIDKSHNNPVWIDIGTEELIYIPETLKFIATINNDETTENLSPRLIDRAWVIKLPVIQKYENKALIAKGENAASDTILWRDLKAAFSGGDKPGESDSVKKQKENLTEIYEKFDAYQMEISPRIINVIDNYISVADGLMEKDRKNDPFNQEPEQAALDFAVVQKLLPKINDRYDVYEKLFNELLEICGDNNLVRTKKSINEMIDNKDRNMGYCQFLV

SEQ ID NO: 54587 - DNA, 399 bp, Unknown
  Obtained from environmental sample
  misc_feature (1)..(399): n is a, c, g, or t
gtgagatgttgggttaagtcccgcaacgagcgcaacccgtgcccttggttgccaacatggctctccagggggactgccggggacaacccggaggaaggtgcggacgacgtcaagtcctcatggcccttacatcctgggccacacacgtgctacaatggggggcacagagggaagccaggccgcgaggccgagcggatcccaaaagcctcccccagttcggataggagtctgcaacccgactccttgaagccggaatcgctagtaatcgcggatcagcatgccgcggtgaatacgttcccgggccttgtacacaccgcccgtcaagccatgggaggggagagcgctccaagacgtgcagctaacccgcaagggagcgggcgtccaaagcgagatccctga

SEQ ID NO: 54588 - protein, 132 aa, Unknown
  Obtained from environmental sample
  misc_feature (1)..(132): Xaa is any amino acid
MRCWVKSRNERNPCPWLPTWLSRGTAGDNPEEGADDVKSSWPLHPGPHTCYNGGHRGKPGREAERIPKASPSSDRSLQPDSLKPESLVIADQHAAVNTFPGLVHTARQAMGGESAPRRAANPQGSGRPKRDP

SEQ ID NO: 54589 - DNA, 438 bp, Unknown
  Obtained from environmental sample
  misc_feature (1)..(438): n is a, c, g, or t
gtgtgtggcccaggatgtaagggccatgaggacttgacgtcgtccgcaccttcctccgggttgtccccggcagtccccctggagagccatgttggcaaccaagggcacgggttgcgctcgttgcgggacttaacccaacatctcacgacacgagctgacgacagccatgcagcacctgtgcgggaagcccattgctgggcgcagccatctctgactacctcttccccatgtcaaaccctggtaaggttctgcgcgttgcgtcgaattaaaccacatgctccaccgcttgtgcgggcccccgtcaattcctttgagtttcacccttgcgggcgtactccccaggcggcgtgcttatcgcgttggctacggcacccaagggcaaatgcccccgggcgccaagcacgcatcgtttacggcgcggactaccagggtatctaa

SEQ ID NO: 54590 - protein, 145 aa, Unknown
  Obtained from environmental sample
  misc_feature (1)..(145): Xaa is any amino acid
MCGPGCKGHEDLTSSAPSSGLSPAVPLESHVGNQGHGLRSLRDLTQHLTTRADDSHAAPVREAHCWAQPSLTTSSPCQTLVRFCALRRIKPHAPPLVRAPVNSFEFHPCGRTPQAACLSRWLRHPRANAPGRQARIVYGADYQGI

SEQ ID NO: 54591 - DNA, 729 bp, Unknown
  Obtained from environmental sample
  misc_feature (1)..(729): n is a, c, g, or t
atgctccaccgcttgtgcgggcccccgtcaattcctttgagtttcacccttgcgggcgtactccccaggcggcgtgcttatcgcgttggctacggcacccaagggcaaatgcccccgggcgccaagcacgcatcgtttacggcgcggactaccagggtatctaatcctgtttgctacccgcgctttcgagccgcagcgtcgatgattccccagctggccgccttcgcctccggtgttcttcccgatatctacgcattccaccgctccaccgggaattccgccagcctctggaacatccaagccccgcagtcccgggcgcaaggctggggttgggccccagcattgcacgcccggcttgcagggcagcctacgctccctttacgcccagtgattccgaacaacgctcgcacccctcgtattaccgcggctgctggcacgaagtttgccggtgcttcctctcggggtacgctcaatgcaaccgaaattgcaagctgttcccccacgacagtggtttacacgcctaggcgctccttcccacacgtggcgtcgctgcgtcaggcttccgcccattgcgcaatattccctgctgctgcctcccgtaggagtctgggccgtatctcagtcccaatgtggccgttcgccctctcaggccggctaccgatcgttggtttggtgggccgctaccccgccaactgcctaatcggacgcgaactcatcccccggcgataa

SEQ ID NO: 54592 - protein, 242 aa, Unknown
  Obtained from environmental sample
  misc_feature (1)..(242): Xaa is any amino acid
MLHRLCGPPSIPLSFTLAGVLPRRRAYRVGYGTQGQMPPGAKHASFTARTTRVSNPVCYPRFRAAASMIPQLAAFASGVLPDIYAFHRSTGNSASLWNIQAPQSRAQGWGWAPALHARLAGQPTLPLRPVIPNNARTPRITAAAGTKFAGASSRGTLNATEIASCSPTTVVYTPRRSFPHVASLRQASAHCAIFPAAASRRSLGRISVPMWPFALSGRLPIVGLVGRYPANCLIGRELIPRR

SEQ ID NO: 54593 - DNA, 354 bp, Unknown
  Obtained from environmental sample
  misc_feature (1)..(354): n is a, c, g, or t
ttgctacccgcgctttcgagccgcagcgtcgatgattccccagctggccgccttcgcctccggtgttcttcccgatatctacgcattccaccgctccaccgggaattccgccagcctctggaacatccaagccccgcagtcccgggcgcaaggctggggttgggccccagcattgcacgcccggcttgcagggcagcctacgctccctttacgcccagtgattccgaacaacgctcgcacccctcgtattaccgcggctgctggcacgaagtttgccggtgcttcctctcggggtacgctcaatgcaaccgaaattgcaagctgttcccccacgacagtggtttacacgcctag

SEQ ID NO: 54594 - protein, 117 aa, Unknown
  Obtained from environmental sample
  misc_feature (1)..(117): Xaa is any amino acid
MLPALSSRSVDDSPAGRLRLRCSSRYLRIPPLHREFRQPLEHPSPAVPGARLGLGPSIARPACRAAYAPFTPSDSEQRSHPSYYRGCWHEVCRCFLSGYAQCNRNCKLFPHDSGLHA

SEQ ID NO: 54595 - DNA, 1146 bp, Unknown
  Obtained from environmental sample
  misc_feature (1)..(1146): n is a, c, g, or t
atgcagaccgccactgaattaaggcggagcgaccctgaattgaccgccgccatggagcttgccgcggatcacataaagcggttttccctgcaacagcgggcgcagttttccgattttgagtatgagatggaaaaggggcttgttaccgggcagaaggtaatacctgtggacagggcggcggtatatgttcccggaggccgtttccccctgttttcatgcgtgcttatggctatgatccccgccttctgcgcgggcgtggaagagattattcttgcttcgccgccattggaagacggccttcctgaccgtaagatccttgccgccgccgcgatagcggctgacagcttcgccggggacccttcatcgcctgtaaaaaaaggcaggcttaggggcttcgccgtcgggggggcacaggcaatagcggcgcttgccctggggacgcaaaccattccccgcgttgatttgattgtcggcccgggtaacaagtatgttgccgccgccaaacgcattctctttggcagggtgggcattgatttcatcgccggccccaccgatgtgctgatcattgccgacggttccggcggcgcggatcttgtcgcggcggacatgctcgcccaggcggagcatgatcctgacgcccgcgcccgcgcccttgttcccaacggggaacttgccgcccaaatcgccgcggcagtggaaaagcggcttgcctcactgtccaccgccgtgaccgcccgcgcttccctggatgcgggcgggcttgttatcatttataaaacccaggaagatgcgatacgtatcgcccacacaatcgcgccagaacatcttgagcttcaggttggcggcgcggacacctggattccccgcctgaaaaattacggttcgctttttatcggaagtctttccgcggaggcccttggcgactattccgctgggattaacaacaccctgcccacatcggcaagcgcccgtttttcaggcggcctgtcggtcaggcattttctcaagactgtcaccacattgcgctgcgccccaggcgaaggttttgaaaaagcgcgaaacgcggctgaaacgctggcccgcgccgaggggcttgaaggccatgcgcagagcgcggcggtacgagagaatataaaggacatgtaa

SEQ ID NO: 54596 - protein, 381 aa, Unknown
  Obtained from environmental sample
  DOMAIN (2)...(377): Histidinol dehydrogenase
  misc_feature (1)..(381): Xaa is any amino acid
MQTATELRRSDPELTAAMELAADHIKRFSLQQRAQFSDFEYEMEKGLVTGQKVIPVDRAAVYVPGGRFPLFSCVLMAMIPAFCAGVEEIILASPPLEDGLPDRKILAAAAIAADSFAGDPSSPVKKGRLRGFAVGGAQAIAALALGTQTIPRVDLIVGPGNKYVAAAKRILFGRVGIDFIAGPTDVLIIADGSGGADLVAADMLAQAEHDPDARARALVPNGELAAQIAAAVEKRLASLSTAVTARASLDAGGLVIIYKTQEDAIRIAHTIAPEHLELQVGGADTWIPRLKNYGSLFIGSLSAEALGDYSAGINNTLPTSASARFSGGLSVRHFLKTVTTLRCAPGEGFEKARNAAETLARAEGLEGHAQSAAVRENIKDM

SEQ ID NO: 54597 - DNA, 564 bp, Unknown
  Obtained from environmental sample
  misc_feature (1)..(564): n is a, c, g, or t
atgtatttatcccttgttgttccctgttttaatgaagaagcggctattccgttattttataatgaagctgttaaaattgccgcatcgatcaaaaagaagtttgaaataatttttgtagatgacggttcaaaggataataccctaagcatttttcgccgccttgcaaatcaaaacaaacacgtacactacatttcattttcgcgtaatttcggtaaggaagctgctatgtttgctggcttgcaggcggcgcacggcaaatatattgtaacgcttgacgctgacggccaagacccgctatcacttattcctcaaatgctggaaagcgttgtttcgggagaatacgattgcgccgcgacaaggcgtgtaagccgtaccggagaaccgccggtacgttctttttttgcacgttgtttttacgcgcttatgaaaaaaataaccgatgtagaaattatttccggcgttcgtgattttcgcctgatgaacagaaagtatttggaagcgatcctgtcgatgcctgaacggaacaggttttcaaagggtatttttccatggatcgggttttaa

SEQ ID NO: 54598 - protein, 187 aa, Unknown
  Obtained from environmental sample
  DOMAIN (4)...(169): Glycosyl transferase family 2
  misc_feature (1)..(187): Xaa is any amino acid
MYLSLVVPCFNEEAAIPLFYNEAVKIAASIKKKFEIIFVDDGSKDNTLSIFRRLANQNKHVHYISFSRNFGKEAAMFAGLQAAHGKYIVTLDADGQDPLSLIPQMLESVVSGEYDCAATRRVSRTGEPPVRSFFARCFYALMKKITDVEIISGVRDFRLMNRKYLEAILSMPERNRFSKGIFPWIGF

SEQ ID NO: 54599 - DNA, 783 bp, Unknown
  Obtained from environmental sample
  misc_feature (1)..(783): n is a, c, g, or t
atggggcgatccggtagacgggtgggcatcaacgatctgtatcattcttttttgttcggggattcaacttttcacaatcggtattgtaggacagtacatggcaaaaatatataccgaagtcaaacaacgaccgcagtacattattcgggaggcaaagtgaaaagatggataatttttgatagaaaaattttcaagtttattctagttggaataatcaataccattgtcggctcatcaataatgtttttattgtataacgcgacgcatttgagttactggttttcttcatcctctaattattttctcaccagtgtactaagttttttcctgaacaagtattttaccttcaatgtcaggcattggtcggcgtttatggttattgcgtttgttatgacgattacgatttcatatctgattgcttacggcgtttcaaaacctgccatgaattatctgttaagggacagtccgcaaagaatccgagaaaacgccgcgctttttacaggaatgtgtttatttacgggattgaattactttggacagaggcagattgtgtttaaagaattgattactcccctgatattaactgataaatcgcacggaaatctaaaaaaattcgcttgttttcaatcaggaagttgtaatatgataattatgaaagttggcatcaagttttgtgaatcagcttttacaaatggctataccgtggttgtcttgcagacgttgaatttttcggttttgatcgaaaggggaacaccaataacaagcaggaggaattatgcctga

SEQ ID NO: 54600 - protein, 260 aa, Unknown
  Obtained from environmental sample
  DOMAIN (65)...(185): GtrA-like protein
  misc_feature (1)..(260): Xaa is any amino acid
MGRSGRRVGINDLYHSFLFGDSTFHNRYCRTVHGKNIYRSQTTTAVHYSGGKVKRWIIFDRKIFKFILVGIINTIVGSSIMFLLYNATHLSYWFSSSSNYFLTSVLSFFLNKYFTFNVRHWSAFMVIAFVMTITISYLIAYGVSKPAMNYLLRDSPQRIRENAALFTGMCLFTGLNYFGQRQIVFKELITPLILTDKSHGNLKKFACFQSGSCNMIIMKVGIKFCESAFTNGYTVVVLQTLNFSVLIERGTPITSRRNYA

SEQ ID NO: 54601 - DNA, 1047 bp, Unknown
  Obtained from environmental sample
  misc_feature (1)..(1047): n is a, c, g, or t
atgcgcttttgtcagcaagacgcggtaaaggcatggattagcgcatggaaatcatggcgtggaaagggggacattgtttggacagaacgtcattggcgttcacttggagtacaaaccgtcccgctaaaattaattttgaataaaccggaagacgcagtttcatggatagacgaaactgaaacatggtttcgtgttgtcgaacgttacaaaactctggtacaacagtggtcaaaattaactgatgttttattcagacactatcgaattcttgctgattttgacgacacgaattttcatcgcttaacaggaatattatcatggatatgcgccaatccaaactcagggctatacccgcgtcagatacctgttgttgggattgacagcaaatggttggaatcacataaaggacttgtctgtgaattggtttctgcaattcatggaaacaaagaacgtgatttctttaaggtctgcggattaaagcctcagccacagttaattcgtatgcgtatccttgacccggtgataagaaatcatttaggcggtcttggcgatatctgtgctccaagtgaagaaatagccaatcttattattaagccgacacttgtttttattgttgaaaatcttcaaacagggcttgcctttgaagatttaataggctctgttgtgatcatggctctgggatatggcgttgatgttttagggcgcatcccgtggcttcaaaatacgcgatgtatttactggggagacattgatacgcatggttttgccattcttaaccgcgccagaacacacttgccctacatggaaacagtgttaatggatgagcaaactctcctttctcacagggatttatgggttcaagagaaagaacaaagtactgcgtccgaattaccgttacttaccaaaaacgaatatgcactttttttatcactaaagaataattcctttggacagcaagtccgtttggaacaagagcgtatttactggaatactgcatggaaaaccatacaaaacatccaaatggagatattagttactagtagatag

SEQ ID NO: 54602 - protein, 348 aa, Unknown
  Obtained from environmental sample
  misc_feature (1)..(348): Xaa is any amino acid
MRFCQQDAVKAWISAWKSWRGKGDIVWTERHWRSLGVQTVPLKLILNKPEDAVSWIDETETWFRVVERYKTLVQQWSKLTDVLFRHYRILADFDDTNFHRLTGILSWICANPNSGLYPRQIPVVGIDSKWLESHKGLVCELVSAIHGNKERDFFKVCGLKPQPQLIRMRILDPVIRNHLGGLGDICAPSEEIANLIIKPTLVFIVENLQTGLAFEDLIGSVVIMALGYGVDVLGRIPWLQNTRCIYWGDIDTHGFAILNRARTHLPYMETVLMDEQTLLSHRDLWVQEKEQSTASELPLLTKNEYALFLSLKNNSFGQQVRLEQERIYWNTAWKTIQNIQMEILVTSR

SEQ ID NO: 54603 - DNA, 696 bp, Unknown
  Obtained from environmental sample
  misc_feature (1)..(696): n is a, c, g, or t
gtgcctattgactatgccgtattgcagcgccgttgcgcggcgatcaagcggatattggacaaggcggcggaagtccatgtcagcgcgcccggaggaacagacattacgattggactacacggcagagaggcaaaatccgatgacggcaatttttcaacaccaggctcaggcggcaaccttcccgccggagaaaccttcatcagcccggaaaatctcaccgcaaaaggccggatttgctatgacggttccatcagtgtcaatgagggagagctaatcatcaacactccgattgaatgtctggtggaagacggctttgtgactaaaattctcggcgcgggggaagcggcttgtttgttgaataccattgaagcagccgagaacaacgcctttgaatttgaaagagccggaaaactgcctcccggtcttggggaagtttatgcccgtaacgcccgcaacataggcgagcttggcattggactgaaccccgcggctcggattaccggcaagatgcttgaagacgaaaaagccttccgcacctgccatttcgccatcggcgctaattacgacgaggatgcgcccagccttattcatctggacggccttgtaaaaagacccaccataacggcgatctttgacgacggaaccaaacagataattgagcgtgacggcgaactggacagcagcatactgtcttga

SEQ ID NO: 54604 - protein, 231 aa, Unknown
  Obtained from environmental sample
  misc_feature (1)..(231): Xaa is any amino acid
MPIDYAVLQRRCAAIKRILDKAAEVHVSAPGGTDITIGLHGREAKSDDGNFSTPGSGGNLPAGETFISPENLTAKGRICYDGSISVNEGELIINTPIECLVEDGFVTKILGAGEAACLLNTIEAAENNAFEFERAGKLPPGLGEVYARNARNIGELGIGLNPAARITGKMLEDEKAFRTCHFAIGANYDEDAPSLIHLDGLVKRPTITAIFDDGTKQIIERDGELDSSILS

SEQ ID NO: 54605 - DNA, 939 bp, Unknown
  Obtained from environmental sample
  misc_feature (1)..(939): n is a, c, g, or t
ttgatcagatcggccgaggcttcccataaccgccttgccgcgcagatagtccggcaggcaaaaattatcagcgcgggaagctctgggcagtttgtagttgttttctgcgccatgggcgtaaaaaacgacgtggcgcgtttctttctggatgacttcgagcgctccggcgtattatcaaacgtggtgattttcctctcgcttgccgacgccccttcccttgagcgtctgattgccccccgctgcgccctcaccgccgccgaataccttgcttacgaaaaagatatgcacgtccttgtggtaatgacggacatgaccaactattgcgaagcgttgcgtgaagtttcatcaatacgcggtgaagtccccagccgcaaaggctatcccggctacctgtactcggatctcgcggcgttgtacgagcgggcgggaaagataaaggacagggaaggttccattacccaactgccgattcttaccatgcccaatgatgatatcagccacccgatccctgacctttccggctatataaccgagggccagatagtccttgaccgcgagcttttccagagggggatttacccgccggtcgcgggcctgcccagcctctcgcggcttatgaaggacggcataggccccggcatgacccgcgaggatcacaaggacgtggccagccagctttttgccgcctattcaaaggtaaagcaggtccgcaacctcgtgtcgatcatcggcgaggaagaactgtccgaaaccgacaaatgttatctgaaatacggtgaggattttgaacgtatgttccttatccagggcgataatgaaaaccgcacgattgcccaaacgctggatctcggctggaaggttttaggaactctgccgcgtgacgaactactgcggataaatcaggaatttatcaaaaagtacttggataaaaatgaataa

SEQ ID NO: 54606 - protein, 312 aa, Unknown
  Obtained from environmental sample
  DOMAIN (220)...(309): ATP synthase alpha/beta chain, C terminal domain
  misc_feature (1)..(312): Xaa is any amino acid
MIRSAEASHNRLAAQIVRQAKIISAGSSGQFVVVFCAMGVKNDVARFFLDDFERSGVLSNVVIFLSLADAPSLERLIAPRCALTAAEYLAYEKDMHVLVVMTDMTNYCEALREVSSIRGEVPSRKGYPGYLYSDLAALYERAGKIKDREGSITQLPILTMPNDDISHPIPDLSGYITEGQIVLDRELFQRGIYPPVAGLPSLSRLMKDGIGPGMTREDHKDVASQLFAAYSKVKQVRNLVSIIGEEELSETDKCYLKYGEDFERMFLIQGDNENRTIAQTLDLGWKVLGTLPRDELLRINQEFIKKYLDKNE

SEQ ID NO: 54607 - DNA, 312 bp, Unknown
  Obtained from environmental sample
  misc_feature (1)..(312): n is a, c, g, or t
gtgatcctcgcgggtcatgccggggcctatgccgtccttcataagccgcgagaggctgggcaggcccgcgaccggcgggtaaatccccctctggaaaagctcgcggtcaaggactatctggccctcggttatatagccggaaaggtcagggatcgggtggctgatatcatcattgggcatggtaagaatcggcagttgggtaatggaaccttccctgtcctttatctttcccgcccgctcgtacaacgccgcgagatccgagtacaggtagccgggatagcctttgcggctggggacttcaccgcgtattga

SEQ ID NO: 54608 - protein, 103 aa, Unknown
  Obtained from environmental sample
  misc_feature (1)..(103): Xaa is any amino acid
MILAGHAGAYAVLHKPREAGQARDRRVNPPLEKLAVKDYLALGYIAGKVRDRVADIIIGHGKNRQLGNGTFPVLYLSRPLVQRREIRVQVAGIAFAAGDFTAY

SEQ ID NO: 54609 - DNA, 567 bp, Unknown
  Obtained from environmental sample
  misc_feature (1)..(567): n is a, c, g, or t
atgaaccgccccccgatagcggcggccccctacgacgcggagctattcggccactggtggttcgagggtccggagtggctgaacttcctgatccgcaaatgcgcgacagaccaagacgttttcgctctgataacgccgtcggaatatctggagcggcaccccgagagccagacatgcgcccccgcgttttcgagctggggcgacggcgggtactcgcaggtctggctaaacgagacaaacgagtggatatacccgcacctgcaccgcttggaagacaggatggtagagtgcgcgcgggaattccgattggtaggttgcgggctggaacagagggcgctaaaccagatggccagggaactgctgctcgcgcaatcgagcgattgggcgtttataatgaaaaccgggacgacggtggagtacgcgacgcgcagggtcaaagagcacatagcgagctttttgaaactgtacgaccaagtgaagggacgatgtatagacgagtcttttgtggcgcttttagagtcgcataacaatatttttccttggattgattttagggtttactgctga

SEQ ID NO: 54610 - protein, 188 aa, Unknown
  Obtained from environmental sample
  misc_feature (1)..(188): Xaa is any amino acid
MNRPPIAAAPYDAELFGHWWFEGPEWLNFLIRKCATDQDVFALITPSEYLERHPESQTCAPAFSSWGDGGYSQVWLNETNEWIYPHLHRLEDRMVECAREFRLVGCGLEQRALNQMARELLLAQSSDWAFIMKTGTTVEYATRRVKEHIASFLKLYDQVKGRCIDESFVALLESHNNIFPWIDFRVYC

SEQ ID NO: 54611 - DNA, 786 bp, Unknown
  Obtained from environmental sample
  misc_feature (1)..(786): n is a, c, g, or t
gtgaaggcgatacccaaggacccgcagaacaccttcgtctactgggagctgcccaaggggcaggcggagggaagcctcttcgcggacaggggaacggcgcacgtgggccacgacgaggcggtgaggatcggccaacagctaaacgagaaccagcgccggcgtcaggccgatgaacaccgcaacgaggagggcggctatcatcaaataaattgggataacggaaatcactataactttgacgacggcaatcaacagcaccaccgcggcgtcgataattaccgtcaagacgataccggcaatcgtcaaacaaattgggacgacggcagccggcagcatcaccacggcgttgataattaccgtcaaatcaattgggacgacggcaatcaataccgccaagacgacgggcgccggcatcagcatcaccactacgccgacaatcggtatatttggaacgacggcaatcaataccgccttgaggatatatatcaacaactcaataatctcaatcaatacaattggagcgacggcgaccgataccgcattgacgaaatacgtcaacatttccataataacgcggacggtatctatcaactcaactggaatgacggcggcgattacgccgcgcgccataacgacggcgccgcgttctcggagatgcttgaggctctgatagcgcggtgcaatcggtacattgccgactaccgccaaagcgggagcagcccgccggcctatgctataagctccggcctcctcatccgcgatatagacgaggagatacgttcatga

SEQ ID NO: 54612 - protein, 261 aa, Unknown
  Obtained from environmental sample
  misc_feature (1)..(261): Xaa is any amino acid
MKAIPKDPQNTFVYWELPKGQAEGSLFADRGTAHVGHDEAVRIGQQLNENQRRRQADEHRNEEGGYHQINWDNGNHYNFDDGNQQHHRGVDNYRQDDTGNRQTNWDDGSRQHHHGVDNYRQINWDDGNQYRQDDGRRHQHHHYADNRYIWNDGNQYRLEDIYQQLNNLNQYNWSDGDRYRIDEIRQHFHNNADGIYQLNWNDGGDYAARHNDGAAFSEMLEALIARCNRYIADYRQSGSSPPAYAISSGLLIRDIDEEIRS

SEQ ID NO: 54613 - DNA, 570 bp, Unknown
  Obtained from environmental sample
  misc_feature (1)..(570): n is a, c, g, or t
ttggcggtagtcggcaatgtaccgattgcaccgcgctatcagagcctcaagcatctccgagaacgcggcgccgtcgttatggcgcgcggcgtaatcgccgccgtcattccagttgagttgatagataccgtccgcgttattatggaaatgttgacgtatttcgtcaatgcggtatcggtcgccgtcgctccaattgtattgattgagattattgagttgttgatatatatcctcaaggcggtattgattgccgtcgttccaaatataccgattgtcggcgtagtggtgatgctgatgccggcgcccgtcgtcttggcggtattgattgccgtcgtcccaattgatttgacggtaattatcaacgccgtggtgatgctgccggctgccgtcgtcccaatttgtttgacgattgccggtatcgtcttgacggtaattatcgacgccgcggtggtgctgttgattgccgtcgtcaaagttatagtgatttccgttatcccaatttatttgatgatagccgccctcctcgttgcggtgttcatcggcctgacgccggcgctggttctcgtttag

SEQ ID NO: 54614 - protein, 189 aa, Unknown
  Obtained from environmental sample
  misc_feature (1)..(189): Xaa is any amino acid
MAVVGNVPIAPRYQSLKHLRERGAVVMARGVIAAVIPVELIDTVRVIMEMLTYFVNAVSVAVAPIVLIEIIELLIYILKAVLIAVVPNIPIVGVVVMLMPAPVVLAVLIAVVPIDLTVIINAVVMLPAAVVPICLTIAGIVLTVIIDAAVVLLIAVVKVIVISVIPIYLMIAALLVAVFIGLTPALVLV

SEQ ID NO: 54615 - DNA, 435 bp, Unknown
  Obtained from environmental sample
  misc_feature (1)..(435): n is a, c, g, or t
ttgacgacggcaatcaacagcaccaccgcggcgtcgataattaccgtcaagacgataccggcaatcgtcaaacaaattgggacgacggcagccggcagcatcaccacggcgttgataattaccgtcaaatcaattgggacgacggcaatcaataccgccaagacgacgggcgccggcatcagcatcaccactacgccgacaatcggtatatttggaacgacggcaatcaataccgccttgaggatatatatcaacaactcaataatctcaatcaatacaattggagcgacggcgaccgataccgcattgacgaaatacgtcaacatttccataataacgcggacggtatctatcaactcaactggaatgacggcggcgattacgccgcgcgccataacgacggcgccgcgttctcggagatgcttgaggctctga

SEQ ID NO: 54616 - protein, 144 aa, Unknown
  Obtained from environmental sample
  misc_feature (1)..(144): Xaa is any amino acid
MTTAINSTTAASIITVKTIPAIVKQIGTTAAGSITTALIITVKSIGTTAINTAKTTGAGISITTTPTIGIFGTTAINTALRIYINNSIISINTIGATATDTALTKYVNISIITRTVSINSTGMTAAITPRAITTAPRSRRCLRL

SEQ ID NO: 54617 - DNA, 540 bp, Unknown
  Obtained from environmental sample
  misc_feature (1)..(540): n is a, c, g, or t
gtgcaatcggtacattgccgactaccgccaaagcgggagcagcccgccggcctatgctataagctccggcctcctcatccgcgatatagacgaggagatacgttcatgaccccgcgcggctatctctccatcgtcctgcacgcccacctacctttcgtccgccatccggagaccaactacatgatggaggagaactggctgtacgaggcggcgaccgagacctacataccgctgctcgcctacttcgacaacctgctttccgacgccgtccccttcagggtgacgatggttctcacgccgacgctgtgcgccatgctcagcgacgatcttctgcgcggcaggtacgccgcccacatcgagcgccttatcgagcttgccgacnaagaggtcaagcgcacgcggcacgacgcggttacgaaccgaacggcgcggatgtatctggagcgttttctcctcntgtcatacattttcgaggataagtacgggcgcgacctgatctccggattcaggaagctcccagaacgccgcgttttggaataa

SEQ ID NO: 54618 - protein, 179 aa, Unknown
  Obtained from environmental sample
  misc_feature (1)..(179): Xaa is any amino acid
MQSVHCRLPPKREQPAGLCYKLRPPHPRYRRGDTFMTPRGYLSIVLHAHLPFVRHPETNYMMEENWLYEAATETYIPLLAYFDNLLSDAVPFRVTMVLTPTLCAMLSDDLLRGRYAAHIERLIELADXEVKRTRHDAVTNRTARMYLERFLLXSYIFEDKYGRDLISGFRKLPERRVLE

SEQ ID NO: 54619 - DNA, 1005 bp, Unknown
  Obtained from environmental sample
  misc_feature (1)..(1005): n is a, c, g, or t
atgattataccggcaatcccaataaataatccatggattaccgccggtatcgccatagccgcctttcttgccgcgggtggtcttgtcatgctgtttttagttcctattgtggttttttataacacaagctgccgcagctccggaaagacaagaacgcgggagtgtaccaacaaaaaggacgaacagcaaatgcgcatgtggaacgaaggcgtagattgggctcgcaggtttaaggacaaaacggaagaactgagtattataagcggcgatgggcttaaattgtacggcgagtacatagatttcgggtacgataaatgcgccgtaatattgccggggcggacggaatcgttgatctattcatactatttcgccgatgtctattacaaaaacggccacaacattttgacagtcgatgtcagggcgcacgggcttagcgacgggaaatatcaaacgggcgggataaaggaaagcgatgattgcattttgtggattaagctcttaaacgaaaagtatggtattaacgattttacggttcacggcatctgcataggcggagcgacggcgatttatacgtacgtaaagttgaaaaactcaagtaacgcccttgtaaaacggatagtgacggacggtgtgttccaaagttattacgagatgtacaagatgaactttaaattatataaaaaaccaaccttcccttcgcttcatttgtgcttcttcctcatttatgcgttggccgaggtcaggccttttaaggaaacgccgctgaaatatatgaaagatatagacatcccgattttatttatctggagcaagcgggatattttctgtactaacaagaagagcgaggagttgttaacgcgtgcgcgtcgaaatacaagaagctttgcttttttccggagggcaggcactctcacgtcaggtctacccaggaggctgaatacgatgaagttatcgctaaattcctgcaaaaacacgcgtaatatatcaggaagctctgtcttgtaa

SEQ ID NO: 54620 - protein, 334 aa, Unknown
  Obtained from environmental sample
  misc_feature (1)..(334): Xaa is any amino acid
MIIPAIPINNPWITAGIAIAAFLAAGGLVMLFLVPIVVFYNTSCRSSGKTRTRECTNKKDEQQMRMWNEGVDWARRFKDKTEELSIISGDGLKLYGEYIDFGYDKCAVILPGRTESLIYSYYFADVYYKNGHNILTVDVRAHGLSDGKYQTGGIKESDDCILWIKLLNEKYGINDFTVHGICIGGATAIYTYVKLKNSSNALVKRIVTDGVFQSYYEMYKMNFKLYKKPTFPSLHLCFFLIYALAEVRPFKETPLKYMKDIDIPILFIWSKRDIFCTNKKSEELLTRARRNTRSFAFFRRAGTLTSGLPRRLNTMKLSLNSCKNTRNISGSSVL

SEQ ID NO: 54621 - DNA, 804 bp, Unknown
  Obtained from environmental sample
  misc_feature (1)..(804): n is a, c, g, or t
ttggatttaagcgacgccgaactcgatgccttttataaggcgctaaaggccagcccaggcaaatacaaaacggcttcgtttggcgtagaagcggtcacttcgttttttgaggcctttctgctggaaaaaagggacattttggcgctatgtttatccagcaaactgagcgcgccttacaacgtaatgacgcacgccgcaaaacagcttttagaaaaatatccggagcggaaaataaccgttgtggattccagaaaatattcgttggggctcggacttctgataataaaagccacggaactccgcgcggccggtctgtcgttaactgaaaacgcggaaaaactggagacaatcaaaaaaaccgtgcatcaaatgggctccgttgacgatttattctgggttgcctcaaaaggaagaatttcgcacgcaaaagcgtttttcggaactatcgcgggaataaaggcaatgggcgattttgacgcggacggcatggttacgcctttggcaaaacttagcggctataaaaaggcataccaggctaccatcgaatatataaagaaaacaattaaggacgcaaacgagcaaatcattcttgtagctcattccgcgagaaaggaacaggcgaaaactttggctgaactgataaaagaacaaattaagcccagagagattattatttgtaacatatatccgatgaacggagtaaacattggaccggggctttgcgccgcgtattatcttgggacggaaataacagacttatcgtacgagaaggaaatcattaacgaggtcatatcgaaattatga

SEQ ID NO: 54622 - protein, 267 aa, Unknown
  Obtained from environmental sample
  DOMAIN (34)...(248): Uncharacterized protein, DegV family COG1307
  misc_feature (1)..(267): Xaa is any amino acid
MDLSDAELDAFYKALKASPGKYKTASFGVEAVTSFFEAFLLEKRDILALCLSSKLSAPYNVMTHAAKQLLEKYPERKITVVDSRKYSLGLGLLIIKATELRAAGLSLTENAEKLETIKKTVHQMGSVDDLFWVASKGRISHAKAFFGTIAGIKAMGDFDADGMVTPLAKLSGYKKAYQATIEYIKKTIKDANEQIILVAHSARKEQAKTLAELIKEQIKPREIIICNIYPMNGVNIGPGLCAAYYLGTEITDLSYEKEIINEVISKL

SEQ ID NO: 54623 - DNA, 624 bp, Unknown
  Obtained from environmental sample
  misc_feature (1)..(624): n is a, c, g, or t
atggggaatattgcgcctaacacactttaccgcagcagccatcccattaaagacgataaacaggaacgtgttatttcaatgcttgcgtcaagcgcgcggattgccgcggtattaaatttatctgactttgacgctgaaataaaaagaaaggcgttttttgccccctggtacaacaagctccttaaagacaacaaggttattgccctgggtatggactttagccaaaccagcgaatattttcaaaaaaaattaaagaaagggcttcaattcatcatcaataccgaaggaccctggcttattcattgccacgcgggaattgaccggacgggttttttttccattgtgctggaatcccttatgggggcggcgctggacgagattatcaacgattaccttcggtcatttaatagtatatataattcgagcatttacagtgaagttaacaaaggggattctcttattgtaatgcagcttttgtccgctatgggtaattatatgcctgtaaacgaccaaaatttgacggctatcgccgaacattatcttctacataccatcaagttgtccgccgcggaaatagagctgcttaaaggaaaactggcaaaaaccataagcattatccaataa

SEQ ID NO: 54624 - protein, 207 aa, Unknown
  Obtained from environmental sample
  misc_feature (1)..(207): Xaa is any amino acid
MGNIAPNTLYRSSHPIKDDKQERVISMLASSARIAAVLNLSDFDAEIKRKAFFAPWYNKLLKDNKVIALGMDFSQTSEYFQKKLKKGLQFIINTEGPWLIHCHAGIDRTGFFSIVLESLMGAALDEIINDYLRSFNSIYNSSIYSEVNKGDSLIVMQLLSAMGNYMPVNDQNLTAIAEHYLLHTIKLSAAEIELLKGKLAKTISIIQ

SEQ ID NO: 54625 - DNA, 849 bp, Unknown
  Obtained from environmental sample
  misc_feature (1)..(849): n is a, c, g, or t
gtgaaccgcatttccacaataagccgagatattgaatttctgcgggaacggctttccgctccaattgactatgacgcctttaacaaaggttattactactcggaaaaaacattccgtctgccggcagggtttacaagcgccgatgatttactggccctcggcatggcaagaagcatcttttcgctgtacagggagacacctatttatgaagcgtcccgccagcttttggaaagtatcaccacccccatagcttctgacggcaacatggattggctggataaccggattatggttcccaaaattgcctcctcaaaaattaaccccgatgtttggaaacttgtcgtatcaggattgaaagaaaaccgtgttatcgtttttgattacaaggggacatgggacgaagaataccaaaacaggcgggtgcgcccttaccagctcttattcgataatggagtatggtatctgtacggtttttcagaagaacgcggggcagagcgtatcttctccctgatgagaataaaaaatgccgtactcaccaaagatggttttactctgccgaataattacagttacgctgatttttccggcgatagttacttcggggtttttatcggtcaggaaaaaaagagttatgccatagattgttatgaagaagcgatcgtttttgtgtccgaccgtcaatgggctgcgaatcaaaaaatcaccgaaataaaagacggtattaaaatcgaatttaccagtacccaatatgacagggtgttaaaatgggttttgtcctgcggttgttatgttgtccctcggaaccaaagaaactggttgatgattggaaatggcatattcgggaaatga

SEQ ID NO: 54626 - protein, 282 aa, Unknown
  Obtained from environmental sample
  misc_feature (1)..(282): Xaa is any amino acid
MNRISTISRDIEFLRERLSAPIDYDAFNKGYYYSEKTFRLPAGFTSADDLLALGMARSIFSLYRETPIYEASRQLLESITTPIASDGNMDWLDNRIMVPKIASSKINPDVWKLVVSGLKENRVIVFDYKGTWDEEYQNRRVRPYQLLFDNGVWYLYGFSEERGAERIFSLMRIKNAVLTKDGFTLPNNYSYADFSGDSYFGVFIGQEKKSYAIDCYEEAIVFVSDRQWAANQKITEIKDGIKIEFTSTQYDRVLKWVLSCGCYVVPRNQRNWLMIGNGIFGK

SEQ ID NO: 54627 - DNA, 591 bp, Unknown
  Obtained from environmental sample
  misc_feature (1)..(591): n is a, c, g, or t
atggctacgattaaaacgccggaacacagaccacagatggcgacggttcgcccccgctcttcccggccattggaaagggacgccaaacgaaacggaaagataatccgcttctcgttaggcgacacccttcccgatggcggacgcttccctgtgttaaaggaaggccggacaagggtaacaggctaccgcagggatgagaccggcttcgcgaatcttgaggaagcggaattgataatcgccggcgggcggggccttaaaaagggcgaaaactttgccatcgtcagggagttggcgcgcagcctgggcggtgaagtcggggcaagcagagacgccgtagaccggggctggattagctacccccaccaggtgggtctttccggcaagaccgtgtctcccaaagtatatataggcgtcggcatttctggcgctattcagcatctggcggggatcaaaaccagcgaaaccatagtttcaatcaacatcgatccggacgccaatctccacaagctcgccgaccttgccatagtgggggacgccttcgaggtgcttggggagctgcaaaagcgcgtaaaaaaagcagggaatgattaa

SEQ ID NO: 54628 - protein, 196 aa, Unknown
  Obtained from environmental sample
  DOMAIN (69)...(154): Electron transfer flavoprotein FAD-binding domain
  misc_feature (1)..(196): Xaa is any amino acid
MATIKTPEHRPQMATVRPRSSRPLERDAKRNGKIIRFSLGDTLPDGGRFPVLKEGRTRVTGYRRDETGFANLEEAELIIAGGRGLKKGENFAIVRELARSLGGEVGASRDAVDRGWISYPHQVGLSGKTVSPKVYIGVGISGAIQHLAGIKTSETIVSINIDPDANLHKLADLAIVGDAFEVLGELQKRVKKAGND

SEQ ID NO: 54629 - DNA, 744 bp, Unknown
  Obtained from environmental sample
  misc_feature (1)..(744): n is a, c, g, or t
atgaaacagggcgttctaattcctgtttataagcacagtaaaaccgcagaacccctggcgaaacaatttgcttctttgggcttgcctgtaatcgtggtagatgacgggaatgatcaggagaacagggattgtcttcgtgaatggaccgccaatacacccggaatctttctggtaagcctgaaaaaaaacatgggaaaaggaggagccatttccaaaggtttggaaaaagcggcggaacttggccttagccatgtgttacagatagacgccgacggccagcatgatgccgggaaagccgcttactttcttgaggagtccgcccggcatcctgatatggttatctgcggatatccggaatttgatgaaaccgctcccagaagcagggtgacaggacggaagatttccaatttctgggccgctgtggttacgctttcaacggaactcaaggacgtgctttgcggtttcagggtatatccggtggatgtatcattacgcataacccgatgtctctttcttgacaagcgcatgggctttgacccggaaatcatggtacgcctgtactggaaaaaggtgtttccggtatttcaccctgtaaaaataacttacccgccggacgggatttccaatttccatatggtcagggacaatatccgcataagcctgatgtttacccggctgtttatgggtatgcttctgcgcctgccgctgttgattgccttgaaaagaaaacggaaggaaaaataa

SEQ ID NO: 54630 - protein, 247 aa, Unknown
  Obtained from environmental sample
  DOMAIN (4)...(167): Glycosyl transferase family 2
  misc_feature (1)..(247): Xaa is any amino acid
MKQGVLIPVYKHSKTAEPLAKQFASLGLPVIVVDDGNDQENRDCLREWTANTPGIFLVSLKKNMGKGGAISKGLEKAAELGLSHVLQIDADGQHDAGKAAYFLEESARHPDMVICGYPEFDETAPRSRVTGRKISNFWAAVVTLSTELKDVLCGFRVYPVDVSLRITRCLFLDKRMGFDPEIMVRLYWKKVFPVFHPVKITYPPDGISNFHMVRDNIRISLMFTRLFMGMLLRLPLLIALKRKRKEK

SEQ ID NO: 54631 - DNA, 1206 bp, Unknown
  Obtained from environmental sample
  misc_feature (1)..(1206): n is a, c, g, or t
atgtatacgtcgggaagcacgggaaaacccaaagcggtacaacagaggcttacggaatttgaagccgacaaccgttttataatttccaaatggggtgatgaattccttaagcgcaaattgtgttccaccgtaagccagcatcatatatacggaatcctgttttcaatacttttgccttttactttgggagcgcctttccggagaagacggatagaatttcccgaggaaatggaaaagttatccgatacggaatacatgatcataacggtgccggctttcctcaagcgggccgtggaaatggaagattcatcctgtcttaaccttaaatcaccgtggatatttacttcaggcggcgttcttaagtttgaaaccgctgaaaaaacaaacgatgtttttggcttttggcccgtggaagtttacggaagtacggaaacttcaggcatcgcgtggaggcagtcggttaacggccaggagtggactgtctttgacaacgcgaagataagtcaaaataaagacggatgtttgattatccgctcgccgtatatcaaagacccggcaggttttgaaacagccgacatggtggaaattctaaaagacggacgatttctgcttaaaggtcgcattgactctgttgtaaaaatagaagaaaagcgcgtctcctttactgaaattgaaaatcgtattttacagtccggtcttgtctccgacatatgcgtaatttatatggaggacaagcgccaatacctcgccgccgcgatagtctttaacagcaagggaaaaaaacgctttgacgggcttgaaaaacatgaaataaaccaattttggagggaacaccttcttaaatattttgataacatagttattcccaaaaaatggcgctaccttgaacgtctgccccttgatgctcaggggaaaataatgaaagaaaatatccggcttcttttttccggtgaaccgggaactgaggcaagaattattcaaggaaccgaaacttccgttagcctggaatttttaattccggataccagtccctggtttgacggtcattttcccggattccccatccttccggcagttgcccagatagaattggcgcttcgttttgcgtcacaatatttcggaacccgcatcgggatttctgaaatacggaaattaaaatttttcaaatatgattggccctttcagtcctcttgttctgacaattga

SEQ ID NO: 54632 - protein, 401 aa, Unknown
  Obtained from environmental sample
  misc_feature (1)..(401): Xaa is any amino acid
MYTSGSTGKPKAVQQRLTEFEADNRFIISKWGDEFLKRKLCSTVSQHHIYGILFSILLPFTLGAPFRRRRIEFPEEMEKLSDTEYMIITVPAFLKRAVEMEDSSCLNLKSPWIFTSGGVLKFETAEKTNDVFGFWPVEVYGSTETSGIAWRQSVNGQEWTVFDNAKISQNKDGCLIIRSPYIKDPAGFETADMVEILKDGRFLLKGRIDSVVKIEEKRVSFTEIENRILQSGLVSDICVIYMEDKRQYLAAAIVFNSKGKKRFDGLEKHEINQFWREHLLKYFDNIVIPKKWRYLERLPLDAQGKIMKENIRLLFSGEPGTEARIIQGTETSVSLEFLIPDTSPWFDGHFPGFPILPAVAQIELALRFASQYFGTRIGISEIRKLKFFKYDWPFQSSCSDN

SEQ ID NO: 54633 - DNA, 942 bp, Unknown
  Obtained from environmental sample
  misc_feature (1)..(942): n is a, c, g, or t
atggacgacatacgcggcgtgttcaggcagtgcgagctgtttgcggggctatccgaccccgacttggacgtggtccttggtgtggcaaagcggctggaccttccgccaggttcttggctgttcaagcagggcgagccgaggcgggcgtgctttgtagtgatagacggcgtagtggaggttacaagggacggcggcgaaggctcggaggtgctggtgacgctgcgccagggcgacatggctggcgaggcatcgctgctgcacgccaacgagcacacggcctcggcccagacgatgacgcccgcgacgatagtcgaaatagagagggacaccctccgcaacgcactcgcaaagaacggtcacgctgcggtgcaggttctgactaaggtggcaacggtcctgaaccgtcgcctgctctacacgggcagcagacagtcaggtcagaggcagttctacgattcaggcgccgtcaggtctgaatccgacctcctgggcgccatgaacgtaccggaggacgcgctctttggtgtgcagacgctgcgggcactggagaactttccgataaccggcatacagctatcccacttccccgcgctggtgcgggcactggcgatggtcaagcaggcctcggcaagggccaactctaggctcaagctgctcgaacctacggtggctagggccatagaccaagcctgccaagaaatcatagacgggcactggcagggtcacttccccgttgacatggtgcagggcggcgcgggcacctcaaccaacatgaacgccaacgaggtaatagccaaccgcgctctggagataatgggcaaaaagcgcggcgagtacgcggcgtgccaccccaacgatcacgtcaacctgagccagagcaccaacgacgtgtacccgacttccattaggctagcgtcccgttcatgctctcggccgatctga

SEQ ID NO: 54634 - protein, 313 aa, Unknown
  Obtained from environmental sample
  DOMAIN (164)...(313): Lyase
  misc_feature (1)..(313): Xaa is any amino acid
MDDIRGVFRQCELFAGLSDPDLDVVLGVAKRLDLPPGSWLFKQGEPRRACFVVIDGVVEVTRDGGEGSEVLVTLRQGDMAGEASLLHANEHTASAQTMTPATIVEIERDTLRNALAKNGHAAVQVLTKVATVLNRRLLYTGSRQSGQRQFYDSGAVRSESDLLGAMNVPEDALFGVQTLRALENFPITGIQLSHFPALVRALAMVKQASARANSRLKLLEPTVARAIDQACQEIIDGHWQGHFPVDMVQGGAGTSTNMNANEVIANRALEIMGKKRGEYAACHPNDHVNLSQSTNDVYPTSIRLASRSCSRPI

SEQ ID NO: 54635 - DNA, 621 bp, Unknown
  Obtained from environmental sample
  misc_feature (1)..(621): n is a, c, g, or t
ttgatacgcaaaagactgctcgctggactgttttcgctgctgccccttgggataaccatctggttcctcaagatagttttcaacgtactgataggcattttcaaggcacccctgaaccagaccgcgaagctgctgggcctcgacacaccggtctattggcagctggccgtgttttcgctgttggcgatggtcctgctgctgtttttggtggggacactggtgcagaactacatggggcgccgcctcatgggctggctagacacgctgatgatgaacatcccttgggtcaagggcgtgtacggcgccatcaagcaggtgatgggcgccatccagaacggcaagggcggcagtttcagggaagtggtcctggtccgctggccgaactccaacatgaggctggtgggcttcgtggccagccggggatgctcgtgggccatcgaaggcggcgagggatacattacggtctatatccccacgtcacccaaccccacaacgggcatggtggtcatgctggaggagtccgcagtcacccgcttggacatgacaccagagcaggccctgacctgggtggtgtcaagcggagtggcagttccaggtgtcaagccagttgtcagtgaataa

SEQ ID NO: 54636 - protein, 206 aa, Unknown
  Obtained from environmental sample
  SIGNAL (1)...(17)
  DOMAIN (52)...(203): Protein of unknown function (DUF502)
  misc_feature (1)..(206): Xaa is any amino acid
MIRKRLLAGLFSLLPLGITIWFLKIVFNVLIGIFKAPLNQTAKLLGLDTPVYWQLAVFSLLAMVLLLFLVGTLVQNYMGRRLMGWLDTLMMNIPWVKGVYGAIKQVMGAIQNGKGGSFREVVLVRWPNSNMRLVGFVASRGCSWAIEGGEGYITVYIPTSPNPTTGMVVMLEESAVTRLDMTPEQALTWVVSSGVAVPGVKPVVSE

SEQ ID NO: 54637 - DNA, 675 bp, Unknown
  Obtained from environmental sample
  misc_feature (1)..(675): n is a, c, g, or t
atgaaccttcccaacacactgactgtcatccggatactcttggtgccggttctggtggtcatactcatgacgcgcgtgcagcaccacgctatcattggctccattgtcttttggatagcgtgcataacggatttctatgatgggtactacgcccgcaagctgcgccaagtgacgatcctaggcaagctcctcgacccgctggccgacaagctgctggtctcgggggccctgttgagcctcatagagttgggtctgacgccggcttggatggcattcataatattggccagggaactggccgtcaccggtctgcgcggactggccagcgaagaggggctgaccatcgcggccgactggctgggcaagtggaagctgggggcccagatagccgccatatcctgcctgctcttcggccgtgtgctggacgggtggctgttccagctcactggtctcgatgtgttcggcgagtggcgcctgggcgcggcattgagccgcaacctgcaagacactgaccattgggggcttttcggtgtgctgggtcttttcctcatgtgggtggccatgatactggccgtcttgagcgccacaacctacttcatgtccttctggcgcagcctcggcgataaactcatgcacggccaaggaaggctgaccggcaacgacgatggagactga

SEQ ID NO: 54638 - protein, 224 aa, Unknown
  Obtained from environmental sample
  DOMAIN (34)...(201): CDP-alcohol phosphatidyltransferase
  misc_feature (1)..(224): Xaa is any amino acid
MNLPNTLTVIRILLVPVLVVILMTRVQHHAIIGSIVFWIACITDFYDGYYARKLRQVTILGKLLDPLADKLLVSGALLSLIELGLTPAWMAFIILARELAVTGLRGLASEEGLTIAADWLGKWKLGAQIAAISCLLFGRVLDGWLFQLTGLDVFGEWRLGAALSRNLQDTDHWGLFGVLGLFLMWVAMILAVLSATTYFMSFWRSLGDKLMHGQGRLTGNDDGD

SEQ ID NO: 54639 - DNA, 324 bp, Unknown
  Obtained from environmental sample
  misc_feature (1)..(324): n is a, c, g, or t
ttggccttccagcagggggtagcggagcgagaaatcctgggccatgcgcaccagggcgtcgtaaagggcaagatcaccgtgggggtgaaacttacccatggtgtcgcctacgatacgggcgcactttttggtggaggcgttgtgcctgagccccagttcgcccatggagtacataagccgcctgtgaaccggcttaagcccgtcccgcacgtcgggcagggccctggctacaataaccgacatggcgtaattgaggtaatcggtttttacctcgtcttctatcgcaacggctattactttccctgtgggggctgtctcgcctga

SEQ ID NO: 54640 - protein, 107 aa, Unknown
  Obtained from environmental sample
  misc_feature (1)..(107): Xaa is any amino acid
MAFQQGVAEREILGHAHQGVVKGKITVGVKLTHGVAYDTGALFGGGVVPEPQFAHGVHKPPVNRLKPVPHVGQGPGYNNRHGVIEVIGFYLVFYRNGYYFPCGGCLA

SEQ ID NO: 54641 - DNA, 300 bp, Unknown
  Obtained from environmental sample
  misc_feature (1)..(300): n is a, c, g, or t
atgctttacggaatattctctgacatacacgccaatttgcctgcactagaggctgtgctgcgctcaatggattcgcgcaaggttgaaaggcgaatttgcctgggcgatattgttggctacggaccaagcccaaacgaatgtgttgccattgtgaaagagcatagcgatgtatgccttttgggaaaccacgataatgtagctttaaaaagagagcatcattttgattttaacatctatgcaaaagccgcaatggaatggacttggggatccatttggaatatgaatcaaaagagtatttga

SEQ ID NO: 54642 - protein, 99 aa, Unknown
  Obtained from environmental sample
  misc_feature (1)..(99): Xaa is any amino acid
MLYGIFSDIHANLPALEAVLRSMDSRKVERRICLGDIVGYGPSPNECVAIVKEHSDVCLLGNHDNVALKREHHFDFNIYAKAAMEWTWGSIWNMNQKSI

SEQ ID NO: 54643 - DNA, 594 bp, Unknown
  Obtained from environmental sample
  misc_feature (1)..(594): n is a, c, g, or t
atgttcacgggcatagttcaaacttgcggaaaaattgcggaattgaaaaaattaggcgatgccctgcagatgaaaatttatgccgaaaactattttgcaagcagcaaaaaaggcgatagcgtggcaaacgatggtgtttgcttgaccatagagagctgcacggcaagcgaagcggttttcacaatgataaagcaaacaatagacaacacatctttttgcaaagccaccacccaaggcttggtgaatttggaactcccttgccgtcccgattctctgatgggtgggcattttgttatggggcatatagacagcgttgccaatgtgacgcagattgttaaaagagaaacaggcttggaaatagatttggaaataccggaaaatctctcaaaatacgtaattcacagaggctcaatagcattaaatggaattagccttacagtggctgaattaccgcagaaaaatacaatcagagttgccattatccccgaaacaataagagtgaccaatatcggcaattgggagataggcagcttggtaaatgttgaagttgatatgatggcaaaatatattgaaaaactactcccgagaccttaa

SEQ ID NO: 54644 - protein, 197 aa, Unknown
  Obtained from environmental sample
  DOMAIN (3)...(86): Lumazine binding domain
  misc_feature (1)..(197): Xaa is any amino acid
MFTGIVQTCGKIAELKKLGDALQMKIYAENYFASSKKGDSVANDGVCLTIESCTASEAVFTMIKQTIDNTSFCKATTQGLVNLELPCRPDSLMGGHFVMGHIDSVANVTQIVKRETGLEIDLEIPENLSKYVIHRGSIALNGISLTVAELPQKNTIRVAIIPETIRVTNIGNWEIGSLVNVEVDMMAKYIEKLLPRP

SEQ ID NO: 54645 - DNA, 783 bp, Unknown
  Obtained from environmental sample
  misc_feature (1)..(783): n is a, c, g, or t
ttgcgcttgggttatattcagcaaatttttctatatttacccctaaataaagcggagacagagatgaaacaaatatcagcgcaaaaccttgatttcaaggaactgaacgagcaagtgaaagcggctacggaagatgtttgcgtagaccattgctatgggcaaagatttatgggcagtgccatgaaaggaaaaacacttgtgataaacggcacacccggaaatgctctaggcgcttatttagacggtggaacaattgaggtaaacggcaacgcccaagacgcagttggcgacacaatgaatgatggtagcataatagtacacggtagcactggcgatgctttaggctatgccatgagaggcggcaatatttttatacgcggcaattctggctacagaaccggcattcacatgaaggaatacaaaaccaaaaagccagctatagtgataggtggcaaaacaggcagctttttgggtgaatatctagcaggcggagttatagtggtgcttggcatagatatagaagacatccccgttgggaatttcacaggtacaggcatgcatggcggcaaaatttttatcaggacaaaaaaggaactttctgggcttccagcgcaagttgtgttagatgtagcctctgctgacgacttgaaagaaatagaaccttatgttgcagaattcgctaaacattttggcgttgacacaggttcttatttgaaagaccgtttttatgtgttgaaaccaaatgcaaaaaatccttacaagcagttatatacgcataattag

SEQ ID NO: 54646 - protein, 260 aa, Unknown
  Obtained from environmental sample
  DOMAIN (20)...(232): GXGXG motif
  misc_feature (1)..(260): Xaa is any amino acid
MRLGYIQQIFLYLPLNKAETEMKQISAQNLDFKELNEQVKAATEDVCVDHCYGQRFMGSAMKGKTLVINGTPGNALGAYLDGGTIEVNGNAQDAVGDTMNDGSIIVHGSTGDALGYAMRGGNIFIRGNSGYRTGIHMKEYKTKKPAIVIGGKTGSFLGEYLAGGVIVVLGIDIEDIPVGNFTGTGMHGGKIFIRTKKELSGLPAQVVLDVASADDLKEIEPYVAEFAKHFGVDTGSYLKDRFYVLKPNAKNPYKQLYTHN

SEQ ID NO: 54647 - DNA, 549 bp, Unknown
  Obtained from environmental sample
  misc_feature (1)..(549): n is a, c, g, or t
gtgttattgcatttgccacgaaaagggcaatgctactctggaaacgaaacgcgacaaattttaatggaaataaagaaaaacgatattccctgtaaagtggtggtagccgcaaatttagaagaccctcataatctaggtgcttgcattcgctcttcgtttgcgcttggtgttaatattatgctgcttccagcaaaaggttcttgcggattaacgcctgccgtggagcgaagcgcggcaggaagccttgaaaaaatgaccctttgccgccccggcaatcttgaatttgccttgaaggaactcaaagatgctggttatcagattgttggtttagacgggcgcagtgaaactttaataaccgaatttgaattttccaagcacattgttatggcgattggcggtgaagacaaagggcttccgccatatataaaaaaattctgcaactccattgtgaaaatcccaatgtctgcagaagctcattcctacaacgcaagcgtggcacttgcgcttgggttatattcagcaaatttttctatatttacccctaaataa

SEQ ID NO: 54648 - protein, 182 aa, Unknown
  Obtained from environmental sample
  DOMAIN (31)...(172): SpoU rRNA Methylase family
  misc_feature (1)..(182): Xaa is any amino acid
MLLHLPRKGQCYSGNETRQILMEIKKNDIPCKVVVAANLEDPHNLGACIRSSFALGVNIMLLPAKGSCGLTPAVERSAAGSLEKMTLCRPGNLEFALKELKDAGYQIVGLDGRSETLITEFEFSKHIVMAIGGEDKGLPPYIKKFCNSIVKIPMSAEAHSYNASVALALGLYSANFSIFTPK

SEQ ID NO: 54649 - DNA, 912 bp, Unknown
  Obtained from environmental sample
  misc_feature (1)..(912): n is a, c, g, or t
ttgcgaggagcgaagcgacgaagcaatccagaatatttggggataggtacaatatttaattgtgtgatctatattcgtaaccgaattccggatgtgggggatattatgccgatacctaagaaaatacactattgttggttgagcggcgaaaaaatacccgaaggtataatgagtatgatgaatacttggaaagagtttatgcctgaatatgagtatgttttatgggataaaaataggttcgacgtaaattccgtcgctttcacaaaagaagcttgtagcgtgaaaaaatgggcgtttgcttccgattatataagaatttacgctctctattcggaaggcggcatatatatggatacggatgtatatgtcaaaaagccttttgacgagtttttgagcgacgattttttcacatccttggaatatcataaaaaatcggcgataaaggataaggcctntgagttgctgaatgacgacggcaccataaaaaacgagcgagatagaatattcacgcggtcaatagggatacaggccgccgtgttgggcggtgtaaaaggccacccgttcttaaaatcatgcttggattggtataaggataagcattttattctaccggacggaacatatcgcaataaaattatttcaccggcaatatacgccgatgttatgatagaatacgggtttcggtataaagacgagttgcaaaagctgaaggataatatggttatttatccgtcgtccgtatttgcgggaagtccaagcgaggcgaaaagcgaatcatacgcgattcattgttgcaacggcagctggagggatgagtcggaagatacgctattggaaaaaataagaaagaaattggtaagaagtagcttattacggaaattgctcgggaaaaagccgtatgtagggcaatga

SEQ ID NO: 54650 - protein, 303 aa, Unknown
  Obtained from environmental sample
  DOMAIN (1)...(264): Capsular polysaccharide synthesis protein
  misc_feature (1)..(303): Xaa is any amino acid
MRGAKRRSNPEYLGIGTIFNCVIYIRNRIPDVGDIMPIPKKIHYCWLSGEKIPEGIMSMMNTWKEFMPEYEYVLWDKNRFDVNSVAFTKEACSVKKWAFASDYIRIYALYSEGGIYMDTDVYVKKPFDEFLSDDFFTSLEYHKKSAIKDKAXELLNDDGTIKNERDRIFTRSIGIQAAVLGGVKGHPFLKSCLDWYKDKHFILPDGTYRNKIISPAIYADVMIEYGFRYKDELQKLKDNMVIYPSSVFAGSPSEAKSESYAIHCCNGSWRDESEDTLLEKIRKKLVRSSLLRKLLGKKPYVGQ

SEQ ID NO: 54651 - DNA, 774 bp, Unknown
  Obtained from environmental sample
  misc_feature (1)..(774): n is a, c, g, or t
ttgtttatctcggcgaagccaaaccccgcattttcaatcaaaatcaaaaaaaataccgcaaaaactatgtctctagtatcaataataatcgtcaactggaacggcgccgaagttttgccggagtgtctgcgcagcctgcttgggctcaaccataaggatgttgaaatcgtcattgtggacaacgcctcaaccgacgactctatcggcgtggtcggcaagatttgcggcgatagggcgaaggtggtccggctcgaaaagaacattgggtttgccgccggcgtaaacgcgggggttgagaactccgccggggagttcatcgccaccttaaacaacgacatggtcgtagaacccgcttggcttgaccaaccgctggaactgctgctcaaagacgaaaccataggcatagtcggttgccggcaaatgaattattacaaccgcggcatgattgacgggctttaccatcgcatttctaaggggcttgtactgctgccgacggcgagcgggtgcgcgttcagtgaaaacgagcttttctcaaagccgggatacgttatcagcgcaaacggcggttcggcggttatcagggcgaaactttttaaagacttgggcggatatgacgcggatttcttcggctatatggaggagacggatttttgcatgagggcctttctgcgcggttggcgttgcgtgtacgcccctatggcggtcgtgtatcacatggacggattcagttttaagaaggcgggcgggtatcgcatctattctcggccgatctga

SEQ ID NO: 54652 - protein, 257 aa, Unknown
  Obtained from environmental sample
  DOMAIN (27)...(202): Glycosyl transferase family 2
  misc_feature (1)..(257): Xaa is any amino acid
MFISAKPNPAFSIKIKKNTAKTMSLVSIIIVNWNGAEVLPECLRSLLGLNHKDVEIVIVDNASTDDSIGVVGKICGDRAKVVRLEKNIGFAAGVNAGVENSAGEFIATLNNDMVVEPAWLDQPLELLLKDETIGIVGCRQMNYYNRGMIDGLYHRISKGLVLLPTASGCAFSENELFSKPGYVISANGGSAVIRAKLFKDLGGYDADFFGYMEETDFCMRAFLRGWRCVYAPMAVVYHMDGFSFKKAGGYRIYSRPI

SEQ ID NO: 54653 - DNA, 936 bp, Unknown
  Obtained from environmental sample
  misc_feature (1)..(936): n is a, c, g, or t
atgaaacgctttgccgccggctcgcttctcgcaatattattgttcgcggtatccgcaatcgctcagccttgggacataggggagactccgaataccgttaccgccgtgtttagcggcgggacgctcacgatcagcgggtcgggggccatgaaggattacgagggcacgttcggcaggtatgacatcccgtgggacgaccgcagaggcagcattaccgccgtggtgattgaggagggcgtaacgcgtatcggcatatacgcgttttgggattgtccccgccttacttccgtaaatatttccggtagcgtgaaatatatcggcaacagcgcgttttcaagctgtaccggcctgaagtctatcgccattccgaacggcgtggacactatcggcgaaagcgcgttttcctattgcagcggccttacgtccgttactttcggcgagagcgtgagatatatcgcttataacgcgtttgccagatgtacaagccttgtgtctgtagttattcccaacggtgtgacggatatcggaacgcatgcctttgagggatgcccctttacctcctttgccattcccccgagcgtggagaatatctccggcgccgcattttacaaatgcgccaaactggtatctatagaagttgcgccggataatccgtatttgtgttccgaaggcggcgtattgttcaacaaaaacaaaacgggtctgctacgatatcctacagccaaacaaggcgacagctacactgttcccgacggcgtggagacgataggcactatggcgttttccgattgcgccgctcttaagtcggtaacaatttccaacagcgtgaaaactatcggcacgttcgcgtttgtaaattgcggcctcacctcggttatcatcggcggcagcgtggctgcaatcgatatggacgcgttaagaattgcgacgatctga

SEQ ID NO: 54654 - protein, 311 aa, Unknown
  Obtained from environmental sample
  SIGNAL (1)...(21)
  misc_feature (1)..(311): Xaa is any amino acid
MKRFAAGSLLAILLFAVSAIAQPWDIGETPNTVTAVFSGGTLTISGSGAMKDYEGTFGRYDIPWDDRRGSITAVVIEEGVTRIGIYAFWDCPRLTSVNISGSVKYIGNSAFSSCTGLKSIAIPNGVDTIGESAFSYCSGLTSVTFGESVRYIAYNAFARCTSLVSVVIPNGVTDIGTHAFEGCPFTSFAIPPSVENISGAAFYKCAKLVSIEVAPDNPYLCSEGGVLFNKNKTGLLRYPTAKQGDSYTVPDGVETIGTMAFSDCAALKSVTISNSVKTIGTFAFVNCGLTSVIIGGSVAAIDMDALRIATI

SEQ ID NO: 54655 - DNA, 1797 bp, Unknown
  Obtained from environmental sample
  misc_feature (1)..(1797): n is a, c, g, or t
gtgattaacatactcaaccccgacggcacgcttaacagcgaagtccccgaaaaataccgaggtcttcccgtgtcaaaggcgagagcggttgttattgaggacttgcaagcgggcggctggtttgtgaaggacgagcctattaaccactcggtcgggcattgttaccgctgtcatacggtaatagagccgtttctttcagaacagtggtttgtccgcatgaaaccgttagctgaaaaggcgttggcttcatggcagaaaggcgaaattattttttatcccaaaaaatgggaaaacacatataaacactggatggaaaacataagggactggtgcgtcagccgccaactgtggtgggggcatagaattcctgcgtggacttgcgcagactgcggcaaaatgacagtttcacgtaacgacatcgacgcttgcccgcattgcaagagcaaaaaaatcgagcaagaccccgatgtgcttgacacttggttttcaagctggctttggcccttcagcacattaggctgggaaaacgccgattgcaacaccgacgacttcaaaaaatattatccgactacggcgcttataaccgcctatgacattatctttttctgggtatcaagaatgatcatggcgggacttgagttcacgggcaaagcgccgttccgcgacatttacattcacgggcttgtgcgcgacaaacagggacgcaaaatgagcaagtctctgggcaactccatagacccgctcgaaatcatccccgtctacggcacggacgcgctacgcttctcaatggtgatgattacggcgcagggcgcggacgtattcctgagcaaagacacttttgacatagggcgcaacttcgccaacaaactctggaacgcctcgcggttcttgatcggcaacattaaaaccgacaagttggtcggtgaaattcccccgaccgacagacttaaagcggaggataagtggatactgtcaaaattacagcgggttataggcgatatggactccgcgataagcacgtaccgcttcaacgaggcctgccacatcatatatgatttcacgtggcacgagttctgcgattggtacgtggaggcgaaaaaggcggatttataccaagacgacgcgcaacgcaaatccgacgccctatccctatgcggatatttgctggcgtcgatacttaaactcctgcacccgataatgccgttcatcaccgaggagatttggtcgttcctgcgtgagaagatgtcgttcgacaaagtcatagacgcggagtcgatcatgaccgcctcataccccgtcccgaatcccgcacttgcggacgagaaaatggaaggcgatttcgacttgttgaagagctgcatagtggcgctgaggaccatccgctccgagaacaacgtcccgcccgacaagacgggaacggcggtaatcattccggcggacaaagaaaaggaagcgtggctgtcgtcgcaaatcccaaccgtcaacctcttcgccaaactgtcggagacgacggtaagcatgagcgcaagcaagccgggattcgcggggtcgtcggtaatcagaggcaatcagatattcctaagcctagagggcttaattgacaagcaagtagagatcgaccgcttgacaaaagagatagcgcgccttaaatcgatggccgacggagcgagggcgaggctggaaagcgaaagcttcgtagcccgcgccccaaaggaggtcgttgagaaggagagggagaagtatcaggggatccttgtcagcctagagaagacggagaaggcgttggcgggtctttag

SEQ ID NO: 54656 - protein, 598 aa, Unknown
  Obtained from environmental sample
  DOMAIN (1)...(276): tRNA synthetases class I (I, L, M and V)
  misc_feature (1)..(598): Xaa is any amino acid
MINILNPDGTLNSEVPEKYRGLPVSKARAVVIEDLQAGGWFVKDEPINHSVGHCYRCHTVIEPFLSEQWFVRMKPLAEKALASWQKGEIIFYPKKWENTYKHWMENIRDWCVSRQLWWGHRIPAWTCADCGKMTVSRNDIDACPHCKSKKIEQDPDVLDTWFSSWLWPFSTLGWENADCNTDDFKKYYPTTALITAYDIIFFWVSRMIMAGLEFTGKAPFRDIYIHGLVRDKQGRKMSKSLGNSIDPLEIIPVYGTDALRFSMVMITAQGADVFLSKDTFDIGRNFANKLWNASRFLIGNIKTDKLVGEIPPTDRLKAEDKWILSKLQRVIGDMDSAISTYRFNEACHIIYDFTWHEFCDWYVEAKKADLYQDDAQRKSDALSLCGYLLASILKLLHPIMPFITEEIWSFLREKMSFDKVIDAESIMTASYPVPNPALADEKMEGDFDLLKSCIVALRTIRSENNVPPDKTGTAVIIPADKEKEAWLSSQIPTVNLFAKLSETTVSMSASKPGFAGSSVIRGNQIFLSLEGLIDKQVEIDRLTKEIARLKSMADGARARLESESFVARAPKEVVEKEREKYQGILVSLEKTEKALAGL

SEQ ID NO: 54657 - DNA, 972 bp, Unknown
  Obtained from environmental sample
  misc_feature (1)..(972): n is a, c, g, or t
ttggcattagcgggagaagccgatcttggctcgatgaaccgtctgcgaagccataaactgccatttcaggcaagctggcgtcttgccgcggcgtattggcttgccggacagcgcgatactgcgcgtaatatgataaagggactggctttaccggaaagtgattatcgcgaactttcggcgacatttggttcgaccctcagggataaggcgatgatacttgaaactctcattttgctgaattctcaggaagatgttggaaggacaaaacagctctttgaagaaataacaaaagagctctcccgggacaagtggctttccactcaggagacggcttacgccctgatcgccatagttccttatatgtcaaataacgccggaagcggcgcgttgtcgctggattattccgttgacgcaaaaacggggaacatcgcttttaacactcctgtcgctgaacgctcttttgggaatatgaccggaacaagcgccgctttatcggtgactaaccgttcatcctcccctgtttatataagttttaccgccaaaggacttcccaccgaaggaaaagaacccgcgctctccgaaggtctctcccttaccgttgaataccacgacgcccacaacagggtaatcgcccccgagagtttaaagttaggtgaagatatggaaatctccgtgcgcgtgcgcaatactttttcccagtccgtggaagaagccgcgcttatcattccgcttccggcgtcatgggagatcgtcaacacgcgcattggcggcggcgagtcttcatcaaatttccgttatcaggacataagagacgacagagttatgacgtactttaaccttaacaggggcgaagaaagaacggtatctttcaaggtaaataaatcttatgaaggctctttcttcagaccggcaatacatgtttacgcaatgtatgatgagtcaataagggcgttaattcccggcgtaaggtaa

SEQ ID NO: 54658 - protein, 323 aa, Unknown
  Obtained from environmental sample
  misc_feature (1)..(323): Xaa is any amino acid
MALAGEADLGSMNRLRSHKLPFQASWRLAAAYWLAGQRDTARNMIKGLALPESDYRELSATFGSTLRDKAMILETLILLNSQEDVGRTKQLFEEITKELSRDKWLSTQETAYALIAIVPYMSNNAGSGALSLDYSVDAKTGNIAFNTPVAERSFGNMTGTSAALSVTNRSSSPVYISFTAKGLPTEGKEPALSEGLSLTVEYHDAHNRVIAPESLKLGEDMEISVRVRNTFSQSVEEAALIIPLPASWEIVNTRIGGGESSSNFRYQDIRDDRVMTYFNLNRGEERTVSFKVNKSYEGSFFRPAIHVYAMYDESIRALIPGVR

SEQ ID NO: 54659 - DNA, 822 bp, Unknown
  Obtained from environmental sample
  misc_feature (1)..(822): n is a, c, g, or t
gtgatccatgatgtggtctacgaacagcttcccccccaggtgatttacgagacaattatccaacacgaagttatctacgaacagcttccgcccgaaataattaccaaacaaccatctgacgaagaactcctggagttattaaaagataaaccggatttaatcaaggagatcataaaacagattcctcccgaagagattgtaaaataccttactgacgatcagatcaaggagatcatacaaaaccttattgacaaaaacacccttacagatgatcagatcaaagaaatcataaaaaatattcctcccgaggagatcgtaaaatatctcacggatgaacaaatcaagactatcataagtttacagcccccacaggtgatacttcagactataaccatcattgatattgaatacattatttttgcgggtaacgcggatcaatataatggtcctccggtacagggaggctctacccctcttacaacacaggaaataaattccaacaatgcttctgtttccgatatagcgaaagccctctttacgaaccctgactatttaataatgctgcatggtcacgcaaatcctactgcttttaccgatgctgaaattggagatctggagaaactaagcaaggatcgggcgaatgcggtcaagacggagcttcttaaacagtacaaaacgctcagcggggttgatatagatgattcacgggtatcagtcagcggttacggcggtgaaaaagttctttttggaaacaactccgtatacacgccgcttaaccgccgcgtagaaatgatactggtaaaggttggagttgaacaatga

SEQ ID NO: 54660 - protein, 273 aa, Unknown
  Obtained from environmental sample
  misc_feature (1)..(273): Xaa is any amino acid
MIHDVVYEQLPPQVIYETIIQHEVIYEQLPPEIITKQPSDEELLELLKDKPDLIKEIIKQIPPEEIVKYLTDDQIKEIIQNLIDKNTLTDDQIKEIIKNIPPEEIVKYLTDEQIKTIISLQPPQVILQTITIIDIEYIIFAGNADQYNGPPVQGGSTPLTTQEINSNNASVSDIAKALFTNPDYLIMLHGHANPTAFTDAEIGDLEKLSKDRANAVKTELLKQYKTLSGVDIDDSRVSVSGYGGEKVLFGNNSVYTPLNRRVEMILVKVGVEQ

SEQ ID NO: 54661 - DNA, 1191 bp, Unknown
  Obtained from environmental sample
  misc_feature (1)..(1191): n is a, c, g, or t
atgggtaataagaccccaacacccataattgaaccctgtttcacaaaaaaatcttggccccctctccctactcctattgagaaattcctcaaactatgccataaatataccatggcggcacaaacagcggttattggggcgggcgcgtggggaacggcggttgccaaggttattgccgaaaaagggaaagatgttgtcatctggagctttgaagaagatacctgcgacgatataaacaatcgtcacaagaattcccgctatctgccgggggtggaactgccggagaatctgcgggcaagcacaaatcttgtggaaaccgcttccgggcgcgacttccttatcctggccgtcccttcgctctacttgctgcaaaccgcaaagcaaattcttgaggcgccctcaattcgggaggggtcaacagccatcgcggttctgaccaaggggtttttatctactgacaaaggcccgcggcttatcctggaaacccttgaagattaccttcccggcttttaccatcaatcccttgtgtacatagccgggcccagccacgctgaggaagtttcacgcgggaagattaccggcttaatagccgcaagcgagaacgccaaaaattcattccgttttcgcgacttgttaaaaagcaaaaatcttctggttttttcttcgtttgacgtgcgcggcgttcaggtggcagccgcggcgaaaaatgttatcgcaattgctttcggcatgcttgatgccttaaagcttcagggaagtgtcagcggttttgaaggcgcaagccttttaggcgacggaacagaatctttgcttttggccgccggcttaaacgagattcaaactcttggcctggcaatgggcgctacccaccccgagacctttacttcaatctcgggcatcggagatcttgatgtaacctgccgctctgtatttggaagaaaccgccgctttggcaaagaaatcatcgataaaaaaatcctcgctccattcaaggacattgacgatcttatattccgtataaacgagcttgattacctgccagaaggagtcgcggctgctaaatatgttaaagttctggcagaaaagcaccgtttaaaaatgccgatttccaccgggctctacagaatcttaaaccgcgagattgaacctcttgcgtttttaaaacaatttttaaacgaactcagacgctaa

SEQ ID NO: 54662 - protein, 396 aa, Unknown
  Obtained from environmental sample
  DOMAIN (223)...(390): NAD-dependent glycerol-3-phosphate dehydrogenase C-terminus
  misc_feature (1)..(396): Xaa is any amino acid
MGNKTPTPIIEPCFTKKSWPPLPTPIEKFLKLCHKYTMAAQTAVIGAGAWGTAVAKVIAEKGKDVVIWSFEEDTCDDINNRHKNSRYLPGVELPENLRASTNLVETASGRDFLILAVPSLYLLQTAKQILEAPSIREGSTAIAVLTKGFLSTDKGPRLILETLEDYLPGFYHQSLVYIAGPSHAEEVSRGKITGLIAASENAKNSFRFRDLLKSKNLLVFSSFDVRGVQVAAAAKNVIAIAFGMLDALKLQGSVSGFEGASLLGDGTESLLLAAGLNEIQTLGLAMGATHPETFTSISGIGDLDVTCRSVFGRNRRFGKEIIDKKILAPFKDIDDLIFRINELDYLPEGVAAAKYVKVLAEKHRLKMPISTGLYRILNREIEPLAFLKQFLNELRR

SEQ ID NO: 54663 - DNA, 855 bp, Unknown
  Obtained from environmental sample
  misc_feature (1)..(855): n is a, c, g, or t
atgatttttgattttctgtttattaaacggaaaaaggtctttgctcttatcggagaaagcggcacaggaaaaagttttcgcgcaaaacttgtagctcaaaaatacggaatagatcttattatagacgacggtctgttaatcaaggacaaccgcattctggcgggacattcggcaaaaaaagaagtttcctttcttacggcggtaaaggtcgcccttttcgacgataaagcgcacagggacgaagtggcgcgcaggctccaaaacgaaaaattcaagcgcattctggttttggggacttccgaaaaaatggttaaaaaaatcgctgcgcgccttcagcttaaccctccgtcaaaaataataaaaatcgaggacattgcgtctcaggaagaaatagacaaagccataaggacaaggcggattgagggcaagcacgttatccctgtcccgtccatcgaaataaaaagaaattacccgggcattttttacgaagcgataaaaattttcaaaaaacgcatagctcccgcgggtttaggccccgtgccaatcctgcacgaaaaatctgtcgtaaggccggaatattcaaaacgcggcaaggtaataatttccgaatccgcgttaagccagatggtgattcactgcgtagacgagtacaacaaagagatcaaaattaaaaagatcctggttaaagacgacaaaatgggctaccgcttagtcataacaatagacgtcccctacggcacccaactgggcggaaacatccacaatctccagcaatacattattgaaaacatcgaacgctacacggggatactaatcgaagaagtgaatatcattattgacaaaattactgaatga

SEQ ID NO: 54664 - protein, 284 aa, Unknown
  Obtained from environmental sample
  misc_feature (1)..(284): Xaa is any amino acid
MIFDFLFIKRKKVFALIGESGTGKSFRAKLVAQKYGIDLIIDDGLLIKDNRILAGHSAKKEVSFLTAVKVALFDDKAHRDEVARRLQNEKFKRILVLGTSEKMVKKIAARLQLNPPSKIIKIEDIASQEEIDKAIRTRRIEGKHVIPVPSIEIKRNYPGIFYEAIKIFKKRIAPAGLGPVPILHEKSVVRPEYSKRGKVIISESALSQMVIHCVDEYNKEIKIKKILVKDDKMGYRLVITIDVPYGTQLGGNIHNLQQYIIENIERYTGILIEEVNIIIDKITE

SEQ ID NO: 54665 - DNA, 1326 bp, Unknown
  Obtained from environmental sample
  misc_feature (1)..(1326): n is a, c, g, or t
atgaaaattattttgagtaaaaaatttgattctttttggagaaagaacacaagacgctctgaagattttgagacagagaaagttgttaaaaaaataatcgcggaagtacgcgaaaagggagacgccgccgtcagaaagttcgcgtctaagtttgataaatcttcgccgaaaaagcttgaagttcctttttctgaagcaaaacgcgctcttgaacagttacgcgcaaacgattcgtctttggcgcaggcgcttgagcttgcggcaaggcacattaaactcttttctgacaaacagagagagcaattcgccgattttgaatttgaaatggagccgggtcttgttacaggccagcgtatactccccattgaaagagcggcaatttacgttcccggcggacggtttcccctgttttcttcggtgcttatgtgtatgatccccgctttttgcgccggtgtggaagaagtgatattttcatcgccgcctacgaaagacggtattcccgataaaaaaatacttgccgccgccgcaatcgccgctgaagtcgcgaataacaacaaagtgcgtatcttcgccatcggcggcgctcaggcaatagccgctctcgcgcttggcacgaaatctgttccgcgcgtgnacgttatagccggacccggcaacaaatttgtcgccgccgccaagcggatattattcggcgaagtagggatagattttatcgcaggacccaccgatgtattggttatcgctgacgacaaagacggtaatattgaaaaaacagccgatcttatcgccgcggatatgcttgggcaggcggaacatgacccggacgcacgggcgagagcattagttccaaataaagagcttgccgaaaaaattattgcggctattgagcggcgtataaaatcattaccgacagaaaaaaccgcccgcgcttctttgaacgcaggcggcttaattatcgtctataaaacacaggaagaggcgatccgtatcgctaacacaatagcgccagaacaccttgaacttcaaaccgtaaatgcggacacttggattcccaaacttaaaaattacggttcgctatttatcggcagtctttgcgccgaagtcctcggcgattattcggcgggaataaatcacacactgcccacgtcgacaagcgcccgttttacaggcggcttatctgtccgccacttcctaaaaaccgttaccactctgcgttgcgcccaaggcgaaggctttgaaaaagcgcgtaacgccgcggagatacttgcgagagcggaaggattagaaggtcatgcgcagagcgcagtggcgaggaagaatttttaa

SEQ ID NO: 54666 - protein, 441 aa, Unknown
  Obtained from environmental sample
  DOMAIN (13)...(440): Histidinol dehydrogenase
  misc_feature (1)..(441): Xaa is any amino acid
MKIILSKKFDSFWRKNTRRSEDFETEKVVKKIIAEVREKGDAAVRKFASKFDKSSPKKLEVPFSEAKRALEQLRANDSSLAQALELAARHIKLFSDKQREQFADFEFEMEPGLVTGQRILPIERAAIYVPGGRFPLFSSVLMCMIPAFCAGVEEVIFSSPPTKDGIPDKKILAAAAIAAEVANNNKVRIFAIGGAQAIAALALGTKSVPRVXVIAGPGNKFVAAAKRILFGEVGIDFIAGPTDVLVIADDKDGNIEKTADLIAADMLGQAEHDPDARARALVPNKELAEKIIAAIERRIKSLPTEKTARASLNAGGLIIVYKTQEEAIRIANTIAPEHLELQTVNADTWIPKLKNYGSLFIGSLCAEVLGDYSAGINHTLPTSTSARFTGGLSVRHFLKTVTTLRCAQGEGFEKARNAAEILARAEGLEGHAQSAVARKNF

SEQ ID NO: 54667 - DNA, 918 bp, Unknown
  Obtained from environmental sample
  misc_feature (1)..(918): n is a, c, g, or t
atgggcgatttttggaacacccgcataaaaaaactttctccgtacactcccggcgaacagcccaaagacagaagcataataaaacttaataccaacgaaaacccctatccgccttctcccaaagttatagaggcaattaaaaataccgcaggggagcgtctgcgcctgtatcccgatcctgaatgtatgacattccgcgaagccgccgccgcccgttacggcgttaaaccgcaggaagtttttgcaggtaacggttcagatgaaattttagcgttcgcgttcggtaccttttttgaaagcggcgataaagcagagcagatacttttcccggatattacttacagtttttatcctgtttacgctaatctttgggaaatcccgtaccgtacaatcccgcttgatcaggatttttcgattaacataaaagattataaaatcccctgcggcggcgttatatttcccaatccaaacgccccaaccgcggttggaaaatccttagacgaagtattgtctctcgcggaatatcttgaaaaacagggaaaagtccttatcgttgacgaagcctacatcgcgttttcaggctcaagcggcgtgaaatcggcggttagttctattaatactcaccccaatttgttaaccgtacacacattttcaaaatccgcgtctcttgccggtttgcgctttggttatgcaattggcaatgaaaaaatgatagaaggcctttgccgtatacgcgattcatttaattcatacaccctagacactcttgccctggcgggagcgacagcggcggtctctgacgcggcgtattatgaggaaatcaacggcaaggttattgccacgcgggaaaagacggcgggagcattacgcgatcttggttttacggttttgccgtcatcggctaattttttgttgtaa

SEQ ID NO: 54668 - protein, 305 aa, Unknown
  Obtained from environmental sample
  DOMAIN (24)...(304): Aminotransferase class I and II
  misc_feature (1)..(305): Xaa is any amino acid
MGDFWNTRIKKLSPYTPGEQPKDRSIIKLNTNENPYPPSPKVIEAIKNTAGERLRLYPDPECMTFREAAAARYGVKPQEVFAGNGSDEILAFAFGTFFESGDKAEQILFPDITYSFYPVYANLWEIPYRTIPLDQDFSINIKDYKIPCGGVIFPNPNAPTAVGKSLDEVLSLAEYLEKQGKVLIVDEAYIAFSGSSGVKSAVSSINTHPNLLTVHTFSKSASLAGLRFGYAIGNEKMIEGLCRIRDSFNSYTLDTLALAGATAAVSDAAYYEEINGKVIATREKTAGALRDLGFTVLPSSANFLL

SEQ ID NO: 54669 - DNA, 498 bp, Unknown
  Obtained from environmental sample
  misc_feature (1)..(498): n is a, c, g, or t
atgatgacaggttttaccgacaggcaggcgttagctgaaactttcaagcgcggcaatgtctgtttccacagccgcacccgtaacagactctggatgaaaggcgagaattccggcaatgtgttaaagcttgtcaaaataagggcggactgcgacagggacgcgcttttagtcacggcggaaccggcgggccccgtctgccacaccggcgcgtggtcatgtttcgcgacaaacagggattatacattgcgatttttacaaaacataataaaggatcgttttcttaatcccgtgcccggttcgtatacagccacccttgacgacgaacttgtccgcgagaaagttattgaagaggcgacagaactgtgcggggcaaaaaaccgcgctgaaattatctgggaagccgccgatcttttctatttttctacagtgctgatgacaagggcgggagtcactattcaggaaattcttgacgagctggacaagaggcacaaaaaataa

SEQ ID NO: 54670 - protein, 165 aa, Unknown
  Obtained from environmental sample
  DOMAIN (82)...(164): Phosphoribosyl-ATP pyrophosphohydrolase
  misc_feature (1)..(165): Xaa is any amino acid
MMTGFTDRQALAETFKRGNVCFHSRTRNRLWMKGENSGNVLKLVKIRADCDRDALLVTAEPAGPVCHTGAWSCFATNRDYTLRFLQNIIKDRFLNPVPGSYTATLDDELVREKVIEEATELCGAKNRAEIIWEAADLFYFSTVLMTRAGVTIQEILDELDKRHKK

SEQ ID NO: 54671 - DNA, 1125 bp, Unknown
  Obtained from environmental sample
  misc_feature (1)..(1125): n is a, c, g, or t
atgaaaaaaataatatttttcctgtttattacagcggcgtttttttcttcctgcgtctcgatgaaaaaagatatttttcttaacagtcaaattacccaatcggataagaatatagaggcgattgaggaagcggttgtcccattggaagccataggcggcgctcaggcgcgaagccgtcagagcgagattaccgcggcgcggcaattaattacaagcaaggaaaaagaagcgtctaccgacaccgattataccggcaaacttttggcgtggtcgggcaggcttgcgattcttgagggcaagtacagcgacgcccagcgtttatacaagcagtcaacggcggcatcagccgggaatgtcccggcgattattctcggcatacgtcttgagggagaccccgcaaagcggcttgagttaatagagaaggaactggcaatatcgggccgtcagtcttccgccgtcggtttcggcgaattgcagatagaaagaggagtttcgcttacggaaacgagccgttttgccgaagccgccggcgcgttcgacgcagcatttgcctcaggtcttaacaaagtctataaggacaattacgtaaatatacgtaatcgcgcgtgggaattacgtaacacaagcggagtggccgccgggacaatgaacatgatgcaggaccgcataacatgggccgactgcatcagcattgcgcgtaacgaaacccagcttttcaggtttttaagcggcggcagaaacctaagcgaagccgatttattcaaccgccttcttgaccgcgcctttattccgtacactcaggacattgcgataaacgagtggcccaaagccaaaccggacaagggcgaatttgtaacgcgcgccggcgccgcttggtttatctggcacttgtacgccgaaatgagggcggacagggcccttctttcacgctattcatcgcgttatgcgacaggcgcgaacccccgcagcccgatagcggacgttccccctctctcgccgttctttgactcaatactcgccagcgtggagactgaacttttgtccctccccgacggaaagaacttcaggccgtcccagccaattcctggctgtgagatgctttcggttttgaagaagaccccataa

SEQ ID NO: 54672 - protein, 374 aa, Unknown
  Obtained from environmental sample
  SIGNAL (1)...(22)
  misc_feature (1)..(374): Xaa is any amino acid
MKKIIFFLFITAAFFSSCVSMKKDIFLNSQITQSDKNIEAIEEAVVPLEAIGGAQARSRQSEITAARQLITSKEKEASTDTDYTGKLLAWSGRLAILEGKYSDAQRLYKQSTAASAGNVPAIILGIRLEGDPAKRLELIEKELAISGRQSSAVGFGELQIERGVSLTETSRFAEAAGAFDAAFASGLNKVYKDNYVNIRNRAWELRNTSGVAAGTMNMMQDRITWADCISIARNETQLFRFLSGGRNLSEADLFNRLLDRAFIPYTQDIAINEWPKAKPDKGEFVTRAGAAWFIWHLYAEMRADRALLSRYSSRYATGANPRSPIADVPPLSPFFDSILASVETELLSLPDGKNFRPSQPIPGCEMLSVLKKTP

SEQ ID NO: 54673 - DNA, 501 bp, Unknown
  Obtained from environmental sample
  misc_feature (1)..(501): n is a, c, g, or t
atggccagaccgaagccggcggacatgcgggagctcgcggagcgggcgcagagggacctcgacgccatcgacggcaagcgcctggcggtcaagctgaagtcgatcagggcggcggcgagcagcccagtcgccctggtggcggacgtgatggaggtgacggtgcagagcgtcctgcgctggatcgccgagtacaggggcggcggcctcgatgccctgcgccccgcgccgaaggcgcccaggcgctccaagctgggcgacgcccagaaggaggcggtgctctcgtggctgcggtcgtgcaggacggcccggggcgaggagatccactggacgctggacggcctccgcgccgccatcgcggaggagttcggggtgacgctcgccaggaacaccatctgggtgtggataaggaaggagggccagaggcagatggtccccaggccgaggcaccaccaggcggacgcggcggcgcaggaggacttcaaaaaaaaacggcggggatga

SEQ ID NO: 54674 - protein, 166 aa, Unknown
  Obtained from environmental sample
  misc_feature (1)..(166): Xaa is any amino acid
MARPKPADMRELAERAQRDLDAIDGKRLAVKLKSIRAAASSPVALVADVMEVTVQSVLRWIAEYRGGGLDALRPAPKAPRRSKLGDAQKEAVLSWLRSCRTARGEEIHWTLDGLRAAIAEEFGVTLARNTIWVWIRKEGQRQMVPRPRHHQADAAAQEDFKKKRRG

SEQ ID NO: 54675 - DNA, 1032 bp, Unknown
  Obtained from environmental sample
  misc_feature (1)..(1032): n is a, c, g, or t
ttggttatggcgagacttatctcaagactcgatcttgaaggcgcccagcttcagggcgtaacgcaaagcgcgtatgaggtaattattctcaaactgtataaaaaaggtgaaacaaaaaaccttttaatttcgcttggttcaggcgcgtgccgtattcatgaaacatacaggccctttccgaaaagcgacaagcccttaaggttcgctcagtttcttaactccaaaatagtaaacggatggattacggaagcggtacagcttggagacaacaggatagtgcgccttactgtaaaaagggcggaaaatgtttttaagctgtatataaggctatggtcaaacgccgcgaattttatcgttacggatgaaaagggcgaagtattagacgcaatgcgccgcctgcccaaacgcggcgaggttaccggcggctcttattcgcctgaaacggcgggcgtaaacgaaaaacagccgcgtgagttcacggtaagggagcttcccggcgaaggttctttcaacaaaaaaacagacgattattacgccgagcatggcggcgctctttcccttgaggcgttaaaggaacaggcaaggcgcagttttgagggcagtatatcaaggataaacgccgctcttgaaaaactgcgggaaaaagaaacatcgtttactgacgcgaacaggttgaaagtttacggcgattttatactttcaaatataggcgtgataaagcacggcgacaaatggcttgagacggaagaagacaatacggttatcaggatagagcttgatccgcgcttaaaaccgcaggaaaacgccgcgaagtattatgataagtacaggaaagcgaaaaacgggcttgccgacatccaacgggaaattgccggaggagagagggagttaaaggaagtaaccgaaaggcttaaccggctgcttaccgagacaaatccgcttgttttggcaaaacttgtaaaaacgggcggcgcggcgcgcgcagtcagccccttttcaaaaaggaaaggcgcgtccggggcttgcgtttag

SEQ ID NO: 54676 - protein, 343 aa, Unknown
  Obtained from environmental sample
  DOMAIN (1)...(318): Fibronectin-binding protein A N-terminus (FbpA)
  misc_feature (1)..(343): Xaa is any amino acid
MVMARLISRLDLEGAQLQGVTQSAYEVIILKLYKKGETKNLLISLGSGACRIHETYRPFPKSDKPLRFAQFLNSKIVNGWITEAVQLGDNRIVRLTVKRAENVFKLYIRLWSNAANFIVTDEKGEVLDAMRRLPKRGEVTGGSYSPETAGVNEKQPREFTVRELPGEGSFNKKTDDYYAEHGGALSLEALKEQARRSFEGSISRINAALEKLREKETSFTDANRLKVYGDFILSNIGVIKHGDKWLETEEDNTVIRIELDPRLKPQENAAKYYDKYRKAKNGLADIQREIAGGERELKEVTERLNRLLTETNPLVLAKLVKTGGAARAVSPFSKRKGASGACV

SEQ ID NO: 54677 - DNA, 348 bp, Unknown
  Obtained from environmental sample
  misc_feature (1)..(348): n is a, c, g, or t
gtgggcagggacgcaaatgaaaacgatgagcttttgcgccgtcatgttaaagggaacgatatgtggctgcacgcaagggattatcacggctcctatgtgtttataaaacaaagggcgggaaaatcggttccgttggatgtactgcttgacgcaggcaaccttgcgattttttattcaaagggcagaaataacggcgcaggcgatttattctatactcaagttaaatatttaaggcgcgccaaaaacgctccaaaggggctggttatccctactcaggaaaaaaaccttcatgttaaggttgaagaggagcggcttcgttctcttgaaaattgtaaaattataaggtaa

SEQ ID NO: 54678 - protein, 115 aa, Unknown
  Obtained from environmental sample
  DOMAIN (1)...(79): Domain of unknown function (DUF814)
  misc_feature (1)..(115): Xaa is any amino acid
MGRDANENDELLRRHVKGNDMWLHARDYHGSYVFIKQRAGKSVPLDVLLDAGNLAIFYSKGRNNGAGDLFYTQVKYLRRAKNAPKGLVIPTQEKNLHVKVEEERLRSLENCKIIR

SEQ ID NO: 54679 - DNA, 531 bp, Unknown
  Obtained from environmental sample
  misc_feature (1)..(531): n is a, c, g, or t
atggctaaggtaacaaaaaccgttaaaagaacgacggtgaaaaaatcgggtaaaaaatccgctgaattacacaaccttgcgcaggaattaaaatccctcattccgaaattggacgaagaagggttggctttccttgtaaaacaagcccatgtccacctttacaatatgcaggttgacgcccttaatcagactatgataaaggacgaacagcgtaaaagtaaaaccgccgaaaagcctaaaaaagtcctgaaaaccgacggtcatttcgatataaaaatatccgagacaggggcagggtatcatattaaagcgagtaatacatgggtttcttttactacaaaagaagtaactactatggtaaaaatcgtcaaaggcgagggttctaaccttgaaatcagagaaagactctataaatggcttgccggtgaaagagccgacttcctcagtacagcgtcaattgccgataaattcgacgataaattgacagctctcataaaccttttgaatgagaatttcaagctaaaaaattaa

SEQ ID NO: 54680 - protein, 176 aa, Unknown
  Obtained from environmental sample
  misc_feature (1)..(176): Xaa is any amino acid
MAKVTKTVKRTTVKKSGKKSAELHNLAQELKSLIPKLDEEGLAFLVKQAHVHLYNMQVDALNQTMIKDEQRKSKTAEKPKKVLKTDGHFDIKISETGAGYHIKASNTWVSFTTKEVTTMVKIVKGEGSNLEIRERLYKWLAGERADFLSTASIADKFDDKLTALINLLNENFKLKN

SEQ ID NO: 54681 - DNA, 1203 bp, Unknown
  Obtained from environmental sample
  misc_feature (1)..(1203): n is a, c, g, or t
atgtcggaagccgaccgcgtgcaatacggcgaaatactggacgatataatggggattacccgcgacacggtgaccagggcgcgctcgtggacagccgaagaatttgacacaatcattaacaatgaatttatgttctccgcaaagaacgctctggcgcggggcctgattgacagcagcggcaggaaagaggccgtgcttgaggcagttaaggaaatgtcaaacggcaaggaggcgaaattttttttcctgtacggggacgcggaatcaagtttaacgggaagcaaatttatttataaaccgggcaaagcaggcggcttgttctccaggcctcccgtaatagccgtaataaacgccaatggcgttaccgatatggagcgcggcatagccgcatggaccttagccagcacaatcagggaaatgtcagaaaaaaggcgggtcaaggcgattgtactgcggattaattcgcccggcggaagcgccgaagccgccgactatgttgccgaggcggtaaaagccgccaaagaacgggttccggtggtggtgtctatgggcgctgtcgccgcttccggcggctactgggcaagtatgagcgcaagccacattgtcgccacccctataacgcttaccggttccatcggcgttatcgccagctggttttacgacaatggccttaacagcaaactgggcttgtcggtcgacaccatacagaggggggcccatgccgatatgatgaccgggatgatcgtgccgcgccgggatctcaagcctgaggaagaggcccgttacaaggagtacattcttgatctgtactctgattttacccatagggtcgcggcgaacaggggtatggacattgaacgtgtggaatcgcttgcgcagggccgggtctattcggggcttggcgcgttaaatgccgggcttatcgacagcatcggcggcattgatgacgccctacaaatcgccagagaactggcaaaaatacccgatgaccgcagaataacaatcatggaatatccaaagccgaaattcctggacaaactgctggaacaactgctctcgacaagggtggccgggttgggaagaacatcagtcattgacacggcggcggaactgttttttcccgtatcaatgatggaagacctgcgctacaggatagagcgtaacggccagataatgcccatattgccgttagattacaattag

SEQ ID NO: 54682 - protein, 400 aa, Unknown
  Obtained from environmental sample
  DOMAIN (171)...(328): Peptidase family S49
  misc_feature (1)..(400): Xaa is any amino acid
MSEADRVQYGEILDDIMGITRDTVTRARSWTAEEFDTIINNEFMFSAKNALARGLIDSSGRKEAVLEAVKEMSNGKEAKFFFLYGDAESSLTGSKFIYKPGKAGGLFSRPPVIAVINANGVTDMERGIAAWTLASTIREMSEKRRVKAIVLRINSPGGSAEAADYVAEAVKAAKERVPVVVSMGAVAASGGYWASMSASHIVATPITLTGSIGVIASWFYDNGLNSKLGLSVDTIQRGAHADMMTGMIVPRRDLKPEEEARYKEYILDLYSDFTHRVAANRGMDIERVESLAQGRVYSGLGALNAGLIDSIGGIDDALQIARELAKIPDDRRITIMEYPKPKFLDKLLEQLLSTRVAGLGRTSVIDTAAELFFPVSMMEDLRYRIERNGQIMPILPLDYN

SEQ ID NO: 54683 - DNA, 447 bp, Unknown
  Obtained from environmental sample
  misc_feature (1)..(447): n is a, c, g, or t
atgaaagttaccatcaacgctgacgaacgatatacagagaccgagattacggtcaattgtaaccgtgtaagtgatgatattgataaattgcttgccgctatacgattgctggatatgaaactgacaggacgtaaagacgggcggcagtatatccttgaagcctcggatgttgtgtatattgacagtattgataaacatacatttctttatacttcaaacggcgtatatgaaagtgctctcaaactatatgagctggaagcaaaactggccgaccgtgattttttacaagcaagtaaaaacagtctttttaatataaaccatatacattcaattgagcctgattttgatcgcaggcttatcttatcaatgacaacagatattaaactaatagtgtcgcgtcaatatgccgcggcggtaaaggaaaaattggaggcttattatgattga

SEQ ID NO: 54684 - protein, 148 aa, Unknown
  Obtained from environmental sample
  DOMAIN (47)...(144): LytTr DNA-binding domain
  misc_feature (1)..(148): Xaa is any amino acid
MKVTINADERYTETEITVNCNRVSDDIDKLLAAIRLLDMKLTGRKDGRQYILEASDVVYIDSIDKHTFLYTSNGVYESALKLYELEAKLADRDFLQASKNSLFNINHIHSIEPDFDRRLILSMTTDIKLIVSRQYAAAVKEKLEAYYD

SEQ ID NO: 54685 - DNA, 606 bp, Unknown
  Obtained from environmental sample
  misc_feature (1)..(606): n is a, c, g, or t
ttgaaaatatatactgattttatgggtaagacttatgtctttgtgaaccaaaaggggggggtcggcaagactacttcggccctcaatataggcgcataccttgccgaagaaggcaagaatgtgctgctggtggattttgacgcacaggcaaacctttcttcgggtgttggggcaaaaccgcccaaaccggggatttatgaagtcctgtcggaaaccgccacaattgaccaggcaattaaaaaaacggctgtttcccgccttgatgtaattcccgccagcctcgacctttccggcgcggcagttgagcttattgagcaaaaagaccgtaatttatttttgaaaaaagcccttgccccgataaagaaccgctatgattttatattgatagactgcccgccgagcctgggtgtgctgaccctgaacggcatggcggcagccgatgatgtgcttattcccatgcagtgtgagtattttgcaatggaaggcttaagcctgcttttgcagaccattcagcggatacagcgcagtctgaacaaaactctgggtattgggggaattttttttaccatgtacgacccccgaaccagacttgctcaggatgggtaa

SEQ ID NO: 54686 - protein, 201 aa, Unknown
  Obtained from environmental sample
  DOMAIN (12)...(199): CobQ/CobB/MinD/ParA nucleotide binding domain
  misc_feature (1)..(201): Xaa is any amino acid
MKIYTDFMGKTYVFVNQKGGVGKTTSALNIGAYLAEEGKNVLLVDFDAQANLSSGVGAKPPKPGIYEVLSETATIDQAIKKTAVSRLDVIPASLDLSGAAVELIEQKDRNLFLKKALAPIKNRYDFILIDCPPSLGVLTLNGMAAADDVLIPMQCEYFAMEGLSLLLQTIQRIQRSLNKTLGIGGIFFTMYDPRTRLAQDG

SEQ ID NO: 54687 - DNA, 588 bp, Unknown
  Obtained from environmental sample
  misc_feature (1)..(588): n is a, c, g, or t
atgatgggcgaaatgcgccccatgcctattgaaggcgatatggaaaaagtatataacttcgtcagttccgttgttggcggacgtatcccaaaggaatatatcccaagttgcgacaaaggattccaaagctgcatggaagctggttctctgataggcttccccgttgttggcatagagatggaagttaaggacgggcaataccatcctgttgattcttctgatatggctttccaaatttgcgcacgcatggcattccgcgaggctttccaaaaagccggagcgcaggtgcttgaacctataatgaaagttgaagttcaaaccccaaccgaattccagggcagcgttgttggcaacctttcacagcgccgcggcacaatacaggcaaccagtgagcagcagaactacaccaccatagtggcagaagttccgctttccgaaatgttcggttatgcaactgatttgcgctccatgactcagggcaaggcggaattcacaatggaatttgccagatacgctcctgttcctcgcaacatacaagaggaattgataaagaagtacggagacaaggcaaaagcggctgggcgttaa

SEQ ID NO: 54688 - protein, 195 aa, Unknown
  Obtained from environmental sample
  DOMAIN (2)...(93): Elongation factor G, domain IV
  misc_feature (1)..(195): Xaa is any amino acid
MMGEMRPMPIEGDMEKVYNFVSSVVGGRIPKEYIPSCDKGFQSCMEAGSLIGFPVVGIEMEVKDGQYHPVDSSDMAFQICARMAFREAFQKAGAQVLEPIMKVEVQTPTEFQGSVVGNLSQRRGTIQATSEQQNYTTIVAEVPLSEMFGYATDLRSMTQGKAEFTMEFARYAPVPRNIQEELIKKYGDKAKAAGR

SEQ ID NO: 54689 - DNA, 789 bp, Unknown
  Obtained from environmental sample
  misc_feature (1)..(789): n is a, c, g, or t
atgcttgcggataaatataaagagcttttggattgcatcgcaaaaaaaggcaaggtggctgtagctttttctggtggggtggatagttcctttttgtgttacgccgcatatcaggctcttgggaaaaacgccattgctgttaccatagtttccccaatgctttcaaagagcgagctttgcgatgcaaaaaaagttgcagagcaaataggtattgagcatattgccatagaagaaaaaatcattgatgagaaggtggcggaaaattcccgagacaggtgctatttttgcaaaaaaatagagtttggcaaaataattcaagctgcaaaggaacgcggcataagcacggttttagacggcacaaatatagatgatgagagcgattataggcctggattaaaagctctgcttgaactgggcgtttttagccctctgcgtgaggttaaactttcaaaggcggaaattcgggaactgtcgcgtgtggcaaatatccctatttgggataagccagcttttgcctgcctagcctcgcgtgtaccttatgggcaaaaaatcacagaggaacttttgttcaaaatcgaggcaggcgaagaaattttacgctcttttggttttaaattattccgcttgcgggcgcacgagagcattgcgcgcatagaagttgcaaagagcgagcggagcaagttttttgacgaacagattttagacgagatttccaaaaagataaaggagctcggctttgcgttcgtggcgatggaactggaaggctacgaaatgggaagtttaaattaa

SEQ ID NO: 54690 - protein, 262 aa, Unknown
  Obtained from environmental sample
  DOMAIN (17)...(260): tRNA methyl transferase
  misc_feature (1)..(262): Xaa is any amino acid
MLADKYKELLDCIAKKGKVAVAFSGGVDSSFLCYAAYQALGKNAIAVTIVSPMLSKSELCDAKKVAEQIGIEHIAIEEKIIDEKVAENSRDRCYFCKKIEFGKIIQAAKERGISTVLDGTNIDDESDYRPGLKALLELGVFSPLREVKLSKAEIRELSRVANIPIWDKPAFACLASRVPYGQKITEELLFKIEAGEEILRSFGFKLFRLRAHESIARIEVAKSERSKFFDEQILDEISKKIKELGFAFVAMELEGYEMGSLN

SEQ ID NO: 54691 - DNA, 825 bp, Unknown
  Obtained from environmental sample
  misc_feature (1)..(825): n is a, c, g, or t
ttgcaaatgaaaactatactgattttattcgctttggctgctttggtttttgcagatgactttgaaacgcagagagccgctttgatagcggaaaaatcgaatatcgaaaatgatataaaaaagataaatacccaaattgcccaaaccgattccattgctaaagcggaaaaaaagttctcctctgaacagcaaactcggcaaaaagcggatatagatcgcagaaaaaacgaaattgagcagctcagccaaaaactctccgaagtatccgtggaaatgggaaaggaaaaaagcctcattgcaaactctcaggttaaagttgaaaatgtaagttcaacaagaaccgctctggctgcgcaactgatagtgcattgccgcaatttggaaagtttcataaaaactagcttgccctgggatacagaagctaggttggagagagccgctgctctgtgccaggatttggagaacaacgcggcaacggtggaagagggattttctaggctcagaactatttacatggaagaaattcgccttggtgacgagatacaaatcagcagccgtgcaataacccgcaacaatggcgatgttatgaacgcacatgttctgcgtataggcaaccaatggattgtttaccaagacgatgcgggtcttttatacggcgtgatgagcagaaaaaagaacaaagacggcaaatacgaatatgtatggaaagagaatttgtcctttgaagagcgccaagcggtgaaaaccgccatagatgtaaaactctcccgcaagccgccgcaaatggtggtgttgccgctttcgctatccatttctgagcaatag

SEQ ID NO: 54692 - protein, 274 aa, Unknown
  Obtained from environmental sample
  SIGNAL (1)...(18)
  misc_feature (1)..(274): Xaa is any amino acid
MQMKTILILFALAALVFADDFETQRAALIAEKSNIENDIKKINTQIAQTDSIAKAEKKFSSEQQTRQKADIDRRKNEIEQLSQKLSEVSVEMGKEKSLIANSQVKVENVSSTRTALAAQLIVHCRNLESFIKTSLPWDTEARLERAAALCQDLENNAATVEEGFSRLRTIYMEEIRLGDEIQISSRAITRNNGDVMNAHVLRIGNQWIVYQDDAGLLYGVMSRKKNKDGKYEYVWKENLSFEERQAVKTAIDVKLSRKPPQMVVLPLSLSISEQ

SEQ ID NO: 54693 - DNA, 621 bp, Unknown
  Obtained from environmental sample
  misc_feature (1)..(621): n is a, c, g, or t
ttgcgcattgttcgcaagtcgcagccgttgcccagaaaatgctataacacggctcactccagcgcggagattttggataaggcaaaacttttcccaaccttaaaagaagccatagcggattgctcttacacaatagcttttagccgccgccaattcgacaccattgtcccgcatatcgcactgccagaattacccgctgtttgcaaagataaaaatggcatagtcgctttgatttttgggcgcgagtctcgcgggcttgcctttgaagagtttgagctgtgtgctgttcaatgcgagattcccgttgcggggcttatgagcttgaacttgtcccatgcggttagcgttgcgagctatgagctttgccgagccggtttgcttggcgagggcttggcgtttagaaacaagctgccaataactcacagaaaagccgctacaacggagcaatttgaaaatattgaaaatttcattttggaaaaccttacggatagatataaaaattatccgtggataaacgcttccatacgcacctggctccaaaagctgaacccgagccaggcggaattatccgcgttatttggtatgctgagagcgttggctaagaaaaacgcgaggaattga

SEQ ID NO: 54694 - protein, 206 aa, Unknown
  Obtained from environmental sample
  DOMAIN (1)...(119): SpoU rRNA Methylase family
  misc_feature (1)..(206): Xaa is any amino acid
MRIVRKSQPLPRKCYNTAHSSAEILDKAKLFPTLKEAIADCSYTIAFSRRQFDTIVPHIALPELPAVCKDKNGIVALIFGRESRGLAFEEFELCAVQCEIPVAGLMSLNLSHAVSVASYELCRAGLLGEGLAFRNKLPITHRKAATTEQFENIENFILENLTDRYKNYPWINASIRTWLQKLNPSQAELSALFGMLRALAKKNARN

SEQ ID NO: 54695 - DNA, 525 bp, Unknown
  Obtained from environmental sample
  misc_feature (1)..(525): n is a, c, g, or t
gtgtggatggcgcagaatcttaattataagacatcaagcgggtctatgtgttataatgacagcgcgtcctactgcaaaaaatacggcagattgtacaattggtatacggcgaagtcggtctgccctgccggatggaggttaccggattcggcggattggaatattttggcaacggaggtaggcggtgtacgggatggtaagtggaaatggcaagacgcggctaagatgcttaaatcaaagagcgggtggtacgaaaacggaaatggtacggacgatttcgaattttcggccttgccgggcggcgctgtaccctattacccaagcgatccccctggcacttggcgcaacactataagatttattgtggagaaaggtgcttattggtggacgaattcgactatggtgtatactaatgggagaggcgctcccctcgctacgagtatgtacttttccgatgatattgtgagtatatatggcagcgaagagacacacggccattcggtacgttgtatcaagaacgactga

SEQ ID NO: 54696 - protein, 174 aa, Unknown
  Obtained from environmental sample
  misc_feature (1)..(174): Xaa is any amino acid
MWMAQNLNYKTSSGSMCYNDSASYCKKYGRLYNWYTAKSVCPAGWRLPDSADWNILATEVGGVRDGKWKWQDAAKMLKSKSGWYENGNGTDDFEFSALPGGAVPYYPSDPPGTWRNTIRFIVEKGAYWWTNSTMVYTNGRGAPLATSMYFSDDIVSIYGSEETHGHSVRCIKND

SEQ ID NO: 54697 - DNA, 528 bp, Unknown
  Obtained from environmental sample
  misc_feature (1)..(528): n is a, c, g, or t
ttggagcgacggcaaagaaccgccggagacgaactgaggatagatactatgagcaaatcggaacgaatgatcatagaggacgactatattgatatgatagccgcgttgatagacgaaaacgtgcggtttctcttagtaggcggatacgcggttgggttgcacggataccaacggtcgaccaaagatattgatttttggatttcggcgagccaagaaaatgccgttcgtttgacgagagcgcttgaaaaattcggcgctccgatgcacaatttttcggcgaaagattttgaagagaaaggtaccaattttcaaatcggggttgcgccgatacgaatcgacattataacagaaatcgcgggcattgattttgaggaagcgtataagaacatgaaaacagttgatgttgacggacataaaatccccgttatttctatatcggatttaatcaaaaacaaaaaacacactggacgaatgcgagacttagatgatgcggagcatttggaagtaatccttagcggtaaaacgtaa

SEQ ID NO: 54698 - protein, 175 aa, Unknown
  Obtained from environmental sample
  misc_feature (1)..(175): Xaa is any amino acid
MERRQRTAGDELRIDTMSKSERMIIEDDYIDMIAALIDENVRFLLVGGYAVGLHGYQRSTKDIDFWISASQENAVRLTRALEKFGAPMHNFSAKDFEEKGTNFQIGVAPIRIDIITEIAGIDFEEAYKNMKTVDVDGHKIPVISISDLIKNKKHTGRMRDLDDAEHLEVILSGKT

SEQ ID NO: 54699 - DNA, 624 bp, Unknown
  Obtained from environmental sample
  misc_feature (1)..(624): n is a, c, g, or t
atgtattcgtttgggatgactgaccgggatataaaatcccaccttgaaaaaatatacaacgtcgaagtgtcgccggatcttataagccgcgtacctaacgcggtattagaagacgtaagggaatggcaaagccggcctttggagaaatcatacgcgatagtttacctggacgcgctgagggtcaagggcaaaacggacggaaaaagctgccagaagagcgtttacacggcgttggcggttaattttgaagggaaaaaggaggtgttagggctgtggatagcggaaaacgaaggggcgaagttttggatgggcgtgctggccgagcttaaaaaccgcgggcttcaagatatccttatagcctgcatggacgggctgaccggttttcccgaagcggtgcgggcagtgtatcccgacacccgagtgcagctgtgcatcgtccacatggtccgcaattcgacaaagttcgtttcgtataaggacattaaaaaagtatgcgcggatttgaaaacggtttactccgccccgaccgaagaatccggccgtaccgccctggaagaatttagaaacaggtgggacggcaaatacccgcatgatttcccagtcatgggatcgaaggtgggatga

SEQ ID NO: 54700 - protein, 207 aa, Unknown
  Obtained from environmental sample
  DOMAIN (1)...(207): Transposase, Mutator family
  misc_feature (1)..(207): Xaa is any amino acid
MYSFGMTDRDIKSHLEKIYNVEVSPDLISRVPNAVLEDVREWQSRPLEKSYAIVYLDALRVKGKTDGKSCQKSVYTALAVNFEGKKEVLGLWIAENEGAKFWMGVLAELKNRGLQDILIACMDGLTGFPEAVRAVYPDTRVQLCIVHMVRNSTKFVSYKDIKKVCADLKTVYSAPTEESGRTALEEFRNRWDGKYPHDFPVMGSKVG

SEQ ID NO: 54701 - DNA, 378 bp, Unknown
  Obtained from environmental sample
  misc_feature (1)..(378): n is a, c, g, or t
atggtcatggcacgaaagagggaaaaaaaggaaaaggacattatcggccaaatgctcgatactatcgatttccgaggactaacacaggatgaggttgtagggcggaacggccttataaagcaattaaccggaagattgcttcagaaggccctggaagcggaaatgacggagcaccttgggtatgaaaagaattccaacgccggggacaacagcgggaacaggcatacggaaaagacagtcctgcttgagaaccagagcgcgacgatagaagtcccgcgagaccggaacggcacgttcgaaccaatcatagtccccaagcacgaaaagaggctgccgctatcaacgatcaaatcatttcgatgtattcgtttgggatga

SEQ ID NO: 54702 - protein, 125 aa, Unknown
  Obtained from environmental sample
  misc_feature (1)..(125): Xaa is any amino acid
MVMARKREKKEKDIIGQMLDTIDFRGLTQDEVVGRNGLIKQLTGRLLQKALEAEMTEHLGYEKNSNAGDNSGNRHTEKTVLLENQSATIEVPRDRNGTFEPIIVPKHEKRLPLSTIKSFRCIRLG

SEQ ID NO: 54703 - DNA, 750 bp, Unknown
  Obtained from environmental sample
  misc_feature (1)..(750): n is a, c, g, or t
gtggagaaaaacgaagaaaaacgggtaaaactattcaaaaaacagcttgaaatgttcacaaacagcataaatcaggcatcaaacatagtaaaaaaaaaggacgaatacggaggaacaataaaggcggacggcattatagccgcgatggaggagttgctgccggtaatggagaaagtatacaggatgacggaacgcagagagatattgaaagagaaagtgcctgttgaggaaaaaatattttcgatatacgagcggcatacggacataatagtgaaaggcgggcgtgaagctcagttcgggcataaagtaaacattggcagcgggaagagcaacttaatactaacctgcgagatactggaaggcaacccgaaggacagcgaattgtacgaggggacgttaaataagcttaaaaaggattacggcaagacgcctgtctcaagcgctgctgacggcgggtttgcgagcaaggcgaacatagactattcacagaaggctggaataataaacatagtgttcaacaagatacgcgggagcatgcaaaacatagcgaacagcaaatgggtggaaaacaagctaaagcgctggaggagcggaatagaggcaataatatccaacttgaaacggggatttcaaatacgccggtgcacttggaaaggtcttgcacattatggacaaaaagtattttggggcgtcattggatataaccttcgggtaatgactggcactatattgcaaacaatgactttatag

SEQ ID NO: 54704 - protein, 249 aa, Unknown
  Obtained from environmental sample
  DOMAIN (72)...(236): Transposase DDE domain
  misc_feature (1)..(249): Xaa is any amino acid
MEKNEEKRVKLFKKQLEMFTNSINQASNIVKKKDEYGGTIKADGIIAAMEELLPVMEKVYRMTERREILKEKVPVEEKIFSIYERHTDIIVKGGREAQFGHKVNIGSGKSNLILTCEILEGNPKDSELYEGTLNKLKKDYGKTPVSSAADGGFASKANIDYSQKAGIINIVFNKIRGSMQNIANSKWVENKLKRWRSGIEAIISNLKRGFQIRRCTWKGLAHYGQKVFWGVIGYNLRVMTGTILQTMTL

SEQ ID NO: 54705 - DNA, 882 bp, Unknown
  Obtained from environmental sample
  misc_feature (1)..(882): n is a, c, g, or t
atggagcacattaacggtagatataacagggataacgttgatgtaagcggtaaagaattaaatattaagttaagcgttgccgggagtgacagtatattggttggcgatgagttggtcgcgtccggtaagagcataacgcttgaggacggtacgattatcacaaacggaagcggcggcggtattacagtgacggagggccgtttgaagttagtagatgatacagcctttagtacgttttacgcgacagtagacagcaccttgactaagggcacaatactcacaggcgccacccagctcggtgccggaaccgtaatcaacgacgacaaaaccatctccgccggcagcataaggcttgaacctcggggcgaggctattattttctcgtccaatcttgatgtcaaacttgaagccaaatacaacgaggccgatgtaggcgacagcataacctacatcttctcgaactaccaagccccgtcgtccaagttaaacgactccgtaatggcccaaatcggcgccaacagcggtcagacggcattcgtctccatcggcgatatgcgcgccaaagcgctcggcgtagccgacgttgacgtaggcagcaagtggggcgccgccaccgccatagagacggtgaacaacgctctgcagaaggtttcgcaccagcgcagctctctcggcgcgatccaaaaccgtctcgaacacacgatcaagaatttggacacggcagccgagaacttgcaagccgccgagagccgcatccgcgacgtggatatggcgaaggagatcatggagttcacgaagaacaccattctccagcaagcgtcgcaggcgatgttggcccaggcgaaccagcagccgcagagcgtgttggctcttctcaggtag

SEQ ID NO: 54706 - protein, 293 aa, Unknown
  Obtained from environmental sample
  DOMAIN (200)...(271): Bacterial flagellin C-terminus
  misc_feature (1)..(293): Xaa is any amino acid
MEHINGRYNRDNVDVSGKELNIKLSVAGSDSILVGDELVASGKSITLEDGTIITNGSGGGITVTEGRLKLVDDTAFSTFYATVDSTLTKGTILTGATQLGAGTVINDDKTISAGSIRLEPRGEAIIFSSNLDVKLEAKYNEADVGDSITYIFSNYQAPSSKLNDSVMAQIGANSGQTAFVSIGDMRAKALGVADVDVGSKWGAATAIETVNNALQKVSHQRSSLGAIQNRLEHTIKNLDTAAENLQAAESRIRDVDMAKEIMEFTKNTILQQASQAMLAQANQQPQSVLALLR

SEQ ID NO: 54707 - DNA, 1158 bp, Unknown
  Obtained from environmental sample
  misc_feature (1)..(1158): n is a, c, g, or t
gtggcggaggagcacgacaaagtcttgagcctcggcgggctgcacatcataggcaccgagcgccacgagagccgccgcatagacaaccagctgcgaggccgcgccggacgtcagggcgacccgggatcgtcaaagttcttcctgtctatagacgacgacctgatgcgaatattcggcgccgagaggatcaggatggtgatggacaagctcggcacgcccgagggcgaggccatcagccacccgtgggtctccaactctatagccggcgcccaaaagcgcgtggagggccgcaacttcgacatccgcaagcatttgaaagagtacgacgacgtgatgaacctccagcgccgcgagatatacggcctgcgccagcgcattttgcgcggcgagaatttgaaggacgagatactcgaccaaatagccaacgccgtggaagacatggttatgaagtacgcccccgaacgcgtttactcggaagagacatggaatatgaacggattgcgcgacgaggcgcagacggcgttcggcgtactgtacagcccggaacaggtcaaagcggagtcgatgaaccaaaaggaattgttcgacgagttgtgggagcttgtcgagaagcgctatacggagaaagaggagcgcttcggcgcggaggccatgcggcgcttcgaacgcggcgtttttctcatggtgatagacgacctgtggaaggaccacctcttcgagatggatcacttgaaaggcggcgtgcagttcagggcgttcggtcagaagaaccctctctttgagtatcagcgcgagggcctgctgatgttcaaggagctgcgcaccaacatagcgagggaaatatcgaactacatcttccgcttggagaacgcggagcgcaggccttcgtcaaatgcctttgccggcgcgagggcggtgcacgacgccgcgcagacgttattcggcggagctacgacgacatcaggcggtgaagtatctataaacgctcggcctagggggatgtccggggctacgatgacgacaaataggggagtgggcgaggacggccgtccggcgccgcaacagccgataagggtggggccgaaagtgggaaggaacgatccttgtccttgcgggagcgggaagaaatataagaattgttgcggaaaaaatctttga

SEQ ID NO: 54708 - protein, 385 aa, Unknown
  Obtained from environmental sample
  DOMAIN (365)...(385): SEC-C motif
  misc_feature (1)..(385): Xaa is any amino acid
MAEEHDKVLSLGGLHIIGTERHESRRIDNQLRGRAGRQGDPGSSKFFLSIDDDLMRIFGAERIRMVMDKLGTPEGEAISHPWVSNSIAGAQKRVEGRNFDIRKHLKEYDDVMNLQRREIYGLRQRILRGENLKDEILDQIANAVEDMVMKYAPERVYSEETWNMNGLRDEAQTAFGVLYSPEQVKAESMNQKELFDELWELVEKRYTEKEERFGAEAMRRFERGVFLMVIDDLWKDHLFEMDHLKGGVQFRAFGQKNPLFEYQREGLLMFKELRTNIAREISNYIFRLENAERRPSSNAFAGARAVHDAAQTLFGGATTTSGGEVSINARPRGMSGATMTTNRGVGEDGRPAPQQPIRVGPKVGRNDPCPCGSGKKYKNCCGKNL

SEQ ID NO: 54709 - DNA, 426 bp, Unknown
  Obtained from environmental sample
  misc_feature (1)..(426): n is a, c, g, or t
atggataaacaggcaattttcgcggcctttttcaagggaaatctgccgaatggcctccaaaaagggctggctttcaatgtcgcccgtcgtgccgcctatctcggtaatcaaaacatcagcgcggcttttttccgctcccgcataaataaaactttttatttcggtggtgacatggggaataacctgtacggtgctgccaagatagccgcccgcgcgctcgcgttcaagcacattcctgtacacctggccggatgtcagattactgagtttcgtcaggttttcatcgataaaacgctcgtaatgccccaggtcaagatcggtctccgcgccgtcgtctgtaacaaaaacctcgccgtgctggaacggactcatagttcccggatcgacattcatgtaagggtcgagtttttgcgccgcgacttttaa

SEQ ID NO: 54710 - protein, 141 aa, Unknown
  Obtained from environmental sample
  misc_feature (1)..(141): Xaa is any amino acid
MDKQAIFAAFFKGNLPNGLQKGLAFNVARRAAYLGNQNISAAFFRSRINKTFYFGGDMGNNLYGAAKIAARALAFKHIPVHLAGCQITEFRQVFIDKTLVMPQVKIGLRAVVCNKNLAVLERTHSSRIDIHVRVEFLRRDF

SEQ ID NO: 54711 - DNA, 1140 bp, Unknown
  Obtained from environmental sample
  misc_feature (1)..(1140): n is a, c, g, or t
atgagccacaaagactcagtgacccgtctgcctaaaggtttttgcgaaacggcaaaaacatcggtttgcacagccgcctgtgaaaacaaagcgaaaaaactttacggcgtgcagtttcacccggagacaaagcacaccaaaggcggggaaaaaatcatccgcagatttttatacgacgtatgcggcgcgtcaggaaattataaacttgacgattatataaaaacgcaaataaaaaagatacaaaaaaaagcgggcgaagaaaatgtcctgctcgccttatcgggcggagtggactcgtccgtatgtgcgaaacttttatccaaagccattcccggacagcttgcgtgcatctttgtcgatcacggcctgatgcggctaaatgagggcgatgagatagagcgcgtattttcaaaagaaaaactcagtttcatccgcgttaacgcgaaagaccgcttcctcgcgaaattaaaaggagtggcggacccagagacaaagcgcaaaattatcggcgaagaatttatccgcgtgtttgaggaagaagccgtaaaacttggaaatattccgtatcttgcgcagggaacgatctaccccgatgtcgttgaatcgggaggcaagcacggcgccgttatcaagagccatcataatgtcggcggacttccggaaggactncacttcacgggagttgtggaacccctgtccttgctttttaaagacgaagtgcgcgtcatgggtaaaaagttagggttgccttcatcaatcgtaaaccgccagccctttcccgggccggggcttgccatccgcgtcatgggcgaggtgacggaggaaaagctggatgttttacgccgcgccgacgctatactgcgcgaagaactggatgccctgaaacgcagacccagtcaatacttctgcgtcatgaccggcacgcgatccgtaggcgttaaaggggacgacaggacttacgattttgtaatagctgtaagggctgtaacgaccgacgattttatgacttgcgaatacgccacgctgcctcacaatttattaatccgaatatcctcacggatcacggctgagataccgcaggcgagccgcgttgtttacgatattacatcaaaacctccggcaacggtggaatgggagtag

SEQ ID NO: 54712 - protein, 379 aa, Unknown
  Obtained from environmental sample
  DOMAIN (288)...(378): GMP synthase C terminal domain
  misc_feature (1)..(379): Xaa is any amino acid
MSHKDSVTRLPKGFCETAKTSVCTAACENKAKKLYGVQFHPETKHTKGGEKIIRRFLYDVCGASGNYKLDDYIKTQIKKIQKKAGEENVLLALSGGVDSSVCAKLLSKAIPGQLACIFVDHGLMRLNEGDEIERVFSKEKLSFIRVNAKDRFLAKLKGVADPETKRKIIGEEFIRVFEEEAVKLGNIPYLAQGTIYPDVVESGGKHGAVIKSHHNVGGLPEGLHFTGVVEPLSLLFKDEVRVMGKKLGLPSSIVNRQPFPGPGLAIRVMGEVTEEKLDVLRRADAILREELDALKRRPSQYFCVMTGTRSVGVKGDDRTYDFVIAVRAVTTDDFMTCEYATLPHNLLIRISSRITAEIPQASRVVYDITSKPPATVEWE

SEQ ID NO: 54713 - DNA, 840 bp, Unknown
  Obtained from environmental sample
  misc_feature (1)..(840): n is a, c, g, or t
atggatcagatggccgagggggtcgccggcctgggtcttatcggcggttctttagctaaagcgtactcaagcggcaatcacactgtttacggttacgacatagacgaatccataatcagtttcgcgaaactttcaggcgcggtaaaaggccttctggacgcaagcgcaataaaattatgcgatgttctgcttgtagccgtaaatccaaaagacgcggtaaaatacatagagaataccgcgccgaatatcgcaaaacacacgtttgtaatcgactgctgcggtgttaaacgctatatttgcgaaaaatgctttcctttagctaaaaaatacggctttactttcgtgggcggccaccctatggcgggaaaccacaagggcggattcaaaaacagccgcgagaaccttttcaaaggcgcgtcaatgatactcgtgccgccggtttttgacgatgccgccttattcggcaggatagaggaattgataaaaccggcaggtttcggcaatttaacttttaccacggcggaaaaacacgacgagatgatcgcgttcagttcgcagatggcgcatgttgtttcaaatgcgtttataaaaagcccttccgccggcggccataaaggtttttccgcgggaagctacaaagacctaacacgcgtcgcccagcttaacgcaataatgtgggcggaattgtttatgaaaaacagcgataatttaacttgcgagcttgacatattgattaaagaactttcccgttacagggacgcgcttacggaaaaggacgaaactaaaatgacagaactgttaacagaaggcagtaaaattaaggaaaagctggacagataa

SEQ ID NO: 54714 - protein, 279 aa, Unknown
  Obtained from environmental sample
  DOMAIN (8)...(274): Prephenate dehydrogenase
  misc_feature (1)..(279): Xaa is any amino acid
MDQMAEGVAGLGLIGGSLAKAYSSGNHTVYGYDIDESIISFAKLSGAVKGLLDASAIKLCDVLLVAVNPKDAVKYIENTAPNIAKHTFVIDCCGVKRYICEKCFPLAKKYGFTFVGGHPMAGNHKGGFKNSRENLFKGASMILVPPVFDDAALFGRIEELIKPAGFGNLTFTTAEKHDEMIAFSSQMAHVVSNAFIKSPSAGGHKGFSAGSYKDLTRVAQLNAIMWAELFMKNSDNLTCELDILIKELSRYRDALTEKDETKMTELLTEGSKIKEKLDR

SEQ ID NO: 54715 - DNA, 690 bp, Unknown
  Obtained from environmental sample
  misc_feature (1)..(690): n is a, c, g, or t
atgaaaacaattacggttagcgcttccaaaatttatgatataaaaataggttccggtattctggacgacgcgggaagtattttgcaaaaaatcggcagtaccgccgcaatcgttaccgatgatattgtcgctcctctctacgcgaatcggttggagcaagccctatcgcgcaataaaacccgtgttgtacgctatgtcatccctaacggggaagcttctaaaagttcggaacaactggtttctctcgtaaattttcttgcaaaggaaaaactttcgcgcacggacactgtaatcgccctgggcggcggcgttgtcggcgacctggcgggattcgcggcggcggtatacatgcgcggggttggctttgttcaaatacccactaccctgcttgccgcggtagattcatcagtaggcggaaagaccgcgattaatcttgaggcgggcaaaaatttagccggcgctttttaccagccggacgctgttttatgtgacatctcattgctttctaccctgaagcctgaagtttttaaggacggctgcgcggaagttattaaatacggagttatcgcggatagcgaattgtttaaatcctttgaaaaacccataaaagaccggcttgaagacattattgcacgctgtgttgagataaacgcgatatcgtcgcggaagatgaatttgaaaagagcgtaa

SEQ ID NO: 54716 - protein, 229 aa, Unknown
  Obtained from environmental sample
  DOMAIN (16)...(229): 3-dehydroquinate synthase
  misc_feature (1)..(229): Xaa is any amino acid
MKTITVSASKIYDIKIGSGILDDAGSILQKIGSTAAIVTDDIVAPLYANRLEQALSRNKTRVVRYVIPNGEASKSSEQLVSLVNFLAKEKLSRTDTVIALGGGVVGDLAGFAAAVYMRGVGFVQIPTTLLAAVDSSVGGKTAINLEAGKNLAGAFYQPDAVLCDISLLSTLKPEVFKDGCAEVIKYGVIADSELFKSFEKPIKDRLEDIIARCVEINAISSRKMNLKRA

SEQ ID NO: 54717 - DNA, 561 bp, Unknown
  Obtained from environmental sample
  misc_feature (1)..(561): n is a, c, g, or t
ttgccgaggctggtcagggataccatacgcaaggatatttcctatctgggaatgaccgcggggacgaccgtaggcggcaacgcgggctatgaacccgatttgctggttcccctgataaagaaagccctggggctggactgcagaaggaaattctgcgtggtaggactcggaaggctcggttcggcgtacatcaatttcgccccttccgaacttgcggaattcgagtttgccgcgggcttcgacaccaacgtgaacagggtggagatattgccgtcaccggtgcagttgtaccctgcttacaaactgcaggaagtggtaagccgtttaaagatcgagatagccctgctttgcgttccgtccgacgcggcgcaggctgtcgcggagaaatgcgtggccgctgggatttcgggcatcctgaactttgctcccgtggcgttgaggttgccgccggaaatcgccgtgcggaatatgtatgtggcggatgaattgaggagtttggctattaaaatgggaagaagggaacggagaacggggaacagggaacagtgttttagttcgtaa

SEQ ID NO: 54718 - protein, 186 aa, Unknown
  Obtained from environmental sample
  DOMAIN (44)...(148): CoA binding domain
  misc_feature (1)..(186): Xaa is any amino acid
MPRLVRDTIRKDISYLGMTAGTTVGGNAGYEPDLLVPLIKKALGLDCRRKFCVVGLGRLGSAYINFAPSELAEFEFAAGFDTNVNRVEILPSPVQLYPAYKLQEVVSRLKIEIALLCVPSDAAQAVAEKCVAAGISGILNFAPVALRLPPEIAVRNMYVADELRSLAIKMGRRERRTGNREQCFSS

SEQ ID NO: 54719 - DNA, 1062 bp, Unknown
  Obtained from environmental sample
  misc_feature (1)..(1062): n is a, c, g, or t
atgaaacgagtgtttaatttttccccggggccttcaatgctgcccctggcggttctggaaaaagccgcggcggaaatgtgcgatgccaatggcagcggccagtcggtaatggagatgagccacaggtcanaggactttaagcccattattgataaagcggaggccctgcttagggaattaatgggtatccccgccaattataaggtgctttttttacagggcggcgcttcgcttcaattttcaatgattccccttaacctggcagccggcgaaagacccggacagggaaagaaagcttcatatattgataccggcatttgggctgataaggcggcgaaagaggcctcaaaatacgccgaggtgacggtaaaggcaagttccaaagacaaggcctacacatacattcccgacgctcctcccccttcctctgacgacgcttattatcacataacgctgaacaatacaattgtcggaacaaggtgggataaacttccaaacacaggttccgtgccgcttgttacggacgcttccagtaatatcctttcagagccgtttgatgtcggcaaattcggacttatatacgccggcgcccagaaaaatttggggcctgcgggaactaccgttgtaattatccgcgaagacctaatcaaaaaagtaccggattggattccaatgatgctcaggtacgatattcacgcggctgaaggttccatgtacaatactccgccgtgctacggtatttacattattatgcttgttctggaatggctgaaaaatctgggcggcgttgaagcaatgggaaaattgaaccgtgaaaaagccaaactcttttatgattaccttgacgcgtcggatctgttttattctcccgtgcaaaaagaataccgcagtttgatgaatatcccgtttataacgacggaacagaatgaggcaaaaaagaccgagcttgaaacccgctttgtaaaagaagcggcggttgcaggacttatcaacctcgccggtcacaggcttgtcggcggcatgagggccagtattataacgctatgcctcttgagggggtaa

SEQ ID NO: 54720 - protein, 353 aa, Unknown
  Obtained from environmental sample
  DOMAIN (4)...(348): Aminotransferase class-V
  misc_feature (1)..(353): Xaa is any amino acid
MKRVFNFSPGPSMLPLAVLEKAAAEMCDANGSGQSVMEMSHRSXDFKPIIDKAEALLRELMGIPANYKVLFLQGGASLQFSMIPLNLAAGERPGQGKKASYIDTGIWADKAAKEASKYAEVTVKASSKDKAYTYIPDAPPPSSDDAYYHITLNNTIVGTRWDKLPNTGSVPLVTDASSNILSEPFDVGKFGLIYAGAQKNLGPAGTTVVIIREDLIKKVPDWIPMMLRYDIHAAEGSMYNTPPCYGIYIIMLVLEWLKNLGGVEAMGKLNREKAKLFYDYLDASDLFYSPVQKEYRSLMNIPFITTEQNEAKKTELETRFVKEAAVAGLINLAGHRLVGGMRASIITLCLLRG

SEQ ID NO: 54721 - DNA, 732 bp, Unknown
  Obtained from environmental sample
  misc_feature (1)..(732): n is a, c, g, or t
atgtttcgcgttaaaacaatgaataaaatctcgccttttggcctggaactgtttcccagggacaagtatgaggtcgcaagcgagattcccaatcccgacgccatactggtgcgaagcgctgacctcaattccgtagaaatccccggctccgttcttgccattgcccgcgccggcgcgggggtcaacaatatacccgttccaaagtgcagcgacaaggggatcgtggtcttcaatacacccggcggaaacgccaacgcggtaaaggaacttgccatcgcttccatgctgattgcgtcgcgcaacatagtcggcggtataaactgggcggcttcaatcgcggacaaggcagaccaggttcccgatctggttgaaaaaggaaaatcccagtttgaggggccggaactcatgggcaaaactcttggcgtggtaggacttggcgctatcggcgtaatggtcgccaacgacgcgattgcccttggcatgaatgtcattggctatgacccatatatttcagttgacgccgcgtggaatctttcccgcgaggttgtccgcgcggacacacttgagggaatgctcgccaaagcggactacttaaccctgcatatacccctggccgatacgacaaaggggctgctaaacgcggaaaaaatccgctttatgaagaaaggcatccggataattaacctggcgcgcggcgctttggtcaacgaggccgatataatccaggcttga

SEQ ID NO: 54722 - protein, 243 aa, Unknown
  Obtained from environmental sample
  DOMAIN (1)...(193): D-isomer specific 2-hydroxyacid dehydrogenase, catalytic domain
  misc_feature (1)..(243): Xaa is any amino acid
MFRVKTMNKISPFGLELFPRDKYEVASEIPNPDAILVRSADLNSVEIPGSVLAIARAGAGVNNIPVPKCSDKGIVVFNTPGGNANAVKELAIASMLIASRNIVGGINWAASIADKADQVPDLVEKGKSQFEGPELMGKTLGVVGLGAIGVMVANDAIALGMNVIGYDPYISVDAAWNLSREVVRADTLEGMLAKADYLTLHIPLADTTKGLLNAEKIRFMKKGIRIINLARGALVNEADIIQA

SEQ ID NO: 54723 - DNA, 444 bp, Unknown
  Obtained from environmental sample
  misc_feature (1)..(444): n is a, c, g, or t
ttgaattcggataaaatcgccgcctatgtcaccgacttcccgtccgccgaaatgcttgcctgtaaaaaggcgatntgcgttccccatttgggcgcctcgacccccgaagcggaggataactgcgccattatggcggtaaagcagcttatgaacttcctggaaaacggcgcgatacgcaattcggtgaattatccacactgccgtcttgaccagaacgcccccttccggctgctggtgtcaaaccgcaatattcccaatatggtggggcagatcaccacgatcctggcaggcgcgaatatcaacattaccgacctgattaaccaccataagggcgattttgcctataatatcatcgattctgagcaaaaaatcccggatccggccctggaacagctcaaaaagatagaaggcatcatccgtgtgagattgatagaaaagagttga

SEQ ID NO: 54724 - protein, 147 aa, Unknown
  Obtained from environmental sample
  DOMAIN (75)...(144): ACT domain
  misc_feature (1)..(147): Xaa is any amino acid
MNSDKIAAYVTDFPSAEMLACKKAXCVPHLGASTPEAEDNCAIMAVKQLMNFLENGAIRNSVNYPHCRLDQNAPFRLLVSNRNIPNMVGQITTILAGANINITDLINHHKGDFAYNIIDSEQKIPDPALEQLKKIEGIIRVRLIEKS

SEQ ID NO: 54725 - DNA, 585 bp, Unknown
  Obtained from environmental sample
  misc_feature (1)..(585): n is a, c, g, or t
atggcgaggaccttcagctgtatcctctcagagccgcttgatgtaagcaagtttggattgatctatgcgggcgctcagaaaaacttgggtcccgcgggaactacccttgtaattatccgcgaagatttggtaaaaaagactcctgattgggttcctgtcatgctcaggtatgacacccacgtcggcgaaggctcaatgtacaatactccgccatgctacggcatttacatcatcgggctggtattggaatggctgaaaaacttaggcggcgttgaggcaatcggaaaattgaaccgcgaaaaagccaaacttttttatgactatcttgattcatcggatttatttcattctcccgttcaaaaagaatcccgcagtttgatgaacattccgtttgtaacaaaagagcaggacgaagccaagaagacagagattgaaacccgttttgtaaaagaagcggcggcggccggacttataaatcttgccggacacaggcttgtaggcggcatgagggcaagtatttacaacgcaatgccaatagaaggcgtaaaagcgttgataagtttcatggacaaattcaagaaataa

SEQ ID NO: 54726 - protein, 194 aa, Unknown
  Obtained from environmental sample
  misc_feature (1)..(194): Xaa is any amino acid
MARTFSCILSEPLDVSKFGLIYAGAQKNLGPAGTTLVIIREDLVKKTPDWVPVMLRYDTHVGEGSMYNTPPCYGIYIIGLVLEWLKNLGGVEAIGKLNREKAKLFYDYLDSSDLFHSPVQKESRSLMNIPFVTKEQDEAKKTEIETRFVKEAAAAGLINLAGHRLVGGMRASIYNAMPIEGVKALISFMDKFKK

SEQ ID NO: 54727 - DNA, 1161 bp, Unknown
  Obtained from environmental sample
  misc_feature (1)..(1161): n is a, c, g, or t
atgtttcgtatacagacattaaataaaatctctccccttgggttggatcttttccctagggataaatacgaggtcgcgagcgacattcccaatcccgatgcgatattggtgcgaagcgccgacatgaacggctcggagataccttcttccgtacttgccattgcgagggcaggcgcgggttataataatattcccgttcagaaatgcagtgacagtggggtagtggtctttaatactccgggcgctaacgccaacgcagttaaggagcttactcttgcggcgttacttctttcatcgcgtaacattgtcggcggcattaactggactgtttcagcggcggacaagcccgatatagcggaacttgtagaaaaggaaaagtccaaatttacagggcctgaaattaagggcaaaaccttaggtgttgtggggcttggcgcaatcggcgtaatggtcgcgaatgacgcgattgccttaggtctggatgtaattggctatgatccgtatatttccgtggacgccgcatggaatctttcacgcgaagtcatccgcgccgatacccttgaaagccttcttgcgaaatcggattacattactctgcaccttccccttggggaaacaaccaaagggcttcttgacgcggaaaagttccgtataatgaaaaaagacgcgcgagttatcaacttttcgcgtaatgcgctggtaaaagataaagatataattgaagcgcttgactcgggaaaaatcagcgtctatgttacggatttcccgaatcaggagcttttggcatgtaaaaaagtaatcggtattccgcatcttggggcttcaactcctgaggccgaagataattgcgcaataatggctgttaagcaaattatcgattatcttgagacgggaacaatccgcaattccgtgaactttccgcgctgtaaacttgaacaacgcgctccgaacagactgcttgtagtgaataaaaatattcccaatatggtagggcagataacgacaattctcgcaggttcaaatatcaatattacagacttaatcaaccaccaccgtgacgattatgcctataatataattgataccgaacagcaattaccggcacccgtgcttgataaaattcgtaacgtagacggaataataagggttcgctcaatttaa

SEQ ID NO: 54728 - protein, 386 aa, Unknown
  Obtained from environmental sample
  DOMAIN (4)...(305): D-isomer specific 2-hydroxyacid dehydrogenase, catalytic domain
  misc_feature (1)..(386): Xaa is any amino acid
MFRIQTLNKISPLGLDLFPRDKYEVASDIPNPDAILVRSADMNGSEIPSSVLAIARAGAGYNNIPVQKCSDSGVVVFNTPGANANAVKELTLAALLLSSRNIVGGINWTVSAADKPDIAELVEKEKSKFTGPEIKGKTLGVVGLGAIGVMVANDAIALGLDVIGYDPYISVDAAWNLSREVIRADTLESLLAKSDYITLHLPLGETTKGLLDAEKFRIMKKDARVINFSRNALVKDKDIIEALDSGKISVYVTDFPNQELLACKKVIGIPHLGASTPEAEDNCAIMAVKQIIDYLETGTIRNSVNFPRCKLEQRAPNRLLVVNKNIPNMVGQITTILAGSNINITDLINHHRDDYAYNIIDTEQQLPAPVLDKIRNVDGIIRVRSI

SEQ ID NO: 54729 - DNA, 729 bp, Unknown
  Obtained from environmental sample
  misc_feature (1)..(729): n is a, c, g, or t
ttggaaagaagtttttcaaaaataaaagtaaaattaataattcccatatttacaggtgcgctctgctcaatgattttatgcgcgataatcgcggattattccggttatataaaaaaaaccgcgcctgatatccccattattgaagatgaagaccttgatgaagaggaagaagatttttccgcgctttttagccgttcagaaaacagtcctgattccattttggaatattaccgaaaccccgagtacaaagaatgggtaacggaattttttaccgctatatgttcaaatgcggaaattgcgcgggctattcttgacagttgcgatatatttgacattccgccggcgttagctttcgcgttatgctgggaagaaagcagatttaacccaaacgcgataaacaaaaaaaatcgcgacggaagcgtagatcgcggtttatttcaattaaacaacaaatcatttccctatctggatattttgtctttttatgatattaaaatcaacgcgcgtaacggtgtcggtcatctgcgtaactgcatgaattcaagcggcaatgaaatttccgctcttgccatgtataacgccggcgccggcagggtaaagtcaacaggcgccccggaggtcactcttaattacacaagccgcattttagataaccgcagaagactggaaaaccgtttcttttcaagacttcttaaggaagaagaaaaacgcctaactgaagagaaataa

SEQ ID NO: 54730 - protein, 242 aa, Unknown
  Obtained from environmental sample
  DOMAIN (101)...(215): Transglycosylase SLT domain
  misc_feature (1)..(242): Xaa is any amino acid
MERSFSKIKVKLIIPIFTGALCSMILCAIIADYSGYIKKTAPDIPIIEDEDLDEEEEDFSALFSRSENSPDSILEYYRNPEYKEWVTEFFTAICSNAEIARAILDSCDIFDIPPALAFALCWEESRFNPNAINKKNRDGSVDRGLFQLNNKSFPYLDILSFYDIKINARNGVGHLRNCMNSSGNEISALAMYNAGAGRVKSTGAPEVTLNYTSRILDNRRRLENRFFSRLLKEEEKRLTEEK

SEQ ID NO: 54731 - DNA, 435 bp, Unknown
  Obtained from environmental sample
  misc_feature (1)..(435): n is a, c, g, or t
ttgtccatgtattatgacgcggtagacgcaaatcttcttcactcgacaatttggaattatgcgcccagtaacacaaataaatacggcgacagctggaacgacgaagacctttcaatattttcagaaaacagcgaacgcgccgcctccggctggaaacgcccttatccaatggctaccgcgggaaagccgctcttctttagctggaataaaaaacggaaaaaaatagttttctactttaacgctgaaagcggcattaaagcgccaactgtaatttatctgcctgaatatatattcgcctcagagccaaaaatagaaattgtaaccccaacaggggcggttctacattgggaacataaccgtgaagagcaaaagcttttcatctacaacggcgattataatggagaagcactggttaaaataacaaataacaaataa

SEQ ID NO: 54732 - protein, 144 aa, Unknown
  Obtained from environmental sample
  misc_feature (1)..(144): Xaa is any amino acid
MSMYYDAVDANLLHSTIWNYAPSNTNKYGDSWNDEDLSIFSENSERAASGWKRPYPMATAGKPLFFSWNKKRKKIVFYFNAESGIKAPTVIYLPEYIFASEPKIEIVTPTGAVLHWEHNREEQKLFIYNGDYNGEALVKITNNK

SEQ ID NO: 54733 - DNA, 795 bp, Unknown
  Obtained from environmental sample
  misc_feature (1)..(795): n is a, c, g, or t
ttggacacttccgatccaaagcgcatccttattacggagcttccgtttggttcaaccaccgaaagtatcataaacagtatcgacagcgcggcaagggcgggaagaatcaagatacttggcattaacgattttaccaccgacaaagttgaaatagaaattaaacttgcccgcggtgtgtatgctcaggaaaccatagatgcgctttttgcttttaccgagtgcgaacagtcaatttccgtaaatcttcttgtaattaaagacggcctgccgaccgtgatgacggtaaacgaggtaatcaaatatcacgcgaaacagcttgtaaagattcttacaaaagaacttgaactggaaaaaaaggagcttcttgacaaactgcacctgcgcacgttggaaagaatttttatcgaagagcgtatttacaagggcattgaaaaaatgaagaccgcaaagggcgtgcaggacgcggttgttgacggttttaaaccgtttatgaaagaagtaggcccgcgcggcatttcagatgacgatgttgagcatcttttgcgaattccaatccgcagaatttcgttatacgacatcaacaaggcaaaggatgaaatggagcagatacaggcgcgtattaaagagataaacagccatctaaaaaatatagttgcctattcggtatcatggcttaagggtattattgcaaaaataaaagccaatgaggaaatcggcggcggacagagaaaaaccattgtaggcgcttttgacaaagtaatcgccaaagaagttgttaaaagggacgttgaataa

SEQ ID NO: 54734 - protein, 264 aa, Unknown
  Obtained from environmental sample
  DOMAIN (1)...(233): DNA gyrase/topoisomerase IV, subunit A
  misc_feature (1)..(264): Xaa is any amino acid
MDTSDPKRILITELPFGSTTESIINSIDSAARAGRIKILGINDFTTDKVEIEIKLARGVYAQETIDALFAFTECEQSISVNLLVIKDGLPTVMTVNEVIKYHAKQLVKILTKELELEKKELLDKLHLRTLERIFIEERIYKGIEKMKTAKGVQDAVVDGFKPFMKEVGPRGISDDDVEHLLRIPIRRISLYDINKAKDEMEQIQARIKEINSHLKNIVAYSVSWLKGIIAKIKANEEIGGGQRKTIVGAFDKVIAKEVVKRDVE

SEQ ID NO: 54735 - DNA, 441 bp, Unknown
  Obtained from environmental sample
  misc_feature (1)..(441): n is a, c, g, or t
gtgtcgggtgcaaaaatcgccgaagtttcgccttttgacagaattcttgttatccgcaagaacggaatgtacacgatcatggatttaagcgaaaaaacatttgtgggagctgacgcatggtggataggagtcgcggacaaggaagcgctttctaaaaccatttttacaattatttacaaggaaaaagagacgggtttcgcatgcataaaaccctgcataattgagggctggataattaacaaggattatttccttgtcccggacggggcgcaggtttttcatgtggacacaatgcagaaatttgttttcagcgtgaaatatgttcctaaaccgcgtcttaaagttctttccgaggattttaaggcgcatgactacatgtgcgcggcgttaagcggggggaatcaggctttccgcgaaagaagcggcaaaagtagaatgtaa

SEQ ID NO: 54736 - protein, 146 aa, Unknown
  Obtained from environmental sample
  misc_feature (1)..(146): Xaa is any amino acid
MSGAKIAEVSPFDRILVIRKNGMYTIMDLSEKTFVGADAWWIGVADKEALSKTIFTIIYKEKETGFACIKPCIIEGWIINKDYFLVPDGAQVFHVDTMQKFVFSVKYVPKPRLKVLSEDFKAHDYMCAALSGGNQAFRERSGKSRM

SEQ ID NO: 54737 - DNA, 1452 bp, Unknown
  Obtained from environmental sample
  misc_feature (1)..(1452): n is a, c, g, or t
ttgatttgtcgcagccgacataaccaattgggagaatggctaaacaagcagccagaaaatacaaccggttccccgtataccattgcgcttaatgttaataataacaatgatatttcaaacattgtcggaacaacgcttaagaacaatccaaacaaattcgtctcccttgactttcccgacagtcccataaccggcattgtgaccagcgctttttacggttgcaccagccttaccggcataatcatacccgacagagttacaggtattgcaggtaacgctttttccggttgtatcaaccttaccaacgtaaccataggaagcggcgttaccgacattgggactggagctttttccggctgcagcaaccttaccagcctaaacataccaaacaacgttaccaacattgcgagtggtgcttttaacggctgttccagccttgccagcgtaaccatacccgacagggttaccagcattaagagttccacttttcaaaattgtaccagccttgccgacgtaatcatatccaacggcgttacctacattgagcggagcgcttttgaaaattgcaccagccttgccggcatatccataccgaacagcgttaacagcattgacgattgggcttttagaggttgcaccagccttatcggcgtaaccataggtaacaaccttacccacattgggggaagggctttttatggctgcaccagacttaccgaaataactgttaacgccggtaatagcgcatacagttcggagaatggcatattgtacaacanaaataaaaccactttagtcgcgtatccggcagggaaaacagacaccgcatttaccataccgaacggcgttaccgacattgaagatggcgttttttccggcaccagcattaccagcgtaaccatacccaaaagcgttaccagcattggggaaagcgtttttggcaattgcaccaaactatccacaataaatcttgaagctggtaatagcgtttatttattacaggacggcgtattatacaacaaagctaaaacaactttaattcaatatccgccgggaaaaacaaacacttcatttaccataccgaacaccgttaccagcattggaagcggcgcttttttcggttgcaccagccttaagagcgtaaccataccaaacagcgttaccagcattggaagtgccgcttttgccgattgcaccggcattaccagcataaacatacctaacagcgttaccagcattggaaatgccgctttttccaaaaccggcattaccagcttaaccataccgaacagcgttaacagaattgcggatttcgctttttccaacaacggcattaccagcgtaatcatacctgatagcgttatcggtattggatgtggcgcttttaaaaattggaccagtcttaccagcgtaaccataccggacataaaggatattgcggaaaatacttag

SEQ ID NO: 54738 - protein, 483 aa, Unknown
  Obtained from environmental sample
  misc_feature (1)..(483): Xaa is any amino acid
MICRSRHNQLGEWLNKQPENTTGSPYTIALNVNNNNDISNIVGTTLKNNPNKFVSLDFPDSPITGIVTSAFYGCTSLTGIIIPDRVTGIAGNAFSGCINLTNVTIGSGVTDIGTGAFSGCSNLTSLNIPNNVTNIASGAFNGCSSLASVTIPDRVTSIKSSTFQNCTSLADVIISNGVTYIERSAFENCTSLAGISIPNSVNSIDDWAFRGCTSLIGVTIGNNLTHIGGRAFYGCTRLTEITVNAGNSAYSSENGILYNXNKTTLVAYPAGKTDTAFTIPNGVTDIEDGVFSGTSITSVTIPKSVTSIGESVFGNCTKLSTINLEAGNSVYLLQDGVLYNKAKTTLIQYPPGKTNTSFTIPNTVTSIGSGAFFGCTSLKSVTIPNSVTSIGSAAFADCTGITSINIPNSVTSIGNAAFSKTGITSLTIPNSVNRIADFAFSNNGITSVIIPDSVIGIGCGAFKNWTSLTSVTIPDIKDIAENT

SEQ ID NO: 54739 - DNA, 792 bp, Unknown
  Obtained from environmental sample
  misc_feature (1)..(792): n is a, c, g, or t
atgaaggggggctatgacgcgcttgtacacctggccgcttcaaaggccgcaggggaatcaatgttacagcctgaaaaatattctcgcaacaatatcatcgggacgattaatatattaaacgctgcttcggaaactggaatcaaaaacattgttttttcttccagcgcggcggtttatggcgagcctgagtatcttcccattgacgaaaagcaccccacaaaaccggagaattactacggttttacaaaactggaaattgagcgttttctgggttggtacgaaaaactcaggggcatacgctatgcctgtctgcgctattttaacgcggcgggctatgatgtaaaaggagccataaaaggactggaacagaatccgacgaatcttctgccggtcgttatggaaacagcctgcggcatgagggcggagcttcaaatttttagcagcgactacgacacgccggacggcacttgcattagggactatatccatgtcagcgaccttgccatcggccacgctgtcgcgctggattacatcatcaaaaacaacaaaagcctgatcgtgaatcttggcagcgaagcgggatgctcggtaaaggaagttctcgaaaccgcgcggcgtgtgacaggcaggcccattcccgcaaagatcgccggcaggcgcgtcggcgatccggcaaagctgaccgcgtcatcggcccttgcccgcgagctgcttggctggtcagcaaaatattcagacatggaaactttgatacggacgagttgggatgtttataaggagactcatttatga

SEQ ID NO: 54740 - protein, 263 aa, Unknown
  Obtained from environmental sample
  DOMAIN (2)...(190): NAD dependent epimerase/dehydratase family
  misc_feature (1)..(263): Xaa is any amino acid
MKGGYDALVHLAASKAAGESMLQPEKYSRNNIIGTINILNAASETGIKNIVFSSSAAVYGEPEYLPIDEKHPTKPENYYGFTKLEIERFLGWYEKLRGIRYACLRYFNAAGYDVKGAIKGLEQNPTNLLPVVMETACGMRAELQIFSSDYDTPDGTCIRDYIHVSDLAIGHAVALDYIIKNNKSLIVNLGSEAGCSVKEVLETARRVTGRPIPAKIAGRRVGDPAKLTASSALARELLGWSAKYSDMETLIRTSWDVYKETHL

SEQ ID NO: 54741 - DNA, 636 bp, Unknown
  Obtained from environmental sample
  misc_feature (1)..(636): n is a, c, g, or t
atgaaggaaaaaattttcaaatggatcgatggcgctgtttctctggcggtggagcttcagggcgaattgaccaaacgccccgctgtttctccggattcaggcggtgagggcgaactggataaatgtgtatttctggaaggctggcttaaagcgcacggtgtcacccacctggaacgctttgacgctcctgacaaacacgccaaaggatgggtgcgtcccaatctcgttgcaaccataccgggcaaaggcaatgagacggatggctgcctgtggatcatcagccatcttgatgtcgtgcccccgggcgaagccgcgcattgggaaagcgacccctggacaatggtggaagccaaagacggcccgcttggccacaggcttatcggcaggggagtggaggacaaccagcaggggctgacatcttcagtgcttgcggcgctggcctttgtcaagcagggcatacatccttgccgcacggtaaaacttcttttcgtggctgacgaggaaatgggtaatgattatggcatcgtgtggcttttgaacaccacgatgatatgttcagtaaaaatgataacgcgctcatccccgattggggggacacaaagggcgaaggtattgaggttgccgaaaaaaatatga

SEQ ID NO: 54742 - protein, 211 aa, Unknown
  Obtained from environmental sample
  misc_feature (1)..(211): Xaa is any amino acid
MKEKIFKWIDGAVSLAVELQGELTKRPAVSPDSGGEGELDKCVFLEGWLKAHGVTHLERFDAPDKHAKGWVRPNLVATIPGKGNETDGCLWIISHLDVVPPGEAAHWESDPWTMVEAKDGPLGHRLIGRGVEDNQQGLTSSVLAALAFVKQGIHPCRTVKLLFVADEEMGNDYGIVWLLNTTMICSVKMITRSSPIGGTQRAKVLRLPKKI

SEQ ID NO: 54743 - DNA, 729 bp, Unknown
  Obtained from environmental sample
  misc_feature (1)..(729): n is a, c, g, or t
gtggcttttgaacaccacgatgatatgttcagtaaaaatgataacgcgctcatccccgattggggggacacaaagggcgaaggtattgaggttgccgaaaaaaatatgatctgggtgcgctttacaaccacgggcaagcagtcccacgcttcaacccccgatcagggcgcaaacgcttttcttgccggctctgacctcgcgctgcggcttcattacgggctttccgaaaaattcaacgccagggacagtctttttgagccggaatactccaccttccagccgaccaaaaaagaggccaatgtccccaatgtaaacaccattcccggtggggatgttttctatgttgatatgcgcgtgcttccccgttattcgataaatgaggtggtagacgaaattgaagtcatcaaggaagaggttgcggcgaggcacaaggtttccattgattacagcattgtacagtcaaacgaatcccccccaacttcggcggaagccccgtttatcaaatccctctcgcttgcgataaacgaagtttacggggagacggcccgtcccgtcggcataggcggcggcaccgtggcgtcgttccttcgcaagataggaattgacagcgcggtttgggcgcggcttagcggtactgcccatcagcctaacgaatacgcccttgtcaaagacatactgggcgatgcgaaggttatggcgctgttgatgtggggaacgtccgacaaatag

SEQ ID NO: 54744 - protein, 242 aa, Unknown
  Obtained from environmental sample
  DOMAIN (31)...(144): Peptidase dimerisation domain
  misc_feature (1)..(242): Xaa is any amino acid
MAFEHHDDMFSKNDNALIPDWGDTKGEGIEVAEKNMIWVRFTTTGKQSHASTPDQGANAFLAGSDLALRLHYGLSEKFNARDSLFEPEYSTFQPTKKEANVPNVNTIPGGDVFYVDMRVLPRYSINEVVDEIEVIKEEVAARHKVSIDYSIVQSNESPPTSAEAPFIKSLSLAINEVYGETARPVGIGGGTVASFLRKIGIDSAVWARLSGTAHQPNEYALVKDILGDAKVMALLMWGTSDK

SEQ ID NO: 54745 - DNA, 594 bp, Unknown
  Obtained from environmental sample
  misc_feature (1)..(594): n is a, c, g, or t
atgccgccgaacttaacgaaaaaaaagattcaccgggttgtattccgcagaaaggtatttgtaatttttacccttctcgtgcagatcctgtttattgttcttctgattgcgggaaccagcatatatatacgttacgcgaactgggttcttcacattatcagcatcattgtctgtatttatattattaacagacacgccaaggcggcgtataagatcacatggattttcctgattatgcttttccccatttttggcggaatcctgtatatcgttttcttctatgcctcgaaccccagaaaactcaagcgtttaattaagcgtaataccagggagagccggagcgccttttatttgggcggggacagcctgccggatctcgacaaggcgtatcccgaattcaagcctcaggcgcattatttgcaggagtacgccggtttcccggtgtatgccaataccaaagcgctgtactttgattcaggggagggattttataagcgcgcgcttgaagaactgggaaaagcgaaacgatacatttttttggaattttttattctgaaagaaggagcaatgtcctcgtgccgatctgatccatga

SEQ ID NO: 54746 - protein, 197 aa, Unknown
  Obtained from environmental sample
  misc_feature (1)..(197): Xaa is any amino acid
MPPNLTKKKIHRVVFRRKVFVIFTLLVQILFIVLLIAGTSIYIRYANWVLHIISIIVCIYIINRHAKAAYKITWIFLIMLFPIFGGILYIVFFYASNPRKLKRLIKRNTRESRSAFYLGGDSLPDLDKAYPEFKPQAHYLQEYAGFPVYANTKALYFDSGEGFYKRALEELGKAKRYIFLEFFILKEGAMSSCRSDP

SEQ ID NO: 54747 - DNA, 366 bp, Unknown
  Obtained from environmental sample
  misc_feature (1)..(366): n is a, c, g, or t
atgataggctttgtcatcgccgcttttattgccggtataggcggttgtgtctacgcgctggttgtcggctttgtcaagccggatatggcgcagttcctcagatccattgacttccttatttatgtcgtgctgggcggcatgggttccatgaccggctcgattctcgctgcttatgtccttacctatttgcaggaatttctgcgtttcctgcaagactaccgcctcctgatatatccggtaatactgatatttgtcatgctgttccgtccaaagggccttatgggaatgaaagaattttctgtggtaggttttattgataaggtaaacggcaaactcttccggcgggcaaagaaaggggaagcatag

SEQ ID NO: 54748 - protein, 121 aa, Unknown
  Obtained from environmental sample
  SIGNAL (1)...(19)
  misc_feature (1)..(121): Xaa is any amino acid
MIGFVIAAFIAGIGGCVYALVVGFVKPDMAQFLRSIDFLIYVVLGGMGSMTGSILAAYVLTYLQEFLRFLQDYRLLIYPVILIFVMLFRPKGLMGMKEFSVVGFIDKVNGKLFRRAKKGEA

SEQ ID NO: 54749 - DNA, 807 bp, Unknown
  Obtained from environmental sample
  misc_feature (1)..(807): n is a, c, g, or t
atgagccatagccagggcgatttacgcttaagggtacaggatctctctattgattttggggggctaaaagccgtcagcgatttctcatgcgagctgtaccatggggaactcgtcgggcttattggccctaacggggcgggcaagacaacggtgttcaatatgctttcgggaatatatgccccgacaggaggagagattgaattccgcgaccgcgggggcaacacatgcctggtgaaaaacctggatcccgccaggatgaaccggattggtcttgccaggacctttcagaatatacgcctcttttccaacctttctgtcgaagacaatatccgcatagcgttacattccggcaggaccagcggcccgctggacgcgctgttccgcctgaagcgtttcaggattgacgaggagcggatgcgctctcaggcggaagaactgctttcgctcgttaaaatagaaaaaaagaaggatgaactggcgcgtaatcttccatatggcgagcagcgcagactggagatagccagagctttggcttcaaacccctgcctccttttgctggatgaacctgccgctgggatgaatccccaggaaaccgaggatctgatgaaaataatcagatttatcaggaatgaatttcacctgacgattcttttaatcgaacacgatatgcggctggtaatggggatttgcgagcggcttattgtgctggattacgggcggacaatcgccgctggctctccggaagagattcgacaagatccggcggtgataaaagcttaccttgggacggatgctgccgatggctaa

SEQ ID NO: 54750 - protein, 268 aa, Unknown
  Obtained from environmental sample
  DOMAIN (35)...(239): ABC transporter
  misc_feature (1)..(268): Xaa is any amino acid
MSHSQGDLRLRVQDLSIDFGGLKAVSDFSCELYHGELVGLIGPNGAGKTTVFNMLSGIYAPTGGEIEFRDRGGNTCLVKNLDPARMNRIGLARTFQNIRLFSNLSVEDNIRIALHSGRTSGPLDALFRLKRFRIDEERMRSQAEELLSLVKIEKKKDELARNLPYGEQRRLEIARALASNPCLLLLDEPAAGMNPQETEDLMKIIRFIRNEFHLTILLIEHDMRLVMGICERLIVLDYGRTIAAGSPEEIRQDPAVIKAYLGTDAADG

SEQ ID NO: 54751 - DNA, 726 bp, Unknown
  Obtained from environmental sample
  misc_feature (1)..(726): n is a, c, g, or t
ttgggacggatgctgccgatggctaaccttaaaaatataatcgaacatgaaacgaagtttcagcttgaaacttcgtttcatcatgagactctgcttaaagttgaaaacctcgttgtcaattatggggccatacgcgccctgaagggcgtctcttttgaagtagccaaaggggagataatcaccctgattggcgcaaacggcgcggggaaaagcactacgcttaacgcgatctccaacgtaataaagaaagcttccggctcggtggtctttgacggcagggacataagctccgttccgcctgacagcattgtcgcctccggcctgatacaggttccggaaggccgtcgtattttcgcgaacttgagcgttcgggacaatctggaaatgggcgcgtattcgcggcgctctgttactccggcagaaaaacaggccatacgcaaagacatggaaagggtgtttgaaattttcccccggcttaaagaacgcatgcgccagataggggggacgctctcaggcggcgaacagcagatgctcgcgatgggccgctcgcttatggccagcccccgtctcctgcttcttgacgaaccatncatgggccttgcccccatccttgttgacgaaattttctcggtcatcaagggaattacgaaacagggacaacagtgttgctcgttggaacaaacgcttacaaagcccttgatctcgggtcgggggcgtatatcctga

SEQ ID NO: 54752 - protein, 241 aa, Unknown
  Obtained from environmental sample
  DOMAIN (57)...(236): ABC transporter
  misc_feature (1)..(241): Xaa is any amino acid
MGRMLPMANLKNIIEHETKFQLETSFHHETLLKVENLVVNYGAIRALKGVSFEVAKGEIITLIGANGAGKSTTLNAISNVIKKASGSVVFDGRDISSVPPDSIVASGLIQVPEGRRIFANLSVRDNLEMGAYSRRSVTPAEKQAIRKDMERVFEIFPRLKERMRQIGGTLSGGEQQMLAMGRSLMASPRLLLLDEPXMGLAPILVDEIFSVIKGITKQGQQCCSLEQTLTKPLISGRGRIS

SEQ ID NO: 54753 - DNA, 519 bp, Unknown
  Obtained from environmental sample
  misc_feature (1)..(519): n is a, c, g, or t
ttgatgaccgagaaaatttcgtcaacaaggatgggggcaaggcccatgnatggttcgtcaagaagcaggagacgggggctggccataagcgagcggcccatcgcgagcatctgctgttcgccgcctgagagcgtcccccctatctggcgcatgcgttctttaagccgggggaaaatttcaaacaccctttccatgtctttgcgtatggcctgtttttctgccggagtaacagagcgccgcgaatacgcgcccatttccagattgtcccgaacgctcaagttcgcgaaaatacgacggccttccggaacctgtatcaggccggaggcgacaatgctgtcaggcggaacggagcttatgtccctgccgtcaaagaccaccgagccggaagctttctttattacgttggagatcgcgttaagcgtagtgcttttccccgcgccgtttgcgccaatcagggtgattatctcccctttggctacttcaaaagagacgcccttcagggcgcgtatggccccataa

SEQ ID NO: 54754 - protein, 172 aa, Unknown
  Obtained from environmental sample
  DOMAIN (18)...(56): Protein of unknown function (DUF1602)
  misc_feature (1)..(172): Xaa is any amino acid
MMTEKISSTRMGARPMXGSSRSRRRGLAISERPIASICCSPPESVPPIWRMRSLSRGKISNTLSMSLRMACFSAGVTERREYAPISRLSRTLKFAKIRRPSGTCIRPEATMLSGGTELMSLPSKTTEPEAFFITLEIALSVVLFPAPFAPIRVIISPLATSKETPFRARMAP

SEQ ID NO: 54755 - DNA, 645 bp, Unknown
  Obtained from environmental sample
  misc_feature (1)..(645): n is a, c, g, or t
atgcaagtttccaaaatcatgaccaggaatccggtttttatccatccagagctatcgttgaccgatgcccgttctctcatggacaaggagagaatcggccatctgcctgtactcaacaaaaacaacgagcttgcgggccttatcaccagggcggatctggtaaaggccggcccatcgtccgcgaccagccttgatatgtacgagatcagctaccttctttcaaaactcaaggttgaaaaggtgatggaaaaaaatgtgatcatcgtccaggaaaacgaagttgtggaagaggcggcgaggatcatggcggatcaggggattggctgcctgcccgtactgaacggctcccttttaaccggcattattaccgacactgatatttttcactttttcattaacgcttacggggcgcgccacaagggcatacggataacgattaattttaaggaaaaacgcggtcagttcgcggcatttgccggtgcggtagcgggaaagggcggcaatatcgtcgccgttgttacttccgagggcgatgatgtcgcccaccgccgcgcaaccatcaaaattaccgacatcagccgcgccgctgtagaagaaattgccgctgctttggacggcgcggaaattgaggacattcgggagtga

SEQ ID NO: 54756 - protein, 214 aa, Unknown
  Obtained from environmental sample
  DOMAIN (5)...(132): CBS domain pair
  misc_feature (1)..(214): Xaa is any amino acid
MQVSKIMTRNPVFIHPELSLTDARSLMDKERIGHLPVLNKNNELAGLITRADLVKAGPSSATSLDMYEISYLLSKLKVEKVMEKNVIIVQENEVVEEAARIMADQGIGCLPVLNGSLLTGIITDTDIFHFFINAYGARHKGIRITINFKEKRGQFAAFAGAVAGKGGNIVAVVTSEGDDVAHRRATIKITDISRAAVEEIAAALDGAEIEDIRE

SEQ ID NO: 54757 - DNA, 495 bp, Unknown
  Obtained from environmental sample
  misc_feature (1)..(495): n is a, c, g, or t
ttggcgaatcttatccgtttttttgccgccgctcctgtaatatcctcgggtattgttttgggattgggctggattattttatatggaagaaatttctcccgctctccgcttgcgctggtaatacttcacggagtcagcgcaatgccattcgcttttaattttatttccgaaggtttccgctctcttcccgccaacacactgaatgcggcggcggtcttcggcgcggatcctttgcgcgggcttttaaccacggcattgccactttcgcttaagcgcgtgcgttccgcatggggattcgccgcggcgctcagtcttggagaacttaatgcggtgataatgctcggcttggaagggtgggaaactttgcccctgtacatttaccgcgccgtggcggcttaccgttacgggacagcctgcgccgcgggaacactattgatactttgctgtgccgcctgttttctgttttcagagacagggagggaaaaatatgcttga

SEQ ID NO: 54758 - protein, 164 aa, Unknown
  Obtained from environmental sample
  SIGNAL (1)...(21)
  misc_feature (1)..(164): Xaa is any amino acid
MANLIRFFAAAPVISSGIVLGLGWIILYGRNFSRSPLALVILHGVSAMPFAFNFISEGFRSLPANTLNAAAVFGADPLRGLLTTALPLSLKRVRSAWGFAAALSLGELNAVIMLGLEGWETLPLYIYRAVAAYRYGTACAAGTLLILCCAACFLFSETGREKYA

SEQ ID NO: 54759 - DNA, 741 bp, Unknown
  Obtained from environmental sample
  misc_feature (1)..(741): n is a, c, g, or t
gtgccgcctgttttctgttttcagagacagggagggaaaaatatgcttgaagttaaagcgttaaaaaaatcttacggagacttttccgtatcagttgatttatccgtcggcgcaggagaaactcttgcgttggtcggaccttccggctgcggcaaaactacgacactaaaccttatcgccggtcttatcgagccggaatccgggagtacgctaattgatggcaaagacattacacgcctgcccgcatggaaacgcaatatttccgtagtttttcaagacttggctctattcccccaccttgacgttggcggaaacatcgcttacggactttttatccgcggagttccaaaaaaagaccgccgccttatcgttgaacaaaccctggaaattgtccgccttcaaggctactcagcgcggcgcattgataccctctccggcggagaacgccaacgtgtcgccattgcgcgcgcccttgcgtccagtccgcgactgcttttattggacgagcctttttcaagtttggacgcgcccctgcgaaaagaccttcgccgtgattttcttgaaatccgctcccactcaaaagccccctgtattttcatcacccacgaccgcgaagaagccctaatgctgggagaccaagtcgcacttatgaccgatggacatatcgtagaaaccgccccgggaaaagaattgctctccgcaccaaaaaccgattttgcaagagagttttttaagaattaa

SEQ ID NO: 54760 - protein, 246 aa, Unknown
  Obtained from environmental sample
  DOMAIN (39)...(220): ABC transporter
  misc_feature (1)..(246): Xaa is any amino acid
MPPVFCFQRQGGKNMLEVKALKKSYGDFSVSVDLSVGAGETLALVGPSGCGKTTTLNLIAGLIEPESGSTLIDGKDITRLPAWKRNISVVFQDLALFPHLDVGGNIAYGLFIRGVPKKDRRLIVEQTLEIVRLQGYSARRIDTLSGGERQRVAIARALASSPRLLLLDEPFSSLDAPLRKDLRRDFLEIRSHSKAPCIFITHDREEALMLGDQVALMTDGHIVETAPGKELLSAPKTDFAREFFKN

SEQ ID NO: 54761 - DNA, 594 bp, Unknown
  Obtained from environmental sample
  misc_feature (1)..(594): n is a, c, g, or t
atgtatagtggtaaatgttctattatcagctttatattatatgttggtataatggcagtaattatcgaacttaaaaatgtaattttctcggctcaggatgggaaaatagtggatgatgtttcagttgattttaaaacgtctaaaaccaccgctattatcgggccgtccggagggggtaagagcaccgtgttaaagcttaccgcggggttgttagtcccggatcagggagaggttttgtactatgataaaaacatcgcgtatatgagccgggcggaaaatctggaattccgccgcgagggagcctttgtttttcaggattccgcgttatgggccaaccagaacttaaatcaaatattggaacttccgcttaaaatacattatcctgaaatggacgccaaacagcgcgcgcagcgtataaaatccgtaaccgagcttgtgggttacaggaagaacctgaatataaggccgtcggcgctttccatgggcgagcaaaaactggtcgccttcgcgcgagccatgctgtgcaacccatccattctttttttggatgagtggacggaatcgctgacgagactcggcacagcctcgcgataa

SEQ ID NO: 54762 - protein, 197 aa, Unknown
  Obtained from environmental sample
  DOMAIN (47)...(197): ABC transporter
  misc_feature (1)..(197): Xaa is any amino acid
MYSGKCSIISFILYVGIMAVIIELKNVIFSAQDGKIVDDVSVDFKTSKTTAIIGPSGGGKSTVLKLTAGLLVPDQGEVLYYDKNIAYMSRAENLEFRREGAFVFQDSALWANQNLNQILELPLKIHYPEMDAKQRAQRIKSVTELVGYRKNLNIRPSALSMGEQKLVAFARAMLCNPSILFLDEWTESLTRLGTASR

SEQ ID NO: 54763 - DNA, 795 bp, Unknown
  Obtained from environmental sample
  misc_feature (1)..(795): n is a, c, g, or t
ttgaaaaaaatagtattattatataatatgtggagtcctgcgtcagatttagctcatgtattctataatctaggctttttcgctaaaactcttaaaggagtaggcgggtttatacgcaattataaggcttcttttaagattcttgttatgcagattctgtttaccttcgtacacgccatgggaatctcatccattcttgcccttgctataggggcggcagtcaatatcgttggatcttcaatgctgacccagttttcgcaggaacagttgatttattatatcctgataaccattatcgtaagggaattagggcccttgttaacggcttttatcgttatagcccgctcggcgacggctatcgcgacggaaattgccggaatggttatttcccatgaggttgaagcatatatttcggtcggcgttgaccctatagagcatctggcggttccccgtttcctgggtgttacaatttcgctcgttttgcttaatatttatttctccgtgttggggctggccggctcttttttggtagcgcagcttttcggttccatgccggtaggccattatttttcaaaccttttgcaaagcttgaatttacgcgatattttactgaccatgataaaaagcattatgtttggggcgattatttccacagtcgctgtaattcagggtttttccgttcaaagggcaagtaccgaagtcccggttgccggccttaacgcggtcagcggtgcatttgcgctatgtatagtggtaaatgttctattatcagctttatattatatgttggtataa

SEQ ID NO: 54764 - protein, 264 aa, Unknown
  Obtained from environmental sample
  DOMAIN (17)...(261): Domain of unknown function DUF140
  misc_feature (1)..(264): Xaa is any amino acid
MKKIVLLYNMWSPASDLAHVFYNLGFFAKTLKGVGGFIRNYKASFKILVMQILFTFVHAMGISSILALAIGAAVNIVGSSMLTQFSQEQLIYYILITIIVRELGPLLTAFIVIARSATAIATEIAGMVISHEVEAYISVGVDPIEHLAVPRFLGVTISLVLLNIYFSVLGLAGSFLVAQLFGSMPVGHYFSNLLQSLNLRDILLTMIKSIMFGAIISTVAVIQGFSVQRASTEVPVAGLNAVSGAFALCIVVNVLLSALYYMLV

SEQ ID NO: 54765 - DNA, 690 bp, Unknown
  Obtained from environmental sample
  misc_feature (1)..(690): n is a, c, g, or t
ttgtatacggtagtaaaaatcgaaacggggactgttcccgcatatgttttccacggccatcagttgtcgaatatttattcgaattttaataaattaatcggaatctgcatccgttacattttaaaaccgtttgggataaaaaatattatagacgcgcgcagtccgtacaaacgttttctcatagaaagcaaggcttacgcgttttctataaacaaccattgcctttccattatcggccatacccacaggccgctttttgaatcattggggcgcttcgattacattaaatttgaaatcgaacgtctctgccgcgattatccttcctgtaaaaacgaggataagctccgcatagaaaacgaagttaccgctctaagaaaagaactaagtaagcttaagcgcaaagaacgtcaggatgttctgcgccagagcctttacggggacgagcttcccgttccctgcctttttaattccggctgtaccctggggaaaaagggaataaacgcgattgaaataacacacgaggatattgcccttgtttactggtttatcgaggggaaaagcaaaaaatttattaaacgcggcggttatgaaataaacgagcttgcaaacaccccataccgccgcgccgttctaaaccagaataaactggattacattctcgcaaagataaaacttttagggaacaagtaa

SEQ ID NO: 54766 - protein, 229 aa, Unknown
  Obtained from environmental sample
  misc_feature (1)..(229): Xaa is any amino acid
MYTVVKIETGTVPAYVFHGHQLSNIYSNFNKLIGICIRYILKPFGIKNIIDARSPYKRFLIESKAYAFSINNHCLSIIGHTHRPLFESLGRFDYIKFEIERLCRDYPSCKNEDKLRIENEVTALRKELSKLKRKERQDVLRQSLYGDELPVPCLFNSGCTLGKKGINAIEITHEDIALVYWFIEGKSKKFIKRGGYEINELANTPYRRAVLNQNKLDYILAKIKLLGNK

SEQ ID NO: 54767 - DNA, 1377 bp, Unknown
  Obtained from environmental sample
  misc_feature (1)..(1377): n is a, c, g, or t
atggcgggaaaacaaacatttaacatggaagatgaatttgcggggctggattgtaattcaagccgccttgaaaagcggtttataaggacaatggaaacactgtccaaacagccggataaatcaatatggttctgcagcgaaaaccgggcggaggctaaagccatataccggatgcttggcaacgagaatctggatcgcgaaaaaatactgcgggcgcatcgggatgctaccataaggcgcatgatacagtcaggggaaaccattctggcagtacaagataccacaagcctgaactacaacacccatgagaaaatggaagggatagggtatatcagcgaaaagacgctgggagtaaatatccacagctgtcttgcgcttacaaccgaaggattagtacttggggtattggaacaaacatcgtacaaccgcacgcaggcaaaggatggcagccgcagccacgacagtaaaaagacacggacattgagagagaaagaaagttaccgatgggttcaaaccctttgggaaagtaccagcggcctgcctgatggaatacatgttgttactgtatgcgacagggaaggggacatgtatgcgctgtttgacgaagcggatcggtggggccaggcatttctcatacggatagcgcagaaccgaataacagcagaaaaccataaaatattggataaaattcgggaaaaacaatgcatgggcaaggtaaaagcaaatattccccgcgattcccgcaaaggccttgcggaacgcgaggcggtattgcagatacggtatggcggctttgaaataaaacgcccgcagatcctcaataagaataaaaagctcagagacacacaagaagtaaacataatatatgtcaaggaagaacagcaggacaaagccatagagcctttggaatggtttttgatgacaaatgaaccggttaagactgtcgaagatgcatacgaaaaagccgtatggtatatgcagcggtggaagatagagcagtttcactatgtgctgaaatccggctgtacggttgagaagctgcaagaacggagcatggaaaaaacaacgatgctggtcctgatgtattccataattgcttcggcaattatgaacataacttatgttgcacgaatacacccgctgcttccctgtacgattttctttgaggaagacgaatggaaggtactgtaccgcaccgcaaacaagacaaaaaaaatacctaaaaagccgtatacgattgctgaagcagtaacctacttaagctggctgggagggcccaaacgggctcccagcgacggccctcctggcgtcaaaacaatttggattgggcttgataaatttaacaccttgcttgcatacaaggaatggatgtcataa

SEQ ID NO: 54768 - protein, 458 aa, Unknown
  Obtained from environmental sample
  misc_feature (1)..(458): Xaa is any amino acid
MAGKQTFNMEDEFAGLDCNSSRLEKRFIRTMETLSKQPDKSIWFCSENRAEAKAIYRMLGNENLDREKILRAHRDATIRRMIQSGETILAVQDTTSLNYNTHEKMEGIGYISEKTLGVNIHSCLALTTEGLVLGVLEQTSYNRTQAKDGSRSHDSKKTRTLREKESYRWVQTLWESTSGLPDGIHVVTVCDREGDMYALFDEADRWGQAFLIRIAQNRITAENHKILDKIREKQCMGKVKANIPRDSRKGLAEREAVLQIRYGGFEIKRPQILNKNKKLRDTQEVNIIYVKEEQQDKAIEPLEWFLMTNEPVKTVEDAYEKAVWYMQRWKIEQFHYVLKSGCTVEKLQERSMEKTTMLVLMYSIIASAIMNITYVARIHPLLPCTIFFEEDEWKVLYRTANKTKKIPKKPYTIAEAVTYLSWLGGPKRAPSDGPPGVKTIWIGLDKFNTLLAYKEWMS

SEQ ID NO: 54769 - DNA, 570 bp, Unknown
  Obtained from environmental sample
  misc_feature (1)..(570): n is a, c, g, or t
atgcagccaaccaatttattgagtatgaacgctgcgatagaggcggctcacgcaggggaagcgggaaaaggttttgcggtagtcgccgatgaaattcgcaaactggctgaaagttccagcgagcagtccaaaacgataggtatggtactgaaaaaaatagcggaatcaatcaaaaatatcacaagctccactgagaacgtgctcaaaaaattcgaggcgattgacacaagcgtaaagacggtggcggatcaggaggagagtatccgaatatcaatggaggagcagacgaagggaagcaagcaagtactcgaaggagtgagcgaagtgaacgaaataacacggcaggtcaaaagcgcttccaatgaaatgcttgaaggcgcaaaagaagtaatacaagaaagcggtaatcttgaaaaagcgactcaggaaataacaggcggcatgaacgagatggccacaggtgcggagcatataaacatagcggtaaaccacgtaaatggagtaagcggcaaaaaccgcgaaggtattgataatctgatacaggaagtttcgcgctttaaggtagagtaa

SEQ ID NO: 54770 - protein, 189 aa, Unknown
  Obtained from environmental sample
  SIGNAL (1)...(18)
  DOMAIN (4)...(145): Methyl-accepting chemotaxis protein (MCP) signaling domain
  misc_feature (1)..(189): Xaa is any amino acid
MQPTNLLSMNAAIEAAHAGEAGKGFAVVADEIRKLAESSSEQSKTIGMVLKKIAESIKNITSSTENVLKKFEAIDTSVKTVADQEESIRISMEEQTKGSKQVLEGVSEVNEITRQVKSASNEMLEGAKEVIQESGNLEKATQEITGGMNEMATGAEHINIAVNHVNGVSGKNREGIDNLIQEVSRFKVE

SEQ ID NO: 54771 - DNA, 810 bp, Unknown
  Obtained from environmental sample
  misc_feature (1)..(810): n is a, c, g, or t
ttgaaaaatccgcctgctattttaggtaaaatcgccgcaagcacgctggttcgggtagaaaaagcgaaacaaaatctttctattgaacaggcgcaagaacgggcgattaagtcagcctcagcggaacaaatcgataaaaagcgtttgccttttgagaatgcgcttgccgctcccggactttcatttatctgcgaggtaaaaaaagcgtcgccttcaaagggtgtaatagcggaaaattttccttggctggaaatcgcgaaggattacgaagaaggcggagcatcggcgatttctgttttaacagagcctgagttttttttgggaagcgataattatttacgcaaaatttcggacgctgtgaaaatcccgacgctaagaaaagattttataatcgacaaataccaaatttacgaagcaaaattattgggagcaagagcgatacttttaatctgcgccctgctggaacaagaaacattagccgactttatttccgccgcaagagcgttgaatctggactgtcttgtggaaattcacagcgaggaagaagcgcaagaggctctttccgcgggagcgcatataatcggtattaacaaccgcgaccttaccacgtttaatgttgatacaggactaacatcccgtttaagaaatcaacttccctcaggaatactgactgtcgcggagagcgggataaaaactgcggacgatatccgcgtcgtaaaagaaaccggagtggacgcggttttaatcggcgaaagtttgatgcgcgccgcagatagaaaggcttttttaaaagaactgttatcggcttaa

SEQ ID NO: 54772 - protein, 269 aa, Unknown
  Obtained from environmental sample
  DOMAIN (7)...(266): Indole-3-glycerol phosphate synthase
  misc_feature (1)..(269): Xaa is any amino acid
MKNPPAILGKIAASTLVRVEKAKQNLSIEQAQERAIKSASAEQIDKKRLPFENALAAPGLSFICEVKKASPSKGVIAENFPWLEIAKDYEEGGASAISVLTEPEFFLGSDNYLRKISDAVKIPTLRKDFIIDKYQIYEAKLLGARAILLICALLEQETLADFISAARALNLDCLVEIHSEEEAQEALSAGAHIIGINNRDLTTFNVDTGLTSRLRNQLPSGILTVAESGIKTADDIRVVKETGVDAVLIGESLMRAADRKAFLKELLSA

SEQ ID NO: 54773 - DNA, 825 bp, Unknown
  Obtained from environmental sample
  misc_feature (1)..(825): n is a, c, g, or t
ttgcggtatagaataaatatgataaaagaagcaattataatggccgctaaaagagaggatctttcttatgaatgcgccgaaaccgttatgaatgaaattatggaagggaaggccagcgaaatacagatggcggcttaccttgcggcaatgtccgtgaaaggtgagactattgatgaaattaccgcgtcagcagcgggaatgcgcaaacactgcgtcaggattttgcatgacatggatgtactggaaattgtcggtaccggtggggatcattccaattccttcaatatatccaccacttccgcgctggttatttccgcagccgggtttccagtcgcaaaacacggaaaccgcgcggcgacaagcaaaacgggagcggcggatgttcttgaagccctcggggttgatataacaatcccacccgaacaaagtttgaatcttttaaaaacgattaatctttgttttctctatgcgcagaattatcatatttcaatgaagtatgtcggtcccgtaagacgtgagcttggtattcgtacgatttttaatatactcggtcctttggtaaatccggcaggcgcgaacatggaattgttaggcgtgtatgagcatgatcttgttgaaccgatggcgaaagttttgtgcaaccttggagtaaaaagaggcatggttgtttttggccaggatgggttagacgaaatctccctcagcgctcccactacagtctgcgaattacgcgacgggtttattaaaagttatgagattgaccggaaacaatttggatttgaacgcggtaaaaaggaagagttgttgggcgggaacgccgcctga

SEQ ID NO: 54774 - protein, 274 aa, Unknown
  Obtained from environmental sample
  DOMAIN (7)...(72): Glycosyl transferase family, helical bundle domain
  misc_feature (1)..(274): Xaa is any amino acid
MRYRINMIKEAIIMAAKREDLSYECAETVMNEIMEGKASEIQMAAYLAAMSVKGETIDEITASAAGMRKHCVRILHDMDVLEIVGTGGDHSNSFNISTTSALVISAAGFPVAKHGNRAATSKTGAADVLEALGVDITIPPEQSLNLLKTINLCFLYAQNYHISMKYVGPVRRELGIRTIFNILGPLVNPAGANMELLGVYEHDLVEPMAKVLCNLGVKRGMVVFGQDGLDEISLSAPTTVCELRDGFIKSYEIDRKQFGFERGKKEELLGGNAA

SEQ ID NO: 54775 - DNA, 657 bp, Unknown
  Obtained from environmental sample
  misc_feature (1)..(657): n is a, c, g, or t
atgaacgagcctaataatgagattgatgataaagaagcagaagcaaattataccgaagcgctgggaatcaggcggaaacttgcagaggccaatccagacgcatatttgccgggtatagctttgacgctgaataatctggctgatctgcaggacaatacaaagcattatacggaagcagaatcaaattataccgaggcgctgggaatttatcggaaactggcggaagccaatcctgacgagtatttgccagatgttgcgactacgctgaacaagctggcttttatgcaggacgaaataaagcggtatgctgaagccgaggcaaattataccgaagcgatgggaatcaggcggaaacttgcagaggccaatccagacgcatatttgccgggtatagctttgacgctgaataatctggcttttctgcagaaagacacaaagcgctatacggaagctgaagcaagtcatacctcagcgttggaaatcaggcggaaacttgcagcagctaaccccgatgcttatttaccggatttagtaaatacgctggaaaacctaatcgaagtaaaagaaaaactgtcaaaaaccggtgaagccgaagaattgaaaaaggaacttgcggaaataaagaacaggcaggaaaataaggcggacggggcatga

SEQ ID NO: 54776 - protein, 218 aa, Unknown
  Obtained from environmental sample
  misc_feature (1)..(218): Xaa is any amino acid
MNEPNNEIDDKEAEANYTEALGIRRKLAEANPDAYLPGIALTLNNLADLQDNTKHYTEAESNYTEALGIYRKLAEANPDEYLPDVATTLNKLAFMQDEIKRYAEAEANYTEAMGIRRKLAEANPDAYLPGIALTLNNLAFLQKDTKRYTEAEASHTSALEIRRKLAAANPDAYLPDLVNTLENLIEVKEKLSKTGEAEELKKELAEIKNRQENKADGA

SEQ ID NO: 54777 - DNA, 732 bp, Unknown
  Obtained from environmental sample
  misc_feature (1)..(732): n is a, c, g, or t
ttgnnnnnnggattgatggccgaggacacctgggagcgcttcgcagaagtactaaagtatgtacctgaggcatcatggacatcacagatgtgcctcacggcagtgcaacagaatggtgaggcgcttgagtatgtgccgaaatcattgcggacaccggagatttgccttgcggcagtgcaacagaatggcagggcgcttgagcatgtaccgaaatcattgcggacatcagagttttatttttcaactgtgcaacagaacggcagggcgcttgagtatataccggcggaattgcggacgccggagatttgccttgcggcagtacaacagaacggcagagcgcttgagcatgtgcctgaggcattgtggacatcgaagatttgtcatgcggcggtacagcagaacggtgaagctcttgagtatgtaatagagaccttgtggcggtgcaagaaatttgtaaggcgctttatctttattataagtctgaaacttgggagtatactgtttacggcagtacaacagaacggtgatgcgcttaagtatgtgcctgatgcgttccgaacgccggaactgtgcctcgcggcggtgcaacagaacggcagtgcacttgagtatgtgcctgaggcgttgcgaacgccggaactgtgcattgctgcggtacaacaggatatagaagcgcttaattatgtccccgaaactgtaaaaacacaagtgaaaaaagcaggtgaaatatga

SEQ ID NO: 54778 - protein, 243 aa, Unknown
  Obtained from environmental sample
  misc_feature (1)..(243): Xaa is any amino acid
MXXGLMAEDTWERFAEVLKYVPEASWTSQMCLTAVQQNGEALEYVPKSLRTPEICLAAVQQNGRALEHVPKSLRTSEFYFSTVQQNGRALEYIPAELRTPEICLAAVQQNGRALEHVPEALWTSKICHAAVQQNGEALEYVIETLWRCKKFVRRFIFIISLKLGSILFTAVQQNGDALKYVPDAFRTPELCLAAVQQNGSALEYVPEALRTPELCIAAVQQDIEALNYVPETVKTQVKKAGEI

SEQ ID NO: 54779 - DNA, 873 bp, Unknown
  Obtained from environmental sample
  misc_feature (1)..(873): n is a, c, g, or t
ttggaactttttgaaaaaagctccattgcaaaaaccgaattggaaaccgcagaatatagatatataaatgcgcagaacagcttgataaacgcaaaaagcaatttggagcaagcagaacttgacttgaacaactgcacaataaaaagccccatcgacggcatagttttgagcagagcagtagaagcaggccaaaccgtggcagcatcgctttccgcgccaaccctattcacactcgctagagatttaaccttaatggaggtcaaagccgatgttgacgaggcagatattggaatggtgaagatggggcagaaagttgaattttccgttgatgcttttccaaatgacaaattcacaggcgaggtacaagaggttaggctttcgcccaatatttcttcaaatgttgtgacctataccgttataataaaagcaaacaatccagagcaaaaacttttgccaggtatgaccgcaaactgcaatataatagttgaagaagctttgcaagttttaaccattccgctccgtgccctgcaattcaaacccgatgaaaatacgcccggctatgtgccgcaacctggcggagaagctccttttggtggcggtcgtgaaggtcgtgacggcggcggcaagcgtatggggaatcaaaacagaaacagaatatgggtagtgggcactgacggttctttgagcatgaagcgggttaatcttggtctttcggatggggcaaaaacacaagtgctagagggcgtggatgctgctacttccattgttgttggtgtgcaaatagcaagtgaaaaaagcggtcaagcaacaagcagcccttttatgcctgggcgcaatacaaaaagcggtggcgcaatgaaaacaaggctttaa

SEQ ID NO: 54780 - protein, 290 aa, Unknown
  Obtained from environmental sample
  misc_feature (1)..(290): Xaa is any amino acid
MELFEKSSIAKTELETAEYRYINAQNSLINAKSNLEQAELDLNNCTIKSPIDGIVLSRAVEAGQTVAASLSAPTLFTLARDLTLMEVKADVDEADIGMVKMGQKVEFSVDAFPNDKFTGEVQEVRLSPNISSNVVTYTVIIKANNPEQKLLPGMTANCNIIVEEALQVLTIPLRALQFKPDENTPGYVPQPGGEAPFGGGREGRDGGGKRMGNQNRNRIWVVGTDGSLSMKRVNLGLSDGAKTQVLEGVDAATSIVVGVQIASEKSGQATSSPFMPGRNTKSGGAMKTRL

SEQ ID NO: 54781 - DNA, 360 bp, Unknown
  Obtained from environmental sample
  misc_feature (1)..(360): n is a, c, g, or t
ttgccaaatagcgatgcgtggacagaaattgaaaatgcaaaaccaaccgacaggcctcggctaatttccaaactttctgactcagaccctgttgctgcttctatgcttcgcttattcgttaaaatgctggctcgctatgcaggcgatatttccacgctccttttgccatttggaggtttgtatttggcaggtggggttgcgcaaaaagaacttcgctggcttgttggcgataacctgtttatgaaatattacgaaatggcttacaacaaaaacataaagccgcttttgatgcaaacacctgtttatctaataaaggattattccattagcttgtatggcgcggctaacgcgtgcgtttaa

SEQ ID NO: 54782 - protein, 119 aa, Unknown
  Obtained from environmental sample
  misc_feature (1)..(119): Xaa is any amino acid
MPNSDAWTEIENAKPTDRPRLISKLSDSDPVAASMLRLFVKMLARYAGDISTLLLPFGGLYLAGGVAQKELRWLVGDNLFMKYYEMAYNKNIKPLLMQTPVYLIKDYSISLYGAANACV

SEQ ID NO: 54783 - DNA, 876 bp, Unknown
  Obtained from environmental sample
  misc_feature (1)..(876): n is a, c, g, or t
atgcgtaagcggcacatggcgcttttattaacggttttattttttattttaacaggtttgctttccgccatgaactggccgtctgaaaccgcagcccttatacgcaatttcggctccaacgacaggggaaaacctgtgctcggcatggtttttgccggggataccggcgtgcttgccgccgaaaaaggcgatattatttttacacataacaaggatgacgcattttcccgtcttccgtccccgcttggcgcgtggacagcgcttgatcacggggacggtcttataaccatttacagccgttacgcggatgacgcggcggacgacaaagaacccataaagccggctaatcttcaaaaacaacagcctatcgccgtctgtggaatttccggctggtcttcgcaaaaaggattttattttcaggtttatgacaggcgcgagcgaagctggataaatcccgcgatgattataacgccgcaaaaagaaacgcgccctctgcaaattctttcggtggaattattgaatgcccaggggcttcccgtcaggtcaaacgtaataaaccagggacgttatactgtaatagttaattcaaatattttagcggcggcaaggggaactcttttcgcgccgcggcgcattgtctgttccataaacggcgcggaagccggctcccttagttttgaggctttttccgcaagggacggagtcttaatggttttccgtaacggccttgtccccgcaaaacaggtatattccagctttccggcttttgaggcggcgaatgtttttctaagccgcggacaggtaaatttggaaattattgtgcaggatataagcggtaattcccgcagttatgtaagccgaatgtttgtaaattga

SEQ ID NO: 54784 - protein, 291 aa, Unknown
  Obtained from environmental sample
  SIGNAL (1)...(23)
  DOMAIN (44)...(152): Peptidase family M23
  misc_feature (1)..(291): Xaa is any amino acid
MRKRHMALLLTVLFFILTGLLSAMNWPSETAALIRNFGSNDRGKPVLGMVFAGDTGVLAAEKGDIIFTHNKDDAFSRLPSPLGAWTALDHGDGLITIYSRYADDAADDKEPIKPANLQKQQPIAVCGISGWSSQKGFYFQVYDRRERSWINPAMIITPQKETRPLQILSVELLNAQGLPVRSNVINQGRYTVIVNSNILAAARGTLFAPRRIVCSINGAEAGSLSFEAFSARDGVLMVFRNGLVPAKQVYSSFPAFEAANVFLSRGQVNLEIIVQDISGNSRSYVSRMFVN

SEQ ID NO: 54785 - DNA, 897 bp, Unknown
  Obtained from environmental sample
  misc_feature (1)..(897): n is a, c, g, or t
ttgaaaacatggtcaatgccggtaagcggcgcaaagagcggagcgattccctgtaattgctgcggcggcttcattttcaaacccgctcttgagtgcgaaggctttaattttgtccgctgtactcaatgcggtcttgtgcagagaaatccccagcccgtaaaagaagaaataatagcgcgttacagtaaaacttacggtaatgattatttaagttacgaacttggaaatgaagccgcctttttgaaactccaacagcttgctttgcgggacgcgggttttgaaaagactgaaaagaacgcttttctgcgcgcaaaggacgctttcagcgccgccggaagcgccgctgaaagcgccccttccgttcttgacgtaggatgcgcgacaggggcgcttattgcctcccttcgcgatcgcgggtggcgcgtaacaggagtggaaatttctcccggcgcggaatatgcccgaaaagaacgaaagcttgacgtgcgaaatattccgcttgaagagatcaaatttccagatgaaagttttgacgtaatccttgcgtcacatcttgtagagcatttgaacgatccgcgctctttttttacggaattaaaccgtattcttaaaaaagacggatacatattcataactactcccaacatcagcggttttcaggcgcgtcttttcggcggccgctggcgttccgccatattcgatcatctttatcttttttcaaaatgtactttgattaaaatgtttaaagcctgcggctttaaggcgcaaggagtttacacatggggcggtcttgccgcaggcattgcgccggctttcgtaaaaaaaaccgccgactttctggcgaagcgtcttggctttggagacgtgatgatagtccgcgcggtaaggattaattga

SEQ ID NO: 54786 - protein, 298 aa, Unknown
  Obtained from environmental sample
  DOMAIN (122)...(209): Methyltransferase domain
  misc_feature (1)..(298): Xaa is any amino acid
MKTWSMPVSGAKSGAIPCNCCGGFIFKPALECEGFNFVRCTQCGLVQRNPQPVKEEIIARYSKTYGNDYLSYELGNEAAFLKLQQLALRDAGFEKTEKNAFLRAKDAFSAAGSAAESAPSVLDVGCATGALIASLRDRGWRVTGVEISPGAEYARKERKLDVRNIPLEEIKFPDESFDVILASHLVEHLNDPRSFFTELNRILKKDGYIFITTPNISGFQARLFGGRWRSAIFDHLYLFSKCTLIKMFKACGFKAQGVYTWGGLAAGIAPAFVKKTADFLAKRLGFGDVMIVRAVRIN

SEQ ID NO: 54787 - DNA, 405 bp, Unknown
  Obtained from environmental sample
  misc_feature (1)..(405): n is a, c, g, or t
atgacaaaactttccgaattcagcgtccgcacgggcggacaaacagactggatcaacattacaggcgaagtgcaaaaggtcgtcgccgcttccggcgtgcgcgaaggaatctgcgtcgtctttgttccgcacaccaccgcggcggttacgataaatgaaaacgccgaccccgacgtgccgcacgacgtaaatctttcgttaaacattatttcacccgaccgcagagaattccggcacagcgaaggcaactccgccgcccacaccaaatcaagcttggttggcccctcgctcaccgtgattgttaccggaggcagactgctgttgggcacatggcaggggatatggttcaacgaatacgacggtcctcgcacacggaaagttcaagttagagtgattggagagtaa

SEQ ID NO: 54788 - protein, 134 aa, Unknown
  Obtained from environmental sample
  DOMAIN (17)...(132): Uncharacterised protein family UPF0047
  misc_feature (1)..(134): Xaa is any amino acid
MTKLSEFSVRTGGQTDWINITGEVQKVVAASGVREGICVVFVPHTTAAVTINENADPDVPHDVNLSLNIISPDRREFRHSEGNSAAHTKSSLVGPSLTVIVTGGRLLLGTWQGIWFNEYDGPRTRKVQVRVIGE

SEQ ID NO: 54789 - DNA, 1932 bp, Unknown
  Obtained from environmental sample
  misc_feature (1)..(1932): n is a, c, g, or t
atggcacagcaccaatttcagaccgaagtcagccgtttgctgcaccttatcatccattccctctattccaaccgggaaatctttctgagggaactggtttccaatgccagcgacgcgcttgacaagctcaaatacctcaccgtagcggacgaggcgtataaatcgatcagttttgaccccagaatcgatatttctttcaataaagaagaaaaaaccctcaccatagccgacaacgggataggcatgaacgacaccgaccttatcgaatcgctggggactatagcccgttccggcaccaggtcgttcctggagaaactcgccgaagacgcgaaaagggattccaaccttatcggccagttcggggtgggcttttactcggcctttatggtagcggacaaaattgaagtgataagcagaaaagccgccgaggacaagacctggaaatggagcagcgacggcaaggacagtttcgagattgaaagcgcaagcgaagaggacaggggcatccagggcacgacggtaattttacacctgacagacgaggggcttgaatacgccaaccgctggtccgtcgaagacataatcaagcgttactccaaccacgtggccttcccgatttacctgacctacgaagaaaaagagtgggacgacaaaggagaggaaaaaggcagcaagaccaaaaccgaccgcattaactccggaactgccatctggcgcagggcaaaaaccgaactcaaagacgaagattacaacgagttttacaaacagcttggccacgacagcgaggagccattagactacattcatacaaaagctgagggaacgctagagtactcaacattatttttcattcccaaaaaagcgccgtttgatttgtacaatgtggactacaagcccggcgtaaaactctatgtaaagcgcgtctttattacagatgacgacaaggagcttatgcccacctatctgcgttttgtgcgcggcgtaattgattctgaggacttgcccttgaacgtaagccgtgaaatcctccagcagaacaaggttttactcaacataaaaaacgcttccgtaaaaaaacttctttccgaattcaagcagatggcggataacgccgtttccggctctgatgaggcgaaagcaaagtgggaaacatttgtttcccagttcaaccgtccgttaaaggaagggctttatcaggatttttccaaccgcgaattgatacaggagatagtccgctttaagagcagtacggttgacggatggacaagtttcgccgattatgtttcccgcatgaagagcgaccagaagaacatttattacattacaggcggcgatgaaaaaacactgcgcgcctctcccttgttggaagcttaccgcgcaaaagaaattgaagtccttatcatggacgatgacattgacgacatagtaattcccaccctgcacagttaccgcaaggatgtttccggtacggacggaaaaacagagagccaaagctgggatcttaaagcggtaaaccgcgcgggcgccgacgaggagttaggtgaaaagaaagacaaagccgccgaanaagaagcgaaacccgttatcgagaaaataaaaaaagcgctcggcgacagagtgaaagacgtaaaactttcccgacgcctgcacgattcgccatcatgcattgttgccgacgagaacgatccgtcaattcaaatggcgcagatgttaaaagcgatggggcagaccgccatgaccgatattaagccgattttggaagtaaacggcgatcacccgattgtcgcgggcctaaaaaacattgacgaagaagatcgaatcgccgatgtagcgggagtgcttttggatcaggcgcttcttgtggaaggggttaagttgagcgatcctgcggactttgtaaagcggcttaaccgtctgttggcgaagtcatga

SEQ ID NO: 54790 - protein, 643 aa, Unknown
  Obtained from environmental sample
  DOMAIN (24)...(181): Histidine kinase-, DNA gyrase B-, and HSP90-like ATPase
  misc_feature (1)..(643): Xaa is any amino acid
MAQHQFQTEVSRLLHLIIHSLYSNREIFLRELVSNASDALDKLKYLTVADEAYKSISFDPRIDISFNKEEKTLTIADNGIGMNDTDLIESLGTIARSGTRSFLEKLAEDAKRDSNLIGQFGVGFYSAFMVADKIEVISRKAAEDKTWKWSSDGKDSFEIESASEEDRGIQGTTVILHLTDEGLEYANRWSVEDIIKRYSNHVAFPIYLTYEEKEWDDKGEEKGSKTKTDRINSGTAIWRRAKTELKDEDYNEFYKQLGHDSEEPLDYIHTKAEGTLEYSTLFFIPKKAPFDLYNVDYKPGVKLYVKRVFITDDDKELMPTYLRFVRGVIDSEDLPLNVSREILQQNKVLLNIKNASVKKLLSEFKQMADNAVSGSDEAKAKWETFVSQFNRPLKEGLYQDFSNRELIQEIVRFKSSTVDGWTSFADYVSRMKSDQKNIYYITGGDEKTLRASPLLEAYRAKEIEVLIMDDDIDDIVIPTLHSYRKDVSGTDGKTESQSWDLKAVNRAGADEELGEKKDKAAEXEAKPVIEKIKKALGDRVKDVKLSRRLHDSPSCIVADENDPSIQMAQMLKAMGQTAMTDIKPILEVNGDHPIVAGLKNIDEEDRIADVAGVLLDQALLVEGVKLSDPADFVKRLNRLLAKS

SEQ ID NO: 54791 - DNA, 459 bp, Unknown
  Obtained from environmental sample
  misc_feature (1)..(459): n is a, c, g, or t
ttgggaacaagtttgtcgaccgcaagctgtacgacagaatcgtccgacaatgccgccgtttcgacaggttcgacaggttcagcgaccggcgtttcgacttcaacgggctctacggcctctgctgcttcagcggactctgcggtttcagcgggttctacagtttcagcaacttctgcggtttcagcgggctcaacaagctcagtgacctctgccgcttcgacaggctcagcaacctctgcgacctctgcaggctcagcaacctcaatgggctcagcggcttcagcgacctcngtgggttctgcaatttnntgtgacttctgcgggttcaatagcttcagcgggctctgcggatggttccggctgctccgctggatgttcaatagtggttacatcatcaatatctatatcgcttctgacctctatatcggattcaaccgcttcatgttctgtctcaattga

SEQ ID NO: 54792 - protein, 152 aa, Unknown
  Obtained from environmental sample
  misc_feature (1)..(152): Xaa is any amino acid
MGTSLSTASCTTESSDNAAVSTGSTGSATGVSTSTGSTASAASADSAVSAGSTVSATSAVSAGSTSSVTSAASTGSATSATSAGSATSMGSAASATSVGSAIXCDFCGFNSFSGLCGWFRLLRWMFNSGYIINIYIASDLYIGFNRFMFCLN

SEQ ID NO: 54793 - DNA, 1137 bp, Unknown
  Obtained from environmental sample
  misc_feature (1)..(1137): n is a, c, g, or t
ttgaacatccagcggagcagccggaaccatccgcagagcccgctgaagctattgaacccgcagaagtcacannaaattgcagaacccacngaggtcgctgaagccgctgagcccattgaggttgctgagcctgcagaggtcgcagaggttgctgagcctgtcgaagcggcagaggtcactgagcttgttgagcccgctgaaaccgcagaagttgctgaaactgtagaacccgctgaaaccgcagagtccgctgaagcagcagaggccgtagagcccgttgaagtcgaaacgccggtcgctgaacctgtcgaacctgtcgaaacggcggcattgtcggacgattctgtcgtacagcttgcggtcgacaaacttgttcccaatcccggccagccccgtaaaaattttaacgaaaccgaattgcaggaacttgcggattcaattaaaacttacggtattattcagcccgttatcgctgcggacgcgggagacggcacttacattataatagccggtgaacgcagaacacgcgctgcggttctggccggactggacacgatccctgtaataatccgcgactataccgaccaaaagcggctggaagtttcccttgtagaaaatatacagcgcagcgatcttaacccaattgaagaagccacagcctacaaaaaccttatggacttctccagcctgtcccagggggacctcgccgcgagagtcggcaaaaaccgttccacggtgacaaacgccctgcgtttattaaagctttccgccgaggtgcaaaagagccttgaaaccggcgatatcagctccggccacgcgcgggctctgctttcggtaacggacaagaaacaacggaacaaactgtttaacgaaattaccgcaaaggggctttccgtgcgcgaggctgagaaaaaagcctcggcgttgaattccacttccgaggcaggcggcgcctcgggcgaagaaaaagaaaaaacttcaaagcgcccccctgaaataatcgaaatggaagaaaaatttatagaaaaacttgggacaaaagttactattgacggagggctggagaagggccgcatccatattgaatattattcaatggaagacctggaccggctgtatgagattatcggcccctag

SEQ ID NO: 54794 - protein, 378 aa, Unknown
  Obtained from environmental sample
  DOMAIN (117)...(207): ParB-like nuclease domain
  misc_feature (1)..(378): Xaa is any amino acid
MNIQRSSRNHPQSPLKLLNPQKSXXIAEPTEVAEAAEPIEVAEPAEVAEVAEPVEAAEVTELVEPAETAEVAETVEPAETAESAEAAEAVEPVEVETPVAEPVEPVETAALSDDSVVQLAVDKLVPNPGQPRKNFNETELQELADSIKTYGIIQPVIAADAGDGTYIIIAGERRTRAAVLAGLDTIPVIIRDYTDQKRLEVSLVENIQRSDLNPIEEATAYKNLMDFSSLSQGDLAARVGKNRSTVTNALRLLKLSAEVQKSLETGDISSGHARALLSVTDKKQRNKLFNEITAKGLSVREAEKKASALNSTSEAGGASGEEKEKTSKRPPEIIEMEEKFIEKLGTKVTIDGGLEKGRIHIEYYSMEDLDRLYEIIGP

SEQ ID NO: 54795 - DNA, 843 bp, Unknown
  Obtained from environmental sample
  misc_feature (1)..(843): n is a, c, g, or t
atgcactatggtttttttgattcgcataaacgggaatatgtaattacccgtcccgatacgccggcgccctgggcgaattatctcggctctcccgagtatggcgcgatcatttccaacaatgccggcggttacagctttgtaaaaagcggcgcggcgggaaggattatccgttaccgatttaacgaacaggaccgccccggccgctacgtctacctgcgcgacgacgaaaccggcgattactggtcggcttcatggcggcccgtgggtaagccgcttgatcagtacaagtccgagtgccgccacggtactggttacacccggcttgaggcggattacagggacatccactcagaagcgctttattatgtgccgcaggactctgactacgaggtgtggaaagtcaaaattacgaataacggaagctacgcgcggaaaatttcctgttttggttttgtagaatttacctgcgagagtttttacgaacaggatcaggtgaaccttcaatatacccagtttattacccgcacttactttaagaacaattttatcctgcaaaccattaacgaaaactgcctgaacgccgttaacgaaagccgcgtagagacgcgtttcttcgccctcgccggagctaatgtcgcgagttactgcggcgaccgcgcgtcgttcctgggcaaataccgcgattacgggaatccaatatccgtggagaacggcaaactggacggcactctcaactacaacctgaacccctgcggcgcgttacaaacaacattggatctcgcgcccggagaaacaaaagaatttgttttccttttgggacaaaaacgcgaggcccannggtaa

SEQ ID NO: 54796 - protein, 280 aa, Unknown
  Obtained from environmental sample
  DOMAIN (194)...(280): Glycosyltransferase 36 associated family
  misc_feature (1)..(280): Xaa is any amino acid
MHYGFFDSHKREYVITRPDTPAPWANYLGSPEYGAIISNNAGGYSFVKSGAAGRIIRYRFNEQDRPGRYVYLRDDETGDYWSASWRPVGKPLDQYKSECRHGTGYTRLEADYRDIHSEALYYVPQDSDYEVWKVKITNNGSYARKISCFGFVEFTCESFYEQDQVNLQYTQFITRTYFKNNFILQTINENCLNAVNESRVETRFFALAGANVASYCGDRASFLGKYRDYGNPISVENGKLDGTLNYNLNPCGALQTTLDLAPGETKEFVFLLGQKREAXX

SEQ ID NO: 54797 - DNA, 873 bp, Unknown
  Obtained from environmental sample
  misc_feature (1)..(873): n is a, c, g, or t
atgttagattgtcaaacaggctgtttcgggttttgcgagatggggccaatcgtcaaagttttaccggatgaatcattctatgtattggtgaaacccgaggacgcgaaggagatcattgccgagcacatcgtcaagggtcgcgaggttaaacggctcctctataaagacgaaggtcatacaaaacacaccgactccgtagaggacatacagttctatcagaaacaattcagggttgtgctccgcaactgcggctttatcgatcctgaaagcatagacgagtacatagcccgcgagggctacaaggggcttgagaaagtcctgtttgattggaccccggagcagatcatcgccgaggtgaagacctccggcctgcgcgggcgcggcggcgcgggttttcctacctggcttaagtgggatcttgcgcggaaagcccagggcgacgttaaatttgttatatgtaacgccgacgaaggcgaccccggcgcgtatatggaccgttccaccgttgagggcgatccccactcggttatcgagggtatgatcaccgccggcaaggctataggcgccaaccagggttttgtgtacatccgcgccgagtatccccttgccattgaccggctgagaatcgccctgaaacaggcgcaggactacggcctgcttggaaaaaacattctgggatcgggctttgattttgacattgaaatccgccttggcgcgggggcctttgtctgcggcgaggaaaccgcgcttatcaagtccgtcgagggcaaccgcggaatgccggtgccgaaacccccattccccgcgaataaggactgtggggaaaaccgactatcatcaacaacgtggaaaccttcgcgaacattccggtga

SEQ ID NO: 54798 - protein, 290 aa, Unknown
  Obtained from environmental sample
  DOMAIN (98)...(279): Respiratory-chain NADH dehydrogenase 51 Kd subunit
  misc_feature (1)..(290): Xaa is any amino acid
MLDCQTGCFGFCEMGPIVKVLPDESFYVLVKPEDAKEIIAEHIVKGREVKRLLYKDEGHTKHTDSVEDIQFYQKQFRVVLRNCGFIDPESIDEYIAREGYKGLEKVLFDWTPEQIIAEVKTSGLRGRGGAGFPTWLKWDLARKAQGDVKFVICNADEGDPGAYMDRSTVEGDPHSVIEGMITAGKAIGANQGFVYIRAEYPLAIDRLRIALKQAQDYGLLGKNILGSGFDFDIEIRLGAGAFVCGEETALIKSVEGNRGMPVPKPPFPANKDCGENRLSSTTWKPSRTFR

SEQ ID NO: 54799 - DNA, 885 bp, Unknown
  Obtained from environmental sample
  misc_feature (1)..(885): n is a, c, g, or t
gtggaaaccttcgcgaacattccggtgattaccgccaagggcggggcatggcttgccaaacttggaaccgaaaaatccaagggaaccaaggttttcgcccttaccggaaaggtaaagaactccggccttgtggaagtgccgatgggaaccaccctgcgcgagatcatctttgaaatcggcgggggcatcaaaaacggaaagaaattcaagggcgtgcagacgggcgggccttcaggcggcatccttaccgagaagtccctcgatttgcccattgactttgacacgcttacagctaacggctccatgatgggctcgggcggcatgatcgtcatggacgaggacgactgcgtcgttgacgtggcgcgtttctatatggacttctgcgttgacgaaagctgcggcaaatgctctccctgcagaatcggaaccacgcagatactccgtcttttggacaaaatcgccaacggcaacggagaagaagcggatcttgacaagctcgaggagatcggcgtggctatgacaaaggcaagcctctgtatgcttggcggctcggcggcgaacccgacgctgtccacgatcaagaatttccgtgatgagtaccttgagcatatccatgacaaaaaatgcagggccggcaaatgcaaaaaactgctgcgcttcagcattaacacggacaagtgcattggctgcgggatgtgcgcgaagaaatgccccgcaaactgcattacggcgctggatccggcgaaatatccgggcaagaaaaagcctccttacgccatcgatcagagcgcctgcgttaaatgcggcgaatgtctgaagaatgcaaatttaacgcggtttcgcggggttaggaaaaaggagaaacagatgataaacttaaaataa

SEQ ID NO: 54800 - protein, 294 aa, Unknown
  Obtained from environmental sample
  DOMAIN (1)...(77): Respiratory-chain NADH dehydrogenase 51 Kd subunit
  misc_feature (1)..(294): Xaa is any amino acid
METFANIPVITAKGGAWLAKLGTEKSKGTKVFALTGKVKNSGLVEVPMGTTLREIIFEIGGGIKNGKKFKGVQTGGPSGGILTEKSLDLPIDFDTLTANGSMMGSGGMIVMDEDDCVVDVARFYMDFCVDESCGKCSPCRIGTTQILRLLDKIANGNGEEADLDKLEEIGVAMTKASLCMLGGSAANPTLSTIKNFRDEYLEHIHDKKCRAGKCKKLLRFSINTDKCIGCGMCAKKCPANCITALDPAKYPGKKKPPYAIDQSACVKCGECLKNANLTRFRGVRKKEKQMINLK

SEQ ID NO: 54801 - DNA, 1041 bp, Unknown
  Obtained from environmental sample
  misc_feature (1)..(1041): n is a, c, g, or t
atggccgaaatgccgcaggagcgctgcgccatggttctgttggacggggaaaatctatccgccgggcggctggaggccgtggcggcgggcgaatctgtttcgctggacgaggcggccctggccagggtcggggagaaccgcgcagtcatagacagcatcctgctcgaaaagagggtggtctatggcatcaacaccggattcggccagttcgccaccgtcgtggtgccagccaaccagctggcggagctgcagctcaaccttgtgcggagccacgccgcaggcgtgggcgagccgctgaccgtcgcgcagacgcgcgccctgatggcggcccgcataaactgcctgctaaaggcccactcgggcatccgcgtggagccgatccgcctgctggcggagtgcctgaaccgcagcgtggtccccgtaataccaagcatggggagcgtcggggcgtcaggcgacctggcccccctggcccacatggccctgctgctgataggcgagggcttggcctgggatggcacagggcgcgccccgggcggcggggcgctaaaaaaggctgggctggagccaatccagctacagcccaaagaaggcctggcgctgatcaacgggacgcagatgataacggcgctgggcaacctggcggttgcaaggctccgcaggctggtgccgctggccgacgaaatagcggccctcagtctggaggccctgcatggcaccagggcggcgtacgacccgcgcatccacgccgccaggcgcacacccggggcaaatcgaggcggccgcccacatgcgcctgattctgggcgagaccagcgagatagccgacagccaccaagactgcagccgtgtgcaggacgcatactccctgcgctgtctgccccaggtgcatggcgttgcgcgggacgcgctcaggtttgcgggggagatactggagcgcgagctgaacagcgccacggacaacccgatgatattcaccgacacgcaggagagccgcagcggcggcaacttccacggacagtacccgtcattcgcctgtga

SEQ ID NO: 54802 - protein, 346 aa, Unknown
  Obtained from environmental sample
  DOMAIN (11)...(334): Phenylalanine and histidine ammonia-lyase
  misc_feature (1)..(346): Xaa is any amino acid
MAEMPQERCAMVLLDGENLSAGRLEAVAAGESVSLDEAALARVGENRAVIDSILLEKRVVYGINTGFGQFATVVVPANQLAELQLNLVRSHAAGVGEPLTVAQTRALMAARINCLLKAHSGIRVEPIRLLAECLNRSVVPVIPSMGSVGASGDLAPLAHMALLLIGEGLAWDGTGRAPGGGALKKAGLEPIQLQPKEGLALINGTQMITALGNLAVARLRRLVPLADEIAALSLEALHGTRAAYDPRIHAARRTPGANRGGRPHAPDSGRDQRDSRQPPRLQPCAGRILPALSAPGAWRCAGRAQVCGGDTGARAEQRHGQPDDIHRHAGEPQRRQLPRTVPVIRL

SEQ ID NO: 54803 - DNA, 816 bp, Unknown
  Obtained from environmental sample
  misc_feature (1)..(816): n is a, c, g, or t
atggcaccagggcggcgtacgacccgcgcatccacgccgccaggcgcacacccggggcaaatcgaggcggccgcccacatgcgcctgattctgggcgagaccagcgagatagccgacagccaccaagactgcagccgtgtgcaggacgcatactccctgcgctgtctgccccaggtgcatggcgttgcgcgggacgcgctcaggtttgcgggggagatactggagcgcgagctgaacagcgccacggacaacccgatgatattcaccgacacgcaggagagccgcagcggcggcaacttccacggacagtacccgtcattcgcctgtgacgtgctggccatagccgcctgtgacctggcaagcatctccgagcgccgacaggagcgcctggtcaatccggcgtactctgacctgccggccttcctctgccggaacggcggcctggagagcggcttcatgatggcgcacgtcaccagcgccgcgctggtgagcgagatgaagggcatagcccaccccgcctgcgtggattccatacccacgagcgccggcaaggaagaccacgtcagcatgggccccatagccgccagaaagctgctgcgcgcggttgacgcgctggagcatgtgctggcgctggaggctaggatggcgctggagggcgtccgcatcattggtctgaagccggcggagggtctgtccaagctggtgggcgcgctggatgccgcatgtcccccgtggcacgacagggccatgcacgtagagatcgaggcagcagtcggggcgctcaggaaatacgcagcggatagggatgtgctttga

SEQ ID NO: 54804 - protein, 271 aa, Unknown
  Obtained from environmental sample
  DOMAIN (1)...(247): Phenylalanine and histidine ammonia-lyase
  misc_feature (1)..(271): Xaa is any amino acid
MAPGRRTTRASTPPGAHPGQIEAAAHMRLILGETSEIADSHQDCSRVQDAYSLRCLPQVHGVARDALRFAGEILERELNSATDNPMIFTDTQESRSGGNFHGQYPSFACDVLAIAACDLASISERRQERLVNPAYSDLPAFLCRNGGLESGFMMAHVTSAALVSEMKGIAHPACVDSIPTSAGKEDHVSMGPIAARKLLRAVDALEHVLALEARMALEGVRIIGLKPAEGLSKLVGALDAACPPWHDRAMHVEIEAAVGALRKYAADRDVL

SEQ ID NO: 54805 - DNA, 630 bp, Unknown
  Obtained from environmental sample
  misc_feature (1)..(630): n is a, c, g, or t
atgtgcgcggccaagccaacaagacggacccgcccaaggacaaaagccccaagccagcgcaggttcagcaaacaaaaaagacgctcgaccagaccccggcgcagaagccgacccaagccgtcccgcctaaacaggcccaagtcaccgctccaaaggcaccgcaggttgccgcgccaaagcccgcccaagccgttgcgcccaaggcggccaaagaccccgccaagccggatcaggcccccgcgccaaagccgaccaaggcaccggcacagggcgcccaagcaggcgcgtcgaagcccgcccagaccgcggcgccgaagcccacccaaagcccaacacaggcggacaaagccagcgtccccaagacccaagaccccaaaccagcgcaaaagcccgacaaagacaaagcgcagaccaccgaggacggggcaaaaaagccagcaaagcaacctgttcagaagccactgccgaagcccgcacaaaaacctacaccaaaaccggtgccaaagcccgcgcacaagccagcgccaaaaccgatgccaaagcccacgcacaagccagcgccaaagcacggacatgtgccggcgcacttggcgcatctgcccgcctttctcgataacccggatgtcatag

SEQ ID NO: 54806 - protein, 209 aa, Unknown
  Obtained from environmental sample
  misc_feature (1)..(209): Xaa is any amino acid
MCAAKPTRRTRPRTKAPSQRRFSKQKRRSTRPRRRSRPKPSRLNRPKSPLQRHRRLPRQSPPKPLRPRRPKTPPSRIRPPRQSRPRHRHRAPKQARRSPPRPRRRSPPKAQHRRTKPASPRPKTPNQRKSPTKTKRRPPRTGQKSQQSNLFRSHCRSPHKNLHQNRCQSPRTSQRQNRCQSPRTSQRQSTDMCRRTWRICPPFSITRMS

SEQ ID NO: 54807 - DNA, 930 bp, Unknown
  Obtained from environmental sample
  misc_feature (1)..(930): n is a, c, g, or t
ttgatcagatcggccgagaggcgacaaaaggaagcggaagatcatgttatttctcctgaacttgcggcatccgttcccggcatagacatcatcatagacggccactcccacagcaaattcgaagagcctttgaaagtcgggaatacctatatcgtgtcctcaaatgaatggggcaagtttgtcggagagggcaaacttacgatcgtggatggcaagatcgctaacttcgtgtggaagcctgtagcaatcgatggcacttacgcgccggacgcgcaagtcgcggctatgatcgcgcctttcaaagaaaaggcagacgccagccttaaagaagtagtcggagaggcctcggacaccttcatcttcgggaacaggcttacccgctatcaggaaactgccctcggcaatatgatctgcgacgcgaatacctggtactttagggccaacggccagaacatcgactttgccttccataacggcggaaacatgcgggccgagcttcccaaagggccgctgaccaaggaacagatcctgaccgttctgccgtttgagaattatctttacatagtctcccttaaaggctcgcagattatcgagctattcaactttatcggaaccgttgcccagggcgcgggcggattcccgcaattctcgcgcgaagtccgctatactatagatattcccgcaaagaaggtgagtaacctgacaatcggcggtgctccggtagatccgaacaagacttaccgattctgcacaaacgattatctcttgggcggcggtgacgggtacaccgtcctgacacaatccgagaatccgctcaatacgtcgctgcttctttcctatgtcgttattgagtacatcgcttcgcagaagggaattattacccccgttcttgacggaaggatgaccgttgtcggaggagtaactccgtaa

SEQ ID NO: 54808 - protein, 309 aa, Unknown
  Obtained from environmental sample
  DOMAIN (111)...(267): 5'-nucleotidase, C-terminal domain
  misc_feature (1)..(309): Xaa is any amino acid
MIRSAERRQKEAEDHVISPELAASVPGIDIIIDGHSHSKFEEPLKVGNTYIVSSNEWGKFVGEGKLTIVDGKIANFVWKPVAIDGTYAPDAQVAAMIAPFKEKADASLKEVVGEASDTFIFGNRLTRYQETALGNMICDANTWYFRANGQNIDFAFHNGGNMRAELPKGPLTKEQILTVLPFENYLYIVSLKGSQIIELFNFIGTVAQGAGGFPQFSREVRYTIDIPAKKVSNLTIGGAPVDPNKTYRFCTNDYLLGGGDGYTVLTQSENPLNTSLLLSYVVIEYIASQKGIITPVLDGRMTVVGGVTP

SEQ ID NO: 54809 - DNA, 792 bp, Unknown
  Obtained from environmental sample
  misc_feature (1)..(792): n is a, c, g, or t
ttggctgggagccgccagaatactgccatcttccccatggtgatgggccaggacggaaaaaaactcagcaaacgccacggcgcgaccagcattgacgagttcagaaagcagggctatctgcctgaggcgcttatcaactatgtcgccctgctgggcgcgtcctacgaggaaggaagggatttattcagcctgcaagagcttgaaagcctgttcagcatagacaagctcaacaaagccccggctattttcgattacaaaaagctcgaatggttcaacggtcagtatatcaggatgaaaagcgacgaggagcttgcagccctttgcctgccctccgcgattgaggccggtcttttcggagtttccggaacccaacccacaacggaacagaaaagtatcttcaccgccgcgatgccccttatccgcgagcgtcttacttttacccatgaggccgcggaaaaaatcgcctatttgttcgcgcctcccccgctgcccgccacggaagaatttatccccaaaaaagctgaccttgccgaaacgattaggcttctgcagcttgcgcgggatatggttaaccagctttccaacgcggttaacgacgcggcggctgaagcctacatcaaggaacaggccgaaaaagcctcggtcaagttaggcgatctgatgatgcccctgcgcgtcgccattacaggaagccgcgtcagccctccccttttcggctcgctgcgaattttaggaggagaagaatcaatgaggcgggtggaaacagccctgcagatgctggaaaacaaataa

SEQ ID NO: 54810 - protein, 263 aa, Unknown
  Obtained from environmental sample
  misc_feature (1)..(263): Xaa is any amino acid
MAGSRQNTAIFPMVMGQDGKKLSKRHGATSIDEFRKQGYLPEALINYVALLGASYEEGRDLFSLQELESLFSIDKLNKAPAIFDYKKLEWFNGQYIRMKSDEELAALCLPSAIEAGLFGVSGTQPTTEQKSIFTAAMPLIRERLTFTHEAAEKIAYLFAPPPLPATEEFIPKKADLAETIRLLQLARDMVNQLSNAVNDAAAEAYIKEQAEKASVKLGDLMMPLRVAITGSRVSPPLFGSLRILGGEESMRRVETALQMLENK

SEQ ID NO: 54811 - DNA, 825 bp, Unknown
  Obtained from environmental sample
  misc_feature (1)..(825): n is a, c, g, or t
atggcggcgattacaatagcaggaatgattcgtgatcgttacgcgccatcccctaccggcctgcagcatataggcggtataaggacggcgctttttaattatcttttcgcccgatcaaagggtgggacatttgtcctacgattggaggacaccgaccgcacacgttccgatgaaatttatgtgcagaacctttacgacactttttcatggctcggcctgcattgggacgaggggcctgacatcgggggtgttttcgcgccttacatacagtcaagccgttcggatctttacaagaaatacgccgatgagttgataagcaagggacgagcctattactgcttctgcaccgcggagcgcattgagaaggtaaggaaggagcgcgaagcggcccattcggcgggaagcggggaagttgcgtctggctatgaccggcattgcagggttatacccccagaggaagccgcggcgcggaccgcagccggtgaggcgcatacgataaggcttaaaattccccttggcgaaaccacacgctttaacgattacctcttgggcgaaattgaatggaaaaatgacgacgtgaacccagatccggtattgctcaaatccgacggctttcccacctaccatctcgccaatgtcgttgacgatcatttaatggaaataacccatgtcatgcgcgcccaggagtggctcgcttccaccccgttacacgtaatcatgtacaggagctttggctgggagccgccagaatactgccatcttccccatggtgatgggccaggacggaaaaaaactcagcaaacgccacggcgcgaccagcattga

SEQ ID NO: 54812 - protein, 274 aa, Unknown
  Obtained from environmental sample
  DOMAIN (9)...(274): tRNA synthetases class I (E and Q), catalytic domain
  misc_feature (1)..(274): Xaa is any amino acid
MAAITIAGMIRDRYAPSPTGLQHIGGIRTALFNYLFARSKGGTFVLRLEDTDRTRSDEIYVQNLYDTFSWLGLHWDEGPDIGGVFAPYIQSSRSDLYKKYADELISKGRAYYCFCTAERIEKVRKEREAAHSAGSGEVASGYDRHCRVIPPEEAAARTAAGEAHTIRLKIPLGETTRFNDYLLGEIEWKNDDVNPDPVLLKSDGFPTYHLANVVDDHLMEITHVMRAQEWLASTPLHVIMYRSFGWEPPEYCHLPHGDGPGRKKTQQTPRRDQH

SEQ ID NO: 54813 - DNA, 549 bp, Unknown
  Obtained from environmental sample
  misc_feature (1)..(549): n is a, c, g, or t
gtgacggtcggggtggacgctttctgtttctggctggtatgggatccgcagaaggccgccctggaagttgaagattataaagaggccgtcgccctcgcgtccaaggcggccctgcgaaacgtcatttccaaaaacgagctttccgtttttctggcccgcggggatattatcgaaaagcagatacaggaagaagtggaaaagcagaccactgaatggggcataacggttcagtacatcgagataaccgacattcagattcccgccgagcttcaggattcgctttcccgcgtcgcccaggccgagagggaaaagaagggccggacgctgctggcggaagcggaaatagagatagccaaaaaactggaagaggccatagtaatctacgcgaaagatcaggacgccctcaaactcaggatactttccatattgaacgaaggtctcaaaaccggtaattccatgatgctggtgccaaactccataacggacgagcttaaaaccaaggatattttcggcctccaggcgttgaatgaactgaagaaaaaagaatga

SEQ ID NO: 54814 - protein, 182 aa, Unknown
  Obtained from environmental sample
  DOMAIN (1)...(115): SPFH domain / Band 7 family
  misc_feature (1)..(182): Xaa is any amino acid
MTVGVDAFCFWLVWDPQKAALEVEDYKEAVALASKAALRNVISKNELSVFLARGDIIEKQIQEEVEKQTTEWGITVQYIEITDIQIPAELQDSLSRVAQAEREKKGRTLLAEAEIEIAKKLEEAIVIYAKDQDALKLRILSILNEGLKTGNSMMLVPNSITDELKTKDIFGLQALNELKKKE

SEQ ID NO: 54815 - DNA, 1047 bp, Unknown
  Obtained from environmental sample
  misc_feature (1)..(1047): n is a, c, g, or t
atggctattgaaattattggaaccggaaaagcggtacccgcccaaaaaattagcaatgatgaccttgcggcacggattgacacaagcgatgaatggatccgctcccacacagggataggaaaccggcatttcgccgatgaaaaaacggctaccagcgatattgcgctggaagcggcgaaaaacgcccttgcgatgacggccggctatacgggcgacagtcgtgaagatcgggatattgcggccgctgaaatggcaaaaagcatagatatgataatcattggaaccgcaactcctgattttatcggaaccccgtcaactgcctgtattgtgcagcacaagctgggcgctgttaatgccgcggcaatggacgtgactgcgggatgcaccggttttatttacggacttgaggccgccgcgggaatgttgcatatcagcaaaaggcggaaacgggcgcttgtaattggcgccgaggaactgtccaaagtggtgaattgggaagacagaagtacctgtgttctttttggcgacggcgccggggcggttgtaatagaaaaaaccgatgcgcccagcgagggtcccgggcggcgggggcttatacaaaccatgctgtatgccgacggctccggcaccgaaagccttcttttcaggcggggcggtacgcgtaatcctttcaggccgggcgaagtcatcgaaaaaggtatctgtgttgaaatgaacggccaggaagtgtacaacttcgcggtaaaggctgttagtgacacggcaaaggctctgatgcagtccgaaggaatagagccaaatgatctcgcgtggatagtgccccatcaggcaaacgcccggattgtgcaggctgcggggaaacgccttaaaatccccgctgagaaattctaccttaatatagaagaatacgccaacacatcggcggcatctatacctcttgccctggacgagatgaaccggggcggaaagcttaaaaaaggcgacatgataataactatcggttttggcggcggccttacctatggcggcaatataatcatttggtag

SEQ ID NO: 54816 - protein, 348 aa, Unknown
  Obtained from environmental sample
  DOMAIN (122)...(207): 3-Oxoacyl-[acyl-carrier-protein (ACP)] synthase III
  misc_feature (1)..(348): Xaa is any amino acid
MAIEIIGTGKAVPAQKISNDDLAARIDTSDEWIRSHTGIGNRHFADEKTATSDIALEAAKNALAMTAGYTGDSREDRDIAAAEMAKSIDMIIIGTATPDFIGTPSTACIVQHKLGAVNAAAMDVTAGCTGFIYGLEAAAGMLHISKRRKRALVIGAEELSKVVNWEDRSTCVLFGDGAGAVVIEKTDAPSEGPGRRGLIQTMLYADGSGTESLLFRRGGTRNPFRPGEVIEKGICVEMNGQEVYNFAVKAVSDTAKALMQSEGIEPNDLAWIVPHQANARIVQAAGKRLKIPAEKFYLNIEEYANTSAASIPLALDEMNRGGKLKKGDMIITIGFGGGLTYGGNIIIW

SEQ ID NO: 54817 - DNA, 366 bp, Unknown
  Obtained from environmental sample
  misc_feature (1)..(366): n is a, c, g, or t
gtgtcactaacagcctttaccgcgaagttgtacacttcctggccgttcatttcaacacagatacctttttcgatgacttcgcccggcctgaaaggattacgcgtaccgccccgcctgaaaagaaggctttcggtgccggagccgtcggcatacagcatggtttgtataagcccccgccgcccgggaccctcgctgggcgcatcggttttttctattacaaccgccccggcgccgtcgccaaaaagaacacaggtacttctgtcttcccaattcaccactttggacagttcctcggcgccaattacaagcgcccgtttccgccttttgctgatatgcaacattcccgcggcggcctcaagtccgtaa

SEQ ID NO: 54818 - protein, 121 aa, Unknown
  Obtained from environmental sample
  misc_feature (1)..(121): Xaa is any amino acid
MSLTAFTAKLYTSWPFISTQIPFSMTSPGLKGLRVPPRLKRRLSVPEPSAYSMVCISPRRPGPSLGASVFSITTAPAPSPKRTQVLLSSQFTTLDSSSAPITSARFRLLLICNIPAAASSP

SEQ ID NO: 54819 - DNA, 963 bp, Unknown
  Obtained from environmental sample
  misc_feature (1)..(963): n is a, c, g, or t
atggaaaagaacaatgtagtatttttgtttccgggccagggcgcccagtatcagggaatggccctggattttctggcttccggaagcgaaggtgtcaaaaaaatctttgacgcggcttcggctgcttttggaagggatgcccaagccatgttgagggactcggatgccgataccttgaagcggacagatatgtcccagccgactgtgacattggcgaatctggccgccgccgcatatctcgcggaacagggttggacgccaaaggcttgcgccggtttcagccttggcgaatatgccgcgctggtctgcgccggcgtaatcagcgcggaggattgtttgcgcctggtgaaggcgcgcggcgcggcaatgcaggcaaacgccgacaggctgagggaagccgcgggcggcgacgcttctgccgctcccggcatggcggctgttgtcgggcttgcccccgcggacgtggaaaagtttatagcgcaatggggcgtgaaagacctgtatgcggcaaatatcaattcgccaaagcaggtcgcggtaagcgggactgccgccgcgctgacggaagcggaaacccgtttcaaggaagccggagcaaagcgcgttattcgcctgcaggtcgccggccccttccattcgcctctgcttgtagacgcggccgaggctttcaagccggatcttgaagctgtcagcttcagcgatcccaaaatcgctctgtattccaacgttaccggcaaactggtaacttccggcgcggaagcaaaaaaactcgccctcgcgcagattaccagccctgtccgctgggtggaagaagaggctgcaatcataaaggccggcggttttgaggcttgccttgaagtcggccccggaaaagtcctgcagggtctttggaaagattccggcagcgagcttccctgctgcgccgcgggaacggttgaagacattggaaaaataggtaactaa

SEQ ID NO: 54820 - protein, 320 aa, Unknown
  Obtained from environmental sample
  DOMAIN (7)...(320): Acyl transferase domain
  misc_feature (1)..(320): Xaa is any amino acid
MEKNNVVFLFPGQGAQYQGMALDFLASGSEGVKKIFDAASAAFGRDAQAMLRDSDADTLKRTDMSQPTVTLANLAAAAYLAEQGWTPKACAGFSLGEYAALVCAGVISAEDCLRLVKARGAAMQANADRLREAAGGDASAAPGMAAVVGLAPADVEKFIAQWGVKDLYAANINSPKQVAVSGTAAALTEAETRFKEAGAKRVIRLQVAGPFHSPLLVDAAEAFKPDLEAVSFSDPKIALYSNVTGKLVTSGAEAKKLALAQITSPVRWVEEEAAIIKAGGFEACLEVGPGKVLQGLWKDSGSELPCCAAGTVEDIGKIGN

SEQ ID NO: 54821 - DNA, 894 bp, Unknown
  Obtained from environmental sample
  misc_feature (1)..(894): n is a, c, g, or t
atgtcttcaaccgttcccgcggcgcagcagggaagctcgctgccggaatctttccaaagaccctgcaggacttttccggggccgacttcaaggcaagcctcaaaaccgccggcctttatgattgcagcctcttcttccacccagcggacagggctggtaatctgcgcgagggcgagtttttttgcttccgcgccggaagttaccagtttgccggtaacgttggaatacagagcgattttgggatcgctgaagctgacagcttcaagatccggcttgaaagcctcggccgcgtctacaagcagaggcgaatggaaggggccggcgacctgcaggcgaataacgcgctttgctccggcttccttgaaacgggtttccgcttccgtcagcgcggcggcagtcccgcttaccgcgacctgctttggcgaattgatatttgccgcatacaggtctttcacgccccattgcgctataaacttttccacgtccgcgggggcaagcccgacaacagccgccatgccgggagcggcagaagcgtcgccgcccgcggcttccctcagcctgtcggcgtttgcctgcattgccgcgccgcgcgccttcaccaggcgcaaacaatcctccgcgctgattacgccggcgcagaccagcgcggcatattcgccaaggctgaaaccggcgcaagcctttggcgtccaaccctgttccgcgagatatgcggcggcggccagattcgccaatgtcacagtcggctgggacatatctgtccgcttcaaggtatcggcatccgagtccctcaacatggcttgggcatcccttccaaaagcagccgaagccgcgtcaaagatttttttgacaccttcgcttccggaagccagaaaatccagggccattccctga

SEQ ID NO: 54822 - protein, 297 aa, Unknown
  Obtained from environmental sample
  misc_feature (1)..(297): Xaa is any amino acid
MSSTVPAAQQGSSLPESFQRPCRTFPGPTSRQASKPPAFMIAASSSTQRTGLVICARASFFASAPEVTSLPVTLEYRAILGSLKLTASRSGLKASAASTSRGEWKGPATCRRITRFAPASLKRVSASVSAAAVPLTATCFGELIFAAYRSFTPHCAINFSTSAGASPTTAAMPGAAEASPPAASLSLSAFACIAAPRAFTRRKQSSALITPAQTSAAYSPRLKPAQAFGVQPCSARYAAAARFANVTVGWDISVRFKVSASESLNMAWASLPKAAEAASKIFLTPSLPEARKSRAIP

SEQ ID NO: 54823 - DNA, 432 bp, Unknown
  Obtained from environmental sample
  misc_feature (1)..(432): n is a, c, g, or t
atgacagattggccgagtctgctcttaggctgtcttggttttggcgactgcgtgaaggtgtgcaaatttgacgctttaagcatggacagtaaaaagggtctgcccgttattgatatcgcaaaatgcacaggctgcggaatgtgcataacggaatgtccccaggctattatcaaggctgtcccgaaagaccagaaaggcatgatggtgctatgctccaaccgaaaccccaacaggcagcaggtagcgaaaagctgcaaaatctcctgcattaaatgcggccagtgcgtgaggcaatgcccccagcagtgcattgatttaagcacgaatatccccgttatagaccttacaaaatgtacctcttgcggaatctgcgtggaaaaatgccccacaaaggtggcgaagattattgaaactgctttacagcaaaaataa

SEQ ID NO: 54824 - protein, 143 aa, Unknown
  Obtained from environmental sample
  DOMAIN (35)...(58): 4Fe-4S binding domain
  misc_feature (1)..(143): Xaa is any amino acid
MTDWPSLLLGCLGFGDCVKVCKFDALSMDSKKGLPVIDIAKCTGCGMCITECPQAIIKAVPKDQKGMMVLCSNRNPNRQQVAKSCKISCIKCGQCVRQCPQQCIDLSTNIPVIDLTKCTSCGICVEKCPTKVAKIIETALQQK

SEQ ID NO: 54825 - DNA, 591 bp, Unknown
  Obtained from environmental sample
  misc_feature (1)..(591): n is a, c, g, or t
atgtcgattgtggtggagcatgagaaaaggcggaaggagatactcgaaaaagcgcttgacgtttttatttcagagggttatgtggacgcgacatttcagaaaatagcggacaaatgccgcataacaaggacgactctgtacctttatttcaggaacaaaaaagacatctttaactacagcataaaactgcttctcgcgaaacttgaagaagacatccagttgacccgatccgattcttcgctggacagcgtagaaaaaatcacagaagtattaatgaaaattttcggacatatagaggaaaaccgccgcctgctttcggtgatccttgattatctgctgcatgttacaaaaagctcaggcgatccggcaaagcccgtccgccgccgcaccctcaggctcaggcatattctgtcgtccctggtaatagaaggaataaaaaccggtaatataaaacccataaacgtaaaaaccgcggacgactatttgtacagttttattgaagcggctattttccgcctgacggtcctgcagcaggaaacggtgggcgatctgcgggagacggttatttttgctgtaaagcagtttcaataa

SEQ ID NO: 54826 - protein, 196 aa, Unknown
  Obtained from environmental sample
  DOMAIN (14)...(60): Bacterial regulatory proteins, tetR family
  misc_feature (1)..(196): Xaa is any amino acid
MSIVVEHEKRRKEILEKALDVFISEGYVDATFQKIADKCRITRTTLYLYFRNKKDIFNYSIKLLLAKLEEDIQLTRSDSSLDSVEKITEVLMKIFGHIEENRRLLSVILDYLLHVTKSSGDPAKPVRRRTLRLRHILSSLVIEGIKTGNIKPINVKTADDYLYSFIEAAIFRLTVLQQETVGDLRETVIFAVKQFQ

SEQ ID NO: 54827 - DNA, 798 bp, Unknown
  Obtained from environmental sample
  misc_feature (1)..(798): n is a, c, g, or t
atggggctgagggcggcggaccgcgtgcttttggaagcgggttgttttcacgccgctgactttgacgcgctctttgaaaaaacgcaggcattggcctgggaaaaatttgtcccccctgagtcagggttaaaaattgtcaaagtacgatcaaacggctcgcggctaaaagcggaaactagcatacagtcaataacgcacaaggccgcggcgcaaaggctctgtaaacacagcgggctttcgcggctgccggatacagagcagacggcggaagccagggtctatgtggaaaaggacacagtttcgcttctgttggacttaagcggggagccgctttttaaacgggggtacaggaaggacggcggtattgccccgttacgtgaaaccaccgctgccgcgatgatcctgctttcgggctggaagcgcaagtatccgttatacgatcctttttgcggctcgggcactatcctcgccgaagcgcttatgtacgcctgggacatggcacccgggattgcgagggcaagagcttcgttaaatttcgccattgacaggttgcttatcgcggacaaaaaaaccgaagaaacagtccgggccgaatttcgcgccaggatcaattttgaacgcctgatccgccttgccggaagcgacggagaccctgaatgttccgcgcttgccttgtcaaacctgaaaaaagttcatgcgttagctgaaagcggcattccgcctacaggcggatcgcccgctgacaggcttccgctttattacaacaacgcccatgaacatggcgcggcctccatttga

SEQ ID NO: 54828 - protein, 265 aa, Unknown
  Obtained from environmental sample
  DOMAIN (114)...(265): Putative RNA methylase family UPF0020
  misc_feature (1)..(265): Xaa is any amino acid
MGLRAADRVLLEAGCFHAADFDALFEKTQALAWEKFVPPESGLKIVKVRSNGSRLKAETSIQSITHKAAAQRLCKHSGLSRLPDTEQTAEARVYVEKDTVSLLLDLSGEPLFKRGYRKDGGIAPLRETTAAAMILLSGWKRKYPLYDPFCGSGTILAEALMYAWDMAPGIARARASLNFAIDRLLIADKKTEETVRAEFRARINFERLIRLAGSDGDPECSALALSNLKKVHALAESGIPPTGGSPADRLPLYYNNAHEHGAASI

SEQ ID NO: 54829 - DNA, 636 bp, Unknown
  Obtained from environmental sample
  misc_feature (1)..(636): n is a, c, g, or t
atgaaaaagatggtgttatttggcagtggtttggttgttttggcgatagtcggagcatttttggtggccggatgtgcggatggcagtgacacaaactttccgtatgggccgccggttgaaccgagtaaaattaccatacaaatatggcctgaaggtagcggaacttgcgttattagccctgaagattataaaactggggatattgtgactattacggcgattcctgcggctgaaagcaaatatatgtttgaaagatggtcttatcaaaacggttcattatatgtagccggttataataatccattgattatcagattgaatagggataagattgttatagctctgtttaccgaggctattgattttgatacgctgattgattaccgagatggtcagacatacaaaactatccaaataggtaaccggacttggatggcgcagaatttgaattataagatggacagttcttggtgttatgattgcgccaaatacggcagggtttatgactggcgcacggcaatggaagtatgtcctttggggtggcatctgccctcctatcaggaagttttagatttaataaccgcaacgagcatgacagcgcggcaggcaaaaggctactcggccaatctgtcatga

SEQ ID NO: 54830 - protein, 211 aa, Unknown
  Obtained from environmental sample
  SIGNAL (1)...(28)
  misc_feature (1)..(211): Xaa is any amino acid
MKKMVLFGSGLVVLAIVGAFLVAGCADGSDTNFPYGPPVEPSKITIQIWPEGSGTCVISPEDYKTGDIVTITAIPAAESKYMFERWSYQNGSLYVAGYNNPLIIRLNRDKIVIALFTEAIDFDTLIDYRDGQTYKTIQIGNRTWMAQNLNYKMDSSWCYDCAKYGRVYDWRTAMEVCPLGWHLPSYQEVLDLITATSMTARQAKGYSANLS

SEQ ID NO: 54831 - DNA, 750 bp, Unknown
  Obtained from environmental sample
  misc_feature (1)..(750): n is a, c, g, or t
atgaaaagattaaaagaaattttaacgggcattcttgttatcgcggtggtaggtactgcattttatttcatatatcaaaacgtaactaaaaaaacgcacagggacttggctaaacgtattgcggaattaagtcctaaaggcggtcctcctgaaaccattgacggtttaagaaaggcgattgcgttatatgaagatcagatcgaaagaaacgtaagggaaggcgctcaaaccggagtttattggaaaatactggcgataaggcttgcggataaaaagatgcataatgacgcgcttaaagcgtttgaaagggcaatttattttaataccgaagacccgaccatatattatttaacgggcgtatccgccgcgtcagccgcaaaatcaatggtaggattttcagacggagatcaaaaggaaaaagaaaaattgtataaactttccgagaattcgtatttacgcgctatggaacttgacattacatacacaaagccaatgtacggtatcgcgatactgtatatttttgagcttgacaggccgcaggacgccattccgtatctggaacgttatctgaaaatttccccctctgatgtctccgccatgtttgttcttgcgagggcgtattattccacggaaaattattcaggggcggttgaattatacgacaagataataagccgtactaaagataaaaagatcaaagaagaggcgcaaaagaacaaagacattattcaggggatgatatatgaataa

SEQ ID NO: 54832 - protein, 249 aa, Unknown
  Obtained from environmental sample
  misc_feature (1)..(249): Xaa is any amino acid
MKRLKEILTGILVIAVVGTAFYFIYQNVTKKTHRDLAKRIAELSPKGGPPETIDGLRKAIALYEDQIERNVREGAQTGVYWKILAIRLADKKMHNDALKAFERAIYFNTEDPTIYYLTGVSAASAAKSMVGFSDGDQKEKEKLYKLSENSYLRAMELDITYTKPMYGIAILYIFELDRPQDAIPYLERYLKISPSDVSAMFVLARAYYSTENYSGAVELYDKIISRTKDKKIKEEAQKNKDIIQGMIYE

SEQ ID NO: 54833 - DNA, 888 bp, Unknown
  Obtained from environmental sample
  misc_feature (1)..(888): n is a, c, g, or t
ttgaacagcaaagagcttcttgccaggtattgttctcgtcttatagcaatagaacgccgttctttgcttacaaaggaaagttatcgtctggaaattaaaaattttcttgagtatcttgattcaaaaaatatgcctcttaaaagtacagacgcagcttttctaactaagtatcttgctaaacgcaagaaagagaataatattagttcgcgttcagttgcaaagataatttccgctttaaggtctttttacagatttgccatagacgaaaaactgataaaagacaatccggcggatattcttgagattccaaaacggaaaatcaatattcccgaagtaatggacaaaaaaaccgtagaaaatcttttaggacagatagacgcgtcaaaaccgcaaggatgcagggacaaatgtctttttgagttaatttattccgcgggacttcgcgtttccgaggcggtaaatttaaatatcaaagatattgatatcgaaggaggatcagcgaaagtaaagggcaaaggaaataaagaacgcattgtgctttttggaaaaaaagccggcggtttgttaaaggaataccttaactccgcaaggatagagcttgccggaaaaacaaacaaaactcaggcgctttttataagcagaaacggcagacgcctttccagaaaaggcatttggaaaaattacgcgaaattcgcctgtattgcgggtacgtcgtcccatattcacacgttacgccacagtttcgctacttcgttactggcgggaggcgctgatttaaggacagtacaagaacttttaggacatgccgatctttccacaactcagatttatacgcatgtagatacggcaattttaagggagaatcaccgtcggtatcttccaaaataa

SEQ ID NO: 54834 - protein, 295 aa, Unknown
  Obtained from environmental sample
  DOMAIN (7)...(90): Phage integrase, N-terminal SAM-like domain
  misc_feature (1)..(295): Xaa is any amino acid
MNSKELLARYCSRLIAIERRSLLTKESYRLEIKNFLEYLDSKNMPLKSTDAAFLTKYLAKRKKENNISSRSVAKIISALRSFYRFAIDEKLIKDNPADILEIPKRKINIPEVMDKKTVENLLGQIDASKPQGCRDKCLFELIYSAGLRVSEAVNLNIKDIDIEGGSAKVKGKGNKERIVLFGKKAGGLLKEYLNSARIELAGKTNKTQALFISRNGRRLSRKGIWKNYAKFACIAGTSSHIHTLRHSFATSLLAGGADLRTVQELLGHADLSTTQIYTHVDTAILRENHRRYLPK

SEQ ID NO: 54835 - DNA, 606 bp, Unknown
  Obtained from environmental sample
  misc_feature (1)..(606): n is a, c, g, or t
atgaaatgggatattgttaaattgggcgatgtgtgtgatgtaaatccctcaacaaagggaaaattatcctcgttaccttcggatatgttagtttcttttcttccgatggacgcaatggaagctggaacaggtaaaatgaatcctgtcaataaaacacttgaaacggtaagaaaaggatatacatattttgaaactggagatgtcttatttgccaagataacaccgtgtatgcaaaatggtaaacatgcaatagcgcgaaatttaacaaatggtatcggttttggttctacagaatttcatgtcttgcgttccaaatcggatgtaattgcagagtggatttacaattttattagccagaaagatttgttgactaatgctacgaatttttttcaaggcgcggttgggcaacaaaggcttcctgatgattacttgaaaaatcttgaaattccactacctcccattgacgaacaacgccgtattgccgctgaaattgaacgtcagtttgccgcagtggaaagggcgaagaaggcggcggcggaacagttgaacaccataaatgccatgcccgtagccatactgcgtcaagcgttcagcggtcaattatga

SEQ ID NO: 54836 - protein, 201 aa, Unknown
  Obtained from environmental sample
  DOMAIN (3)...(169): Type I restriction modification DNA specificity domain
  misc_feature (1)..(201): Xaa is any amino acid
MKWDIVKLGDVCDVNPSTKGKLSSLPSDMLVSFLPMDAMEAGTGKMNPVNKTLETVRKGYTYFETGDVLFAKITPCMQNGKHAIARNLTNGIGFGSTEFHVLRSKSDVIAEWIYNFISQKDLLTNATNFFQGAVGQQRLPDDYLKNLEIPLPPIDEQRRIAAEIERQFAAVERAKKAAAEQLNTINAMPVAILRQAFSGQL

SEQ ID NO: 54837 - DNA, 357 bp, Unknown
  Obtained from environmental sample
  misc_feature (1)..(357): n is a, c, g, or t
ttgaaatctaagaaatcaagcgttaaggttgtcgccgtagagcctgccgcgtccccggtgctttcaggcggatcgccaagcccgcataaaattcaaggtataggggcaggttttgtgcctcaggtttatgatcccgccgtcattgacgagatttacaagaccgatgaagtaaaagccggaactacggcgcgccgtctcgcgaaggaagaaggcatactcgtagggatttcatccggctccgttcttgaagcggcgctggcaattgccaaaaggccggagaacaatggtaagacaatagtagccgtattgccggacacaggcgagcgttatttatcaacatggttgtgggacgaataa

SEQ ID NO: 54838 - protein, 118 aa, Unknown
  Obtained from environmental sample
  misc_feature (1)..(118): Xaa is any amino acid
MKSKKSSVKVVAVEPAASPVLSGGSPSPHKIQGIGAGFVPQVYDPAVIDEIYKTDEVKAGTTARRLAKEEGILVGISSGSVLEAALAIAKRPENNGKTIVAVLPDTGERYLSTWLWDE

SEQ ID NO: 54839 - DNA, 954 bp, Unknown
  Obtained from environmental sample
  misc_feature (1)..(954): n is a, c, g, or t
ttgattatggcaacagcagaacttaacgcgcttaataaagcgcaagcgtaccaactggcggacattaccaaaaccccgccgcaattcggcgcgattaccccgcgctggttaattcgttttctggaattcaaagggcttgaagccggtatttaccgcgtaaacaaagttgttgaaggagaaactccgcttgacattctctgctcttcagaaaaaaagagcgctgagattcccgaagggtacatacagtaccagcaaaagcccagggaatataccttaagctcaatttctaccattataaacgtagatacagcagtacaggacgtgtattcctcgccttttgatcagacaaaagaacaactgcatcttgcgattgaaagtctgcgcgaaaggcaggagagccagctaatcaataacgatgattacggccttttaaaaaatgttcccgacagccagcgcattaaaccgggaaacaaagcgggctcccccatgcccgacgactttgacgagcttatatcaaaggtgtggaaagaacctgcgttctttttggcgcacccgcgcgccgtcgccgctttccagcgggaatgtacgcgcaggggcgtcccccccgctaccacgtcggtattcggcggcaattttattctttggcgcggcattccggttattcctacggataaattgtttgtggacggtttaaaaaatccaaaaagcaaaagcggtaaaaccaacattttgttggtgcgtaccggagaggcaaaacgcggagtaatcggcttgtatcagacaggtttacagaacgaacagggaaggggactttccgtgcgtttcaggggagtggacaacaagggacttgcttcctatcttctgtcactgtactgctcagcagcaattctcgccgatgacgcgatagccgtacttgaagaagtggaagtaggtaactactatgattacacctaa

SEQ ID NO: 54840 - protein, 317 aa, Unknown
  Obtained from environmental sample
  misc_feature (1)..(317): Xaa is any amino acid
MIMATAELNALNKAQAYQLADITKTPPQFGAITPRWLIRFLEFKGLEAGIYRVNKVVEGETPLDILCSSEKKSAEIPEGYIQYQQKPREYTLSSISTIINVDTAVQDVYSSPFDQTKEQLHLAIESLRERQESQLINNDDYGLLKNVPDSQRIKPGNKAGSPMPDDFDELISKVWKEPAFFLAHPRAVAAFQRECTRRGVPPATTSVFGGNFILWRGIPVIPTDKLFVDGLKNPKSKSGKTNILLVRTGEAKRGVIGLYQTGLQNEQGRGLSVRFRGVDNKGLASYLLSLYCSAAILADDAIAVLEEVEVGNYYDYT

SEQ ID NO: 54841 - DNA, 600 bp, Unknown
  Obtained from environmental sample
  misc_feature (1)..(600): n is a, c, g, or t
atgtctaaacaattcgtagtgatagggcttgggaatacaggcattcttttggtgaagcgtttgtcggaacttgggcattcggtgcttgccatagataaggaagcagaaatagttcaagacataacgccttttgcttcgcaggcggctgttgcagattctctaagaaaaaatatgctgcaaaaatttccacttgccaaggcagattttgtgatagtgtgcataggttctcttgaaagttcgcttattaccattctaaacttaaaggaaatgggcgtagtgaatataatggcaaaagcaaacgacaccgctcattgcgcaatacttgagaaaatgggtttgctctctgaatacatatttcaaccagaacgcgacatggctgccgagctagcgaacaagctggataaaatgggtcgcccaaacattttggattttatgccacttatggacggatattccgttatggaatggaaatgcccaaaaaacttggtgggcaaaacactgatggatgccaatttgataaacaaatacggagttcaggttattgccattaaagatgcaaaaacaggaaagttgaatgcagttccaaaagctcaatactaa

SEQ ID NO: 54842 - protein, 199 aa, Unknown
  Obtained from environmental sample
  DOMAIN (5)...(121): TrkA-N domain
  misc_feature (1)..(199): Xaa is any amino acid
MSKQFVVIGLGNTGILLVKRLSELGHSVLAIDKEAEIVQDITPFASQAAVADSLRKNMLQKFPLAKADFVIVCIGSLESSLITILNLKEMGVVNIMAKANDTAHCAILEKMGLLSEYIFQPERDMAAELANKLDKMGRPNILDFMPLMDGYSVMEWKCPKNLVGKTLMDANLINKYGVQVIAIKDAKTGKLNAVPKAQY

SEQ ID NO: 54843 - DNA, 1347 bp, Unknown
  Obtained from environmental sample
  misc_feature (1)..(1347): n is a, c, g, or t
atgtcaagctatatgaaacgccatcccatgctttatcccgtggtcgggtttctcgctctaattttgcttggcacaattttgctttcaatgcctttcagttcaaatgatggcttaacattttcagatgcactctttatggcaacatctgcatcttgcgtaaatgggcttgccgttatatctgttgggcacgaactcagttttgctgggcaattcatattgctcagtttaatagaggttggtggcatagggataatggcaatttcaaccttaataatgctcattgtacattttaaaatgaatttcgagcaattatcggcttttaacagcagttattccgcagacgatagctcaggtgccagtcatgttgtgaagaaagtgattctaattactctggcaattgaactatgcggtgccattatgttgttcacgcaattttcggatatgccaatttggcaacgtatttttttctcggtttttcacgcaatcacagccttctgcaatgccggtttttcgctcttggagaattccatgcaaggtttttccacaaatgtagtggttaatataaccttgatatttttaataatttgcggaggttttggttttttggctttgtctgaatttgtttcgtcaaaaaaaaataaaataccaggcaaatatttgactttgcacactaaactcgttttgcttatgacagttacgctgataatctttggaatgcttttgatgctaagaatggaatgggatggggttttgagcggctactcttttttcgataaagttttgataagcctttttcaatctgtgactgcacgctccggtggttatagcacggtgaattttgcccttcttggtgctcctatgcttttcaccatgattttgttcatgttcgtaggggcaagccccggaagctgcggcggcggcataaaaacaacaacggctgcgataatagtgctgcttggcataaacagatttttgggtcgcaaaaaaacacaagttttcaaccgcacaataccagaagaaaccgtatctcgcgctgtgcgaatttttgttctctctgttatatttatagccattgcctgtattttgcttttgggttttgaaacggcggatttatctgtgcaagctggtcaagaccgttttttagaattattgtttgaaaccgtcagtgcgttttcaacttgtggtttgagtatgggaacaacggaatatttaacaacatctggaaaaattttgctatctgtggttatgtttgtaggcaggcttgggcctttggttttggttcaagccgtggttttgcatccgcactcagatgcatattattcagaggaaaacgtaatggtggggtga

SEQ ID NO: 54844 - protein, 448 aa, Unknown
  Obtained from environmental sample
  DOMAIN (110)...(434): Cation transport protein
  misc_feature (1)..(448): Xaa is any amino acid
MSSYMKRHPMLYPVVGFLALILLGTILLSMPFSSNDGLTFSDALFMATSASCVNGLAVISVGHELSFAGQFILLSLIEVGGIGIMAISTLIMLIVHFKMNFEQLSAFNSSYSADDSSGASHVVKKVILITLAIELCGAIMLFTQFSDMPIWQRIFFSVFHAITAFCNAGFSLLENSMQGFSTNVVVNITLIFLIICGGFGFLALSEFVSSKKNKIPGKYLTLHTKLVLLMTVTLIIFGMLLMLRMEWDGVLSGYSFFDKVLISLFQSVTARSGGYSTVNFALLGAPMLFTMILFMFVGASPGSCGGGIKTTTAAIIVLLGINRFLGRKKTQVFNRTIPEETVSRAVRIFVLSVIFIAIACILLLGFETADLSVQAGQDRFLELLFETVSAFSTCGLSMGTTEYLTTSGKILLSVVMFVGRLGPLVLVQAVVLHPHSDAYYSEENVMVG

SEQ ID NO: 54845 - DNA, 369 bp, Unknown
  Obtained from environmental sample
  misc_feature (1)..(369): n is a, c, g, or t
atggcaatggccagcttagaaagagttgggcttgcaaatcgcagcgaccattgcccaagccaactttctggaggacagcagcagagggttgccatagcgcgcgcgcttgtgaataaccccgttatgattttggcagacgaagcaactggagcattggacgaacgtacaggctatgaaattatggttttgtttcaggaattgaacaagcaagggaaaaccatagtttttgtgacccacaatccagaaatcacggaattcagcaatcgcacaataaaattgaaagatggaagactttttagcgataccgccacggaaaacataaaatctgccgcagaggctttggcaaagttgcctgcgcaacaggactag

SEQ ID NO: 54846 - protein, 122 aa, Unknown
  Obtained from environmental sample
  DOMAIN (1)...(96): ABC transporter
  misc_feature (1)..(122): Xaa is any amino acid
MAMASLERVGLANRSDHCPSQLSGGQQQRVAIARALVNNPVMILADEATGALDERTGYEIMVLFQELNKQGKTIVFVTHNPEITEFSNRTIKLKDGRLFSDTATENIKSAAEALAKLPAQQD

SEQ ID NO: 54847 - DNA, 585 bp, Unknown
  Obtained from environmental sample
  misc_feature (1)..(585): n is a, c, g, or t
atgaagtttcgcctcctggtaattgacgatgaaaaaaatatccgcgagggccttgccgaatatcttgaggaggaaggctatgaagtagcctgcgcgaaagacggggaagaaggctggaaacttttttcaggcggtgatattgaccttgtcattacagatttaagaatgcccggcataggcggggaggagcttatgaaacgcatactcgctcaggctcccggctttccggtaatcatgcttacgggccacggctccgtggaaaccgccgttaacgcgatgagagacggcgcgtgggatttccttacaaaacccgtggacatggaccatctttccctgataataaaacgcgcccttgaaaaccgcgagcttgtttttaagcaccgccagatgaccgaagagattgaaaggcgcaaacagtttaagtctataataggcaattcgcgcaatatccgcgatgtttttaacaccatgaacaaagccgcccccacaaaagcctctattttaattacgggagaatccggcgtagggaaagagcttgtggcggacgcaatccacgaactttccccccgaaaagatttccgctga

SEQ ID NO: 54848 - protein, 194 aa, Unknown
  Obtained from environmental sample
  DOMAIN (143)...(194): Sigma-54 interaction domain
  misc_feature (1)..(194): Xaa is any amino acid
MKFRLLVIDDEKNIREGLAEYLEEEGYEVACAKDGEEGWKLFSGGDIDLVITDLRMPGIGGEELMKRILAQAPGFPVIMLTGHGSVETAVNAMRDGAWDFLTKPVDMDHLSLIIKRALENRELVFKHRQMTEEIERRKQFKSIIGNSRNIRDVFNTMNKAAPTKASILITGESGVGKELVADAIHELSPRKDFR

SEQ ID NO: 54849 - DNA, 1089 bp, Unknown
  Obtained from environmental sample
  misc_feature (1)..(1089): n is a, c, g, or t
ttggaaacggttatggactccatggatgtgggcattcttgtctgcggcgcgaaaaataaccttgtaatggcgaataaattcgcgcagcgtcttttccctatgaccttaaacgaaggtgtagagttgtgggaagcgttaaaagacgaagaaattgctgacttttttaaaaatatccttcttaacagggaaaaaattaacggctatgaaatgaatatcgatcagaatgaaagaagaaaactgctttcgattaacgtagtcccgctggttcaggataagcgcgtaacaggctcccttatctatattgaggatattaccgaaaagcggaagggagaagcgcgccttagaagggcggaaaatcttgccagccttacgactctcgcggccggcgtagcgcatgaaattaaaaatcctttaggctcaatttccatacatctccagcttttgcaaaaggcgtttgcgaaaaaaattaaaacatttgacgctaaaatagaaaaatattttaacgtgttaaaagaagaggtgaacaggcttaaccttatcgtcgttgattttctttttgccgtgcgccccatgacccttgatttaagggagggggatatcaataaattaatttcgcagttaattgaatttgtccgttatgagcttgagagagcgaaaatcctgtgccttttggaactggaggaaaatttgccgtttattttatttgacgagcgttatatgaaacaggccctgctcaatctggtaaaaaacgcgcaagcagcgatgcccaaaggcggagttttaaccattgccacaagccggatagataacgacataaggatattattcagcgatacgggcgtaggcattagcgaaaaaaacctgtcaaaaatatntgagccttattttacgacaaacgaggcgggaacgggactggggcttactcaggtttttaagataatcagggaacacaagggggaaatttccgtaaactccaaagaaggggaagggacggattttgaaatattgttgcctgttattcaaaaaacagttaatatgatagagtataacgacggagtaaaagatgaagtttcgcctcctggtaattga

SEQ ID NO: 54850 - protein, 362 aa, Unknown
  Obtained from environmental sample
  DOMAIN (122)...(193): His Kinase A (phosphoacceptor) domain
  misc_feature (1)..(362): Xaa is any amino acid
METVMDSMDVGILVCGAKNNLVMANKFAQRLFPMTLNEGVELWEALKDEEIADFFKNILLNREKINGYEMNIDQNERRKLLSINVVPLVQDKRVTGSLIYIEDITEKRKGEARLRRAENLASLTTLAAGVAHEIKNPLGSISIHLQLLQKAFAKKIKTFDAKIEKYFNVLKEEVNRLNLIVVDFLFAVRPMTLDLREGDINKLISQLIEFVRYELERAKILCLLELEENLPFILFDERYMKQALLNLVKNAQAAMPKGGVLTIATSRIDNDIRILFSDTGVGISEKNLSKIXEPYFTTNEAGTGLGLTQVFKIIREHKGEISVNSKEGEGTDFEILLPVIQKTVNMIEYNDGVKDEVSPPGN

SEQ ID NO: 54851 - DNA, 981 bp, Unknown
  Obtained from environmental sample
  misc_feature (1)..(981): n is a, c, g, or t
atggaagatgatcccaagttaagcaaactttcttcttctttacagtcccttgaagaaggtttaagcgatttatggctgacggacacagccgccgcagaaaagaatgttcttgaaaagcagtgtaattcccttttaaaaataacccaaacccttattgaagacggaatcggaagcacaatacctattgaccacataagaagggcggcgtactggtgcaggctggccccaagcggaaaacgaaaaacccttattatagaaaacgccgaaaacatgagggacgaggcgcgtaattcgctcttaaaacttcttgaagagcctccggagacagtcagcattgtgcttacgtcgcaaaggcgcgaggctataatgcctacgattttgtcgcgcctgcgcccgtaccgctttctaaaaaggagcgcggaaggcgaaaaagaggtaatccgcagggtttttcaggatgctgtaaaagaggactcctctcttgcgtccgcgggatctcttgtaagcgcgtatcttgagtccttccttcccggcggagccgataaattgtatccgcttgcggcgtggtttatcgtttcactggcgcgcgccgttacggctttggctaaaaggaacggaacggaaacggcgcggcttattaccgcgcttggacagcgttacgcgccaatcgccaatgatgcgggttttgaacgcacgacagacgccgccttaattgttaaaacgcttatggaaaaaagttccaatttcgagaacgattcaatcccgcgtttttttgaaatttgccttgacatggtctgcgccgcggcgcgtgataacgatgagcctcagtttatcgcttacagggatattttcagaaagcgcgtaaacgaaacggaaaccgccgtaaatacgctgaatatcagcgcggctctcgctctggaagggcttttttacagtttgaaacaggatatggcaaagccgtacagggaaatttatggttaa

SEQ ID NO: 54852 - protein, 326 aa, Unknown
  Obtained from environmental sample
  misc_feature (1)..(326): Xaa is any amino acid
MEDDPKLSKLSSSLQSLEEGLSDLWLTDTAAAEKNVLEKQCNSLLKITQTLIEDGIGSTIPIDHIRRAAYWCRLAPSGKRKTLIIENAENMRDEARNSLLKLLEEPPETVSIVLTSQRREAIMPTILSRLRPYRFLKRSAEGEKEVIRRVFQDAVKEDSSLASAGSLVSAYLESFLPGGADKLYPLAAWFIVSLARAVTALAKRNGTETARLITALGQRYAPIANDAGFERTTDAALIVKTLMEKSSNFENDSIPRFFEICLDMVCAAARDNDEPQFIAYRDIFRKRVNETETAVNTLNISAALALEGLFYSLKQDMAKPYREIYG

SEQ ID NO: 54853 - DNA, 1410 bp, Unknown
  Obtained from environmental sample
  misc_feature (1)..(1410): n is a, c, g, or t
ttgaaaactaaatgcaatccggtaacaaaaacggctaagcctctgtgggcggggcggcttgcggaagttccgcaggcggaggcttttgcttttcaggcgtcaatcaatgttgacagccgtcttgtcttcgacgacattgcggggagtaaagcccacgccgctatgctcggtaaacagggaattatcacaaaggacagcgcggggaaaattgtaaaagaacttaacgctattgcaagcgaaattaaagtgggcaaattgacgatagatacaacgcatgaggatgttcattcatttttggaagcggttttaacggaacgtctcggcgatacgggcaaaatggttcacgcgggacgaagcagaaacgatcaggtggcggtcgctttccgcctgtacctgaaacgtacagtgccgcaattacaaaatgaattggctgcgcttgttaatgttcttcttgatacggcgttgtctcatgtaaacagcataatgcccggttacacgcatcttcaaagggcgcagcctgtgacgcttggacatcacctaacggcatggtgcgccgcactggaaagggattattcccgctttagcgacgctcttaaaagatttgacgagtgtcctttgggaagcggagcgttagccgccactaccctgccgctggatcgcaagactgttgcgcaggatttgggtttcagcagattatgcgtcaattcaatggacgccgtggcggatcgtgattttgttttggaactttcaagcgcctgcgctgttactatggttcatttatcgcgtttttgcgaggacgtggttctgtgggcaagcgaagaatttaaatttatcgatcttgccgaatcgtggagtacgggttcttcaatcatgcctcagaaaaaaaatcccgactttgcggagcttatccgtggaaagacaggacgaacaacgggcaaccttgtcgctcttttcactctgttaaagggactgccctatgcgtataacaaagatttacaggaagataaagaaaatcttttcgacagcatcgacacattgaacgcctgccttcgtatgtttacgggaatgattaaaagcgctcaatttaacattaagcgaatgaaagcggcttgcacaggcggctttttggaagcgacagacacggcggaatatcttgtccgcaaggggcttcctttccgagccgcccacgaaaccgccgcttctttggtgcgtgattgtatcgaggcgggacataagcatattggcgcgttaacgcttgagcagttaaaaaaacgctccaaactttttgagaacgatatttacaaactgataacgccgtcagcctgcgtaaaagcgagagatatagcggggggacccgctcccaaagaagtccgcaggcagataanattgttacgcaaaaaaatcaattaa

SEQ ID NO: 54854 - protein, 469 aa, Unknown
  Obtained from environmental sample
  DOMAIN (18)...(312): Lyase
  misc_feature (1)..(469): Xaa is any amino acid
MKTKCNPVTKTAKPLWAGRLAEVPQAEAFAFQASINVDSRLVFDDIAGSKAHAAMLGKQGIITKDSAGKIVKELNAIASEIKVGKLTIDTTHEDVHSFLEAVLTERLGDTGKMVHAGRSRNDQVAVAFRLYLKRTVPQLQNELAALVNVLLDTALSHVNSIMPGYTHLQRAQPVTLGHHLTAWCAALERDYSRFSDALKRFDECPLGSGALAATTLPLDRKTVAQDLGFSRLCVNSMDAVADRDFVLELSSACAVTMVHLSRFCEDVVLWASEEFKFIDLAESWSTGSSIMPQKKNPDFAELIRGKTGRTTGNLVALFTLLKGLPYAYNKDLQEDKENLFDSIDTLNACLRMFTGMIKSAQFNIKRMKAACTGGFLEATDTAEYLVRKGLPFRAAHETAASLVRDCIEAGHKHIGALTLEQLKKRSKLFENDIYKLITPSACVKARDIAGGPAPKEVRRQIXLLRKKIN

SEQ ID NO: 54855 - DNA, 891 bp, Unknown
  Obtained from environmental sample
  misc_feature (1)..(891): n is a, c, g, or t
atgagcgaaaaagagaaatttataacgcttatagaaaattttatcgcgcttgcggctgtcaggctaagcgacgacgttatggcgcggctggaagaaatgcgtaaagccgaagactccccccttcaaaaatcaatctatgacagttattttgaaaatctggcgttagctgtaaaacttaaccgcccctgttgtcaagacacaggcatgcttcagttttttgtaaaggcgggtactgctttccctcatttagacattacatctgaagcgataaccgaagcggtgcgcagggcgaccgtaagcgttccattaaggccgaacgctgtcaactattttgatgaaaacaatacaggcgacaacacgggagagcgttccccatggatagactgggaaattattcccggctcaaaagaaatggaaataactctgtacttttccggcgcgggatgcagtcttccggcgcaggcaaaagtttttaagccgtcggacggacttgaggcgattattccctttgtgtacgacattgtgtcagggccgggaatcaacgcctgccctcccctgcttgtgggaataggacttgggcataacatagaaaacgcatcgatgctttccaaaaaggcgattttaagaccattggggacaaaacacccgcatccaaaaggagcggaacttgaaaaacagctaacagacggtcttaatagtcttggcatgggcgctcaaggattaagaggcaatcaggctgtaatgggagtgcatattgaatcgtcagctaggcacaccgcgacaagggcgtgcgctgtaaatgtttcatgttatacgctaagacgaggaaaaatctgtattaaagaaaatctttcttgtgagctgactggttttaagggagcgaaaatttga

SEQ ID NO: 54856 - protein, 296 aa, Unknown
  Obtained from environmental sample
  DOMAIN (7)...(280): Fumarate hydratase (Fumerase)
  misc_feature (1)..(296): Xaa is any amino acid
MSEKEKFITLIENFIALAAVRLSDDVMARLEEMRKAEDSPLQKSIYDSYFENLALAVKLNRPCCQDTGMLQFFVKAGTAFPHLDITSEAITEAVRRATVSVPLRPNAVNYFDENNTGDNTGERSPWIDWEIIPGSKEMEITLYFSGAGCSLPAQAKVFKPSDGLEAIIPFVYDIVSGPGINACPPLLVGIGLGHNIENASMLSKKAILRPLGTKHPHPKGAELEKQLTDGLNSLGMGAQGLRGNQAVMGVHIESSARHTATRACAVNVSCYTLRRGKICIKENLSCELTGFKGAKI

SEQ ID NO: 54857 - DNA, 564 bp, Unknown
  Obtained from environmental sample
  misc_feature (1)..(564): n is a, c, g, or t
ttgaacacgattaatttgcctttgactgccgatgacattctcaagtttcatatcggcgatgtaatttatctttcgggtacaatcgtaacgggaagggacgaggtttatcacagagtggtagaagaaaatattatgccgcctgttgccttaaacggaatggcgatttatcacgcaggacctatcgtaaaaaagacggggcaaaatcacgagcttatttcgataggaccgactacatctatgcgtatggaaaaatgggcggcggattttataaaaaaaacgggcgtaaaagtgatgattggcaagggcggtatgggagagaaaacggcgtccgcctgccgtgagttaggcgcaattcactgtgtttatccgggcggctgcgctgtgttaggcgctagtcaaatagagagcatcgaaaattgccactgggaagaatttggtatggctgaatgcctttgggtgatgaagactgcggtgtttggtccgctgattgtcagcattgatgcgcatggggggaatctttttgcggagaatgctttggtttatgcggagaggaaggggagataa

SEQ ID NO: 54858 - protein, 187 aa, Unknown
  Obtained from environmental sample
  DOMAIN (1)...(180): Fumarase C-terminus
  misc_feature (1)..(187): Xaa is any amino acid
MNTINLPLTADDILKFHIGDVIYLSGTIVTGRDEVYHRVVEENIMPPVALNGMAIYHAGPIVKKTGQNHELISIGPTTSMRMEKWAADFIKKTGVKVMIGKGGMGEKTASACRELGAIHCVYPGGCAVLGASQIESIENCHWEEFGMAECLWVMKTAVFGPLIVSIDAHGGNLFAENALVYAERKGR

SEQ ID NO: 54859 - DNA, 411 bp, Unknown
  Obtained from environmental sample
  misc_feature (1)..(411): n is a, c, g, or t
gtgccgagcacacccatttgggtaacgcgcgcccttgggtcgccgccgcccttattgctgctgacgccgccgctattggacggctttatttttctctcctctgaaggctctttaggctttacaagattcgctacccgttcatctctagaactctcacgcgttgttccggaaccgctcccgccgcccattaatccgcctaacaagtcgtctacccctccgcctccgccgccgaatccggatccgtatcctgccccgtatcctattccggccacgcctttgcgcccagctccgccgtcgccgccggacttgagaccgccaacaccggaaagaacggcgtctatatcggaaccgctgcggctgtattgggacttgaaatcgacatcgaatcccataccggtcacgccgctgtag

SEQ ID NO: 54860 - protein, 136 aa, Unknown
  Obtained from environmental sample
  misc_feature (1)..(136): Xaa is any amino acid
MPSTPIWVTRALGSPPPLLLLTPPLLDGFIFLSSEGSLGFTRFATRSSLELSRVVPEPLPPPINPPNKSSTPPPPPPNPDPYPAPYPIPATPLRPAPPSPPDLRPPTPERTASISEPLRLYWDLKSTSNPIPVTPL

SEQ ID NO: 54861 - DNA, 2250 bp, Unknown
  Obtained from environmental sample
  misc_feature (1)..(2250): n is a, c, g, or t
atgttggacagggcggcggcgtatggagtaaaaactgtttcaatttgcgatttgaataatctttatagggtgcatacttttcttgaggaggcgaaagaaaggaggattaagccgattatcggagcgggtttgacaaataaaaaagaaaaaataaaaaataaaaaagaaaagggggttatttattgctttgttgaaaacagggcggggtttgggcggttgtgtgaaattttgacgatacggaataaagatgagggaaaatttgatccgcttccgttgttatgtgaacaatctgcgggattggttttggcttcctctgatgaaaaagttttagaaagtttgtcaggaagggtgaagcggttgtatgccgctattactcctacggatattagggcggtaaatatcggtaaaaagctgaatattccgcttgcctttattgatgattctgtttttttggaacacgaggattatgccgttcacgaagtgttacgtgccatttcgcttttaaagaccgtgggtaatttggaagagggtgacacggcggagcgggggagggttttttgcaattcaaaagaactccaccgcaaattgattacatggccgcaagcggttaagggtactgaagaaatagcggccttttgtgcttttgacaatttatttgacggttgggtttttcctgcttataaaactgcgagtttgtccgagacaactgcgcaatctgtgattgcacagctacctcagacagtgttgccgtccgtagccgatgaattacggaggcgggtttatgcgggtaatgctgagcgttacggagaattgggagacagggaaattggacggattgattatgaattgggcgtgattgaaaaaatggggtttccttcctatttcttgattattgacgatattgtaaaaatggcttcaagaacatgcggtcgcggttcgggggcggcttcgattgtttcttacggtttgggtattaccaatgtggacccgttacgccataacctgtactttgagaggtttctaaaccctaaccgtcctgatccgcccgatcttgatattgatttcgcgtgggatgaaagggatgatttgataaaggcggtaattgaaaaattcggttctgattactgcgcccgtgtcgccaaccataatatgttccgttacagatcggcaatgcgggagacggcgaaggcttatggttttggcgatgcggaaattacacagattgaaagacggctttttcaaatgggagataagtctgtttcaatagaaccggtatggcgggaaatttttaccatcgcgaaaaagattgaaggtctgccccgtggtttgggtatgcactgcggggggcttgtcattacgccggaaccgatttgccgttatgcgccaatagaaaaatccgccgaggggtttccgcttttggcgtgggaaaaggagggaacggaagcggcggggtttgtgaaaatagaccttttgggcaataggagtttggcggttattagggatagtgttataaatataaaatataaaataagaaataataaatacggaataaaaaataatgaatatcagataacagatgatgggggagattgtgatattgaggggaggttgagtagggcgataaatgatagggaaacgattgaggcgttatctaggggggacagtatgggggttttctatattgaaagccctgcgatgagacagttacagaaaaaaacaagatgtggggattttgagcatattgtaattcacagttcgattatccgtcctgcggcgaataaatttattgcggaatatgtacggcggcttaaaggcggaaaatggaaaccgttgcacccgttacttgaaaatatacttgatgagacttacggtattttgtgctatcaggaagatgtgtcaaaaacggctatcgcgcttgccggatttaatgaggctgatgccgataaactgcgaaaagtaatcgctaagaaaatgggtggggcaaggcttgcggtatacaaaaatcagttttttgacggttgccgaaaaaacggcgttagtgaggaaacaatactgaagatatgggaaatgatgttgagttttgacggatattctttttgtaaaccgcatagcgcaagttacgcaatggtttcttttcaatccgcctacttaagggtgcattacccggcggaattcatggcggctgttttgtccaatcaaggagggtttatcgtcctcatgcctaatgcgggaatcaggctctcgccataa

SEQ ID NO: 54862 - protein, 749 aa, Unknown
  Obtained from environmental sample
  DOMAIN (184)...(678): Bacterial DNA polymerase III alpha subunit
  misc_feature (1)..(749): Xaa is any amino acid
MLDRAAAYGVKTVSICDLNNLYRVHTFLEEAKERRIKPIIGAGLTNKKEKIKNKKEKGVIYCFVENRAGFGRLCEILTIRNKDEGKFDPLPLLCEQSAGLVLASSDEKVLESLSGRVKRLYAAITPTDIRAVNIGKKLNIPLAFIDDSVFLEHEDYAVHEVLRAISLLKTVGNLEEGDTAERGRVFCNSKELHRKLITWPQAVKGTEEIAAFCAFDNLFDGWVFPAYKTASLSETTAQSVIAQLPQTVLPSVADELRRRVYAGNAERYGELGDREIGRIDYELGVIEKMGFPSYFLIIDDIVKMASRTCGRGSGAASIVSYGLGITNVDPLRHNLYFERFLNPNRPDPPDLDIDFAWDERDDLIKAVIEKFGSDYCARVANHNMFRYRSAMRETAKAYGFGDAEITQIERRLFQMGDKSVSIEPVWREIFTIAKKIEGLPRGLGMHCGGLVITPEPICRYAPIEKSAEGFPLLAWEKEGTEAAGFVKIDLLGNRSLAVIRDSVINIKYKIRNNKYGIKNNEYQITDDGGDCDIEGRLSRAINDRETIEALSRGDSMGVFYIESPAMRQLQKKTRCGDFEHIVIHSSIIRPAANKFIAEYVRRLKGGKWKPLHPLLENILDETYGILCYQEDVSKTAIALAGFNEADADKLRKVIAKKMGGARLAVYKNQFFDGCRKNGVSEETILKIWEMMLSFDGYSFCKPHSASYAMVSFQSAYLRVHYPAEFMAAVLSNQGGFIVLMPNAGIRLSP

SEQ ID NO: 54863 - DNA, 690 bp, Unknown
  Obtained from environmental sample
  misc_feature (1)..(690): n is a, c, g, or t
atggattatgtatttgaaaaacaaactttttcatgcgtgccgttagatgaacgcccgcgggaaaaactaaaaacacgcggacccgccgccctttccgacatggaattgctggcaatcctcttaaataccgggattcagggtaaaaatgtaatcaaggttgcaaaagatctattgggtcttttggacggaaacaaggaaatcccttccatacaggatatttcaggggtaaccggaatagggctctccaaagcctgcgccgtctccgcaatgctggagttcggcagaaggcggttcggcccattctcggcatgcattaaaaagccttccgatatttttacccaggtacggcattttgccgaccgcaagcaggagaggtttatcagcctttcgctgaacggcgctcacgaagtacttgcggtgcgggttgttaccatcggacttgtaaacaaaacaatcgtccacccgcgcgaagtatttgccgacttgattcaggacagggcggcggctttttgcgttgcgcataaccacccgtcgggacagcttgcaagctcccccgaagacgacgatataacggatcggcttcaagacgcggcgaaaattctgggacttcactttgtagaccacattattttttcgcagactgcgtggtggagttttagggagaacggaaaattgacagacgggtattga

SEQ ID NO: 54864 - protein, 229 aa, Unknown
  Obtained from environmental sample
  DOMAIN (102)...(225): RadC, DNA repair protein
  misc_feature (1)..(229): Xaa is any amino acid
MDYVFEKQTFSCVPLDERPREKLKTRGPAALSDMELLAILLNTGIQGKNVIKVAKDLLGLLDGNKEIPSIQDISGVTGIGLSKACAVSAMLEFGRRRFGPFSACIKKPSDIFTQVRHFADRKQERFISLSLNGAHEVLAVRVVTIGLVNKTIVHPREVFADLIQDRAAAFCVAHNHPSGQLASSPEDDDITDRLQDAAKILGLHFVDHIIFSQTAWWSFRENGKLTDGY

SEQ ID NO: 54865 - DNA, 615 bp, Unknown
  Obtained from environmental sample
  misc_feature (1)..(615): n is a, c, g, or t
ttgatggcaaccaccggaaaagaactggaaagcaccgttgcccggcttgccgcgatgagccgcgccgttggaatacacctggtgctggctacccagcgcccttcaattgacataatcaccgggcttattaaggcaaacataccaagccgcatcgcttttatggtagccagtaaaatggacagccggatcatcatcgatatggtgggagcggaaaaacttttaggaaagggagatatgctttatgcgggagcgatagatccgttccccgtccgaatgcagggcgcttttgtctcggaagaagaagtcgagcgggttgtcgattatgttaagagccttggtgaaccggattacatcgacgatgaaattttttacgacgaggaagaggaaaatgccgatcagtctctgttttccgaaggcgatgatccgctttatgaaaaagccctggaaattgtcatgcagcagggaaaagcaagcgcaagttatatccagcggcggcttaaaatcggctataacagggcagcgcgactggtcgaggtaatggagcatcacggggttgttgggccggcacaaggatccaagccaagggaacttctgcgcggcacagcgataaattaa

SEQ ID NO: 54866 - protein, 204 aa, Unknown
  Obtained from environmental sample
  misc_feature (1)..(204): Xaa is any amino acid
MMATTGKELESTVARLAAMSRAVGIHLVLATQRPSIDIITGLIKANIPSRIAFMVASKMDSRIIIDMVGAEKLLGKGDMLYAGAIDPFPVRMQGAFVSEEEVERVVDYVKSLGEPDYIDDEIFYDEEEENADQSLFSEGDDPLYEKALEIVMQQGKASASYIQRRLKIGYNRAARLVEVMEHHGVVGPAQGSKPRELLRGTAIN

SEQ ID NO: 54867 - DNA, 807 bp, Unknown
  Obtained from environmental sample
  misc_feature (1)..(807): n is a, c, g, or t
gtggaaaagaggagcctctcctactatgttccggtcgaaaaaatactaaagcaataccccgacggagaatactggatcattgatgaggaaacccgcaatgcggcagttacactaaaagaaacattcaaggaatttaacatacaggttgaggttacaggcattcgcaaagggcctgtaatcaccatgttcgaaattctcccggcgcccggtataagactggccagaatagaaagcctggcagacaatattgccttgcgcctggcagctcaatccgtgcgcatcgtcgcgccaattcccggcaagcacgccgtgggcatagaggtcccgaacgcgaaacgaaacatcgtttcgttcagagagattatcgaaggggaattaagcaaagacggaaaaaaggcggaagttcccattgtgctgggtaaggacattaccggagaggcggttacggttgacctcgtacagatgccgcatctactgatagcgggagccacaggagcgggaaaatccgtgtgcgtaaattccatgatcctgacgctcttgtatcaaaagtccccggcggagtgcaggcttatcctgatcgatccaaagatcgtggaattaaaactttacaacgacattcctcatcttcttacgcctgtgattacagaacctaaaaaagctttccaggccctgcaatactgcatttatgaaatggaacggcgttatagctgccttgattcaatgggagtcagggacatcaggagctataacaagcgcatcgtggaaagggaaatcgctacggaatacatgccctatatagtggtgtaa

SEQ ID NO: 54868 - protein, 268 aa, Unknown
  Obtained from environmental sample
  DOMAIN (117)...(265): FtsK/SpoIIIE family
  misc_feature (1)..(268): Xaa is any amino acid
MEKRSLSYYVPVEKILKQYPDGEYWIIDEETRNAAVTLKETFKEFNIQVEVTGIRKGPVITMFEILPAPGIRLARIESLADNIALRLAAQSVRIVAPIPGKHAVGIEVPNAKRNIVSFREIIEGELSKDGKKAEVPIVLGKDITGEAVTVDLVQMPHLLIAGATGAGKSVCVNSMILTLLYQKSPAECRLILIDPKIVELKLYNDIPHLLTPVITEPKKAFQALQYCIYEMERRYSCLDSMGVRDIRSYNKRIVEREIATEYMPYIVV

SEQ ID NO: 54869 - DNA, 906 bp, Unknown
  Obtained from environmental sample
  misc_feature (1)..(906): n is a, c, g, or t
atgaaactggataaaataaccggggaagctatagaccaatggctagacgttatgattaaagagggcaagaaaaacagcacgaccaacggctattttggctcgctaaaaacaatgatgaaatgggctgttaagaaacggattatcgacagagacccattcctcgacgttgaaaaactgcttaacgaaaagaccgacaagaaaataatcacccctgacgaattcaaagccatgtttgtggacgactggaaaaaggtgtggggcaacgatttactgcggtgcaccgccaacaaagtagcggctcttaccgggatgaggtgctgtgaggtgctggggctgaggggcgaatttgtctatgacgaccatatttacctatgcgggcaatatgacgaatacggctaccgtgaaacaaaaaccaagattaaacaccatattccccttaccgccgaattggtaagggatttgagaaagctgatgaaggcaaacgggcaggggtttattttttcactggacggcggggctacgcctgttacccgtatgcacatattcaaaggcttaaaaaaagcgtttaacaatattggaataaccaatgaagaaatagacgaaagggggcttaacatccatgcgtggcggcatttctgcaataccgaactgcaaaagggcggccttacaatccagaaagtacaggcggttacagggcataagtcagaaaaaatgacggaacgctacacgcattttgacccgcttgatttcggggaagtgccaaaaatacaggcggcattgctgaaaagaaagcataaaaagccggaagccggcattggcgaagaggcgggaaaagaacgcccagcctttacccttgtaaagccgcaggaagatgacaaagccggacggaaaagaaaagcgtcctag

SEQ ID NO: 54870 - protein, 301 aa, Unknown
  Obtained from environmental sample
  DOMAIN (85)...(252): Phage integrase family
  misc_feature (1)..(301): Xaa is any amino acid
MKLDKITGEAIDQWLDVMIKEGKKNSTTNGYFGSLKTMMKWAVKKRIIDRDPFLDVEKLLNEKTDKKIITPDEFKAMFVDDWKKVWGNDLLRCTANKVAALTGMRCCEVLGLRGEFVYDDHIYLCGQYDEYGYRETKTKIKHHIPLTAELVRDLRKLMKANGQGFIFSLDGGATPVTRMHIFKGLKKAFNNIGITNEEIDERGLNIHAWRHFCNTELQKGGLTIQKVQAVTGHKSEKMTERYTHFDPLDFGEVPKIQAALLKRKHKKPEAGIGEEAGKERPAFTLVKPQEDDKAGRKRKAS

SEQ ID NO: 54871 - DNA, 528 bp, Unknown
  Obtained from environmental sample
  misc_feature (1)..(528): n is a, c, g, or t
ttgcaaacatcttcgcaaggagcaaatgcgcttactactaaagaaacaggagaggtcacggttttctttttgccatcgctctcccaactcgcgctcatgctcatagaatctttgccaacgggaattgcaattcccagcttggggcaaaagtccatgccaaccgctttcacagcttcgtataaggctgcgccttcgccttttgttgctgggtttgccatccagtttgcggagaggcgtattttggagatgtcgctgatttttgctgcggcaatgtttgttatggcttctgcaactgccatcctcgcggctgctccagagttcaaaagtgcaagcggggtgcgctcgccaatggaaaaagcctcgccagttatggaatccaatgtgcttgttgttacagcgcagtccgcaacgggaacctgccacttccctaccatctgctcccgcacaatcatacctgtaacggagcggtcgcctattgtgattagaaaacctttgtctgctactgctgggtgcgataaaactcgttga

SEQ ID NO: 54872 - protein, 175 aa, Unknown
  Obtained from environmental sample
  misc_feature (1)..(175): Xaa is any amino acid
MQTSSQGANALTTKETGEVTVFFLPSLSQLALMLIESLPTGIAIPSLGQKSMPTAFTASYKAAPSPFVAGFAIQFAERRILEMSLIFAAAMFVMASATAILAAAPEFKSASGVRSPMEKASPVMESNVLVVTAQSATGTCHFPTICSRTIIPVTERSPIVIRKPLSATAGCDKTR

SEQ ID NO: 54873 - DNA, 363 bp, Unknown
  Obtained from environmental sample
  misc_feature (1)..(363): n is a, c, g, or t
atgccgtatttggaaaaaaaatacggaataattatcagcccgtttatttttggtgttatttgggcgatttggcatattccattatggtttgtacccggttcaactcaagtttatatgaattttttcggctttattttaatgacaataggttattcatatatatttgaatggattataaaaatatccggcaagcgcttattatccggtcttgtatcacacggaaccgcaaatgctttttcggctctttttccgtttcttgttatggattcaaacgcaatacaaatacggttttggatttattgtatttttatattcataattggtataataatagttgtattaagaagttttagaaaaatatga

SEQ ID NO: 54874 - protein, 120 aa, Unknown
  Obtained from environmental sample
  misc_feature (1)..(120): Xaa is any amino acid
MPYLEKKYGIIISPFIFGVIWAIWHIPLWFVPGSTQVYMNFFGFILMTIGYSYIFEWIIKISGKRLLSGLVSHGTANAFSALFPFLVMDSNAIQIRFWIYCIFIFIIGIIIVVLRSFRKI

SEQ ID NO: 54875 - DNA, 861 bp, Unknown
  Obtained from environmental sample
  misc_feature (1)..(861): n is a, c, g, or t
atgatcatcaatcacaacctgagcgcaatgtttgcggacaggtccctcaaggtcacccaggtatccctggacaaaaacatggaaaaactttcctcgggtctgcgtattaatcgcgcgggcgatgatgcttccggcctggccgtatcagagaaactgcgggcgcagatccgcggcctcaacatggcctcgttcaacgccgcgaacggcatttcctttattcagaccgccgaaggttatctccaggaaacagaagatgttctgcagcggataagagagcttgccgtacagtcagccaacggcatctacaccgaggaagacagaatgtacatccagatcgaagtttccgctctcgtagccgaagttgaccggatcgcaagccatgcccagtttaacggcatgaacatgctcaccggacgtttcgccagggctacgggacagaatgtcccgacagcttccatgtggttccacatcggcgcgaacatcgatcagaggacacaggtgtacatcggcacaatgaccgctacaggacttggcatccgcgatgtcgccgacgcgagcatcatgagcttggcaaccccggaagaagccaacatgcgcatcagcacccttgacgaagccctgaaaatggtcaacaaacagagggctgatctcggcgcgtatcagaacaggcttgagcacgcgattcgcggcattgacatcggcgcggaaaacctccaggccgccgagtcaaggatccgtgacaccaacatggccaacgaaatggtcagctatgttacccaccagatacttacacagtccggcacagccatgctggcgcaggccaaccaaaggggcacttcggtattgcaactcttgcaataa

SEQ ID NO: 54876 - protein, 286 aa, Unknown
  Obtained from environmental sample
  DOMAIN (193)...(264): Bacterial flagellin C-terminus
  misc_feature (1)..(286): Xaa is any amino acid
MIINHNLSAMFADRSLKVTQVSLDKNMEKLSSGLRINRAGDDASGLAVSEKLRAQIRGLNMASFNAANGISFIQTAEGYLQETEDVLQRIRELAVQSANGIYTEEDRMYIQIEVSALVAEVDRIASHAQFNGMNMLTGRFARATGQNVPTASMWFHIGANIDQRTQVYIGTMTATGLGIRDVADASIMSLATPEEANMRISTLDEALKMVNKQRADLGAYQNRLEHAIRGIDIGAENLQAAESRIRDTNMANEMVSYVTHQILTQSGTAMLAQANQRGTSVLQLLQ

SEQ ID NO: 54877 - DNA, 636 bp, Unknown
  Obtained from environmental sample
  misc_feature (1)..(636): n is a, c, g, or t
gtgaattatttagcgtctattttaggagttaacatgaaaaaacatcttttttttaccgcattaattgttttatccacattggttgcgtgtgcgcaaaagaacagaacggctaataacacagaaattgaaaatcaaatacaggggaaaaacatgaaaaatattctaatagtgtatttttcctgtacaggtaacactcgctctttagcggagcaaatagcacaagcgtcaaaaggggaactatatgagataaaaccgaaaataccttattcctcagaagaccttaattggagaaacagctccagccgtaccaacaatgaaagaaatgacccgtcatcccgccccgccattttcgataatgtggaaaatatggaacaatacgatataatatttataggttatccaatctggtttggacaagcgccaaatatcatatacactttccttgaaacttatgatttttccggtaaaacaattgtacctttctgtacatccggaagcagcccaataggttcaagcgcgtccaatcttcacaagctttgttccaataatacaacatggctttccggttcccgttttgcgattaatacttcacgttcagaaattgtaaaatggataaatgggttgggattaggataa

SEQ ID NO: 54878 - protein, 211 aa, Unknown
  Obtained from environmental sample
  misc_feature (1)..(211): Xaa is any amino acid
MNYLASILGVNMKKHLFFTALIVLSTLVACAQKNRTANNTEIENQIQGKNMKNILIVYFSCTGNTRSLAEQIAQASKGELYEIKPKIPYSSEDLNWRNSSSRTNNERNDPSSRPAIFDNVENMEQYDIIFIGYPIWFGQAPNIIYTFLETYDFSGKTIVPFCTSGSSPIGSSASNLHKLCSNNTTWLSGSRFAINTSRSEIVKWINGLGLG

SEQ ID NO: 54879 - DNA, 351 bp, Unknown
  Obtained from environmental sample
  misc_feature (1)..(351): n is a, c, g, or t
atggcggaattcagaaccgagcgattggggcagcttatgcaggaaatgatcagcgctctggtcatggaaggtaaaataaaagaccccagagtttcgccatttgtttcgataacgcgggtaaatgtttcacgtgacctttcctttgccgatgtctatgtttccaatatccgcgagaacgccaacataaaacgcagtgccgaaggtctgcaaagcgccgccggatttatccagtcccaactgggaaatgttctccacatacgaaaaattccccgcctgcgttttcataccgataccagtattcgggaaggttttgatttagtgaaaaaaattgaacagttaggaaattgttaa

SEQ ID NO: 54880 - protein, 116 aa, Unknown
  Obtained from environmental sample
  DOMAIN (5)...(110): Ribosome-binding factor A
  misc_feature (1)..(116): Xaa is any amino acid
MAEFRTERLGQLMQEMISALVMEGKIKDPRVSPFVSITRVNVSRDLSFADVYVSNIRENANIKRSAEGLQSAAGFIQSQLGNVLHIRKIPRLRFHTDTSIREGFDLVKKIEQLGNC

SEQ ID NO: 54881 - DNA, 1044 bp, Unknown
  Obtained from environmental sample
  misc_feature (1)..(1044): n is a, c, g, or t
ttgatggccgagcgatctcagggcaatttccgccgcagtgccgaggggaagatactggaatcgagaatcgatcacgggcgcggcattgtcgccaccgtaattgtagaaaaaggtaccattgctgtcggcgattcatttgtcgcgggcatctggcccggcaaagtgcgagccatatttaacgacaagggtgaaaaacttggccacgcgactcctgccatgccggttgaggtacttggctttgaagggatccccaatgccggcgatcctctgcaagtggtaggggatgaaaaaattgcccgcgaatattcttccaaacgccaggaactaaaacgttttgaagacgcaaagaatttccgtaaggttactgttgacaatttgcgcgacatgataagcgacggaaccattcaggaactcaaggtgatcatcaaggctgacgtgcagggttccgccgaagcgctcaagagcagtctggaaaaactttccacgaaggaaattcgtctgcatgtcatacaggccctgcccggccccatcaacgaaggcgatgtcgatttggcaatcgcttcaaaggcgatcattatcggctttaacgtgcgcccgctgcccaaggccaaagtccttgccgatcaggaaaaggttgacatacgccggtataacattatttacaaggctgttgaagaaatccggcaggcaatggaagggatgctcaaacccgataccaaagaggagatcatcgcaacggtggaagtgcggaatacattcaaggtgccgaaagtgggaaccattgccggctgttatgtgcaaaccggcacggtaaagcgcagtgccagcgtcaatgtaatccgcgcggaaatagttatacattcgggtaaaattgcctcgctcaggcgttttaaggatgatgcccgcgaagtcgcggccggctacgagtgcggcatcgggcttgaaggttttgacgatatacaggtaggcgatcagtttgagataattgaaatggtagaggtagcccgaaaactgagtacgcccaataacagcgccgcggtataa

SEQ ID NO: 54882 - protein, 347 aa, Unknown
  Obtained from environmental sample
  DOMAIN (28)...(91): Elongation factor Tu domain 2
  misc_feature (1)..(347): Xaa is any amino acid
MMAERSQGNFRRSAEGKILESRIDHGRGIVATVIVEKGTIAVGDSFVAGIWPGKVRAIFNDKGEKLGHATPAMPVEVLGFEGIPNAGDPLQVVGDEKIAREYSSKRQELKRFEDAKNFRKVTVDNLRDMISDGTIQELKVIIKADVQGSAEALKSSLEKLSTKEIRLHVIQALPGPINEGDVDLAIASKAIIIGFNVRPLPKAKVLADQEKVDIRRYNIIYKAVEEIRQAMEGMLKPDTKEEIIATVEVRNTFKVPKVGTIAGCYVQTGTVKRSASVNVIRAEIVIHSGKIASLRRFKDDAREVAAGYECGIGLEGFDDIQVGDQFEIIEMVEVARKLSTPNNSAAV

SEQ ID NO: 54883 - DNA, 792 bp, Unknown
  Obtained from environmental sample
  misc_feature (1)..(792): n is a, c, g, or t
gtgtattttccgtttgcccggacttttctctacagtttctcccgtgtaaatttccggggtgaaattaccggcttcgtcggcttaaggaattttcgccggctctttggcgatcctgtttttatcacggttttaaaaaacaccctgaccctgactacggtcttcgtagtcctgaacctgcttttttcttttgcccttgccgtccttgccgcaaagaaacgaaagttcaggatgctatacgaaaccatgtttatgctgccgatggcggtttccatgccagcggcttcgcagatttttaaactgctccttgaaccgacattgggaatactcaattacaaactgggactcaacattggctggtttacggatccccataccgcgatttttggaattgtcatggtctgcctatggataggtatgccgtttgatttcctgctctttctttcggcgctgcgcaatataccttcttctctcatggacgcggctgatattgacggcgccggtttcgctcataatcttttccgtattcagatacctctggccgcgcctaccatcctcttcgttatctgtaccaacacggttcttgccatgatgacttccaccccggtgatgatcattacaggagggcagcccggttattccacggcaacccttatttacatgatgtacacttggggataccagtcttcgaattacagcctggcttcctgtatcagcatcgtgaccttcgcgctcaccttcggccttgttctcctggcgttttcctttgaacacaagaaggtgcactatcaatga

SEQ ID NO: 54884 - protein, 263 aa, Unknown
  Obtained from environmental sample
  DOMAIN (44)...(261): Binding-protein-dependent transport system inner membrane component
  misc_feature (1)..(263): Xaa is any amino acid
MYFPFARTFLYSFSRVNFRGEITGFVGLRNFRRLFGDPVFITVLKNTLTLTTVFVVLNLLFSFALAVLAAKKRKFRMLYETMFMLPMAVSMPAASQIFKLLLEPTLGILNYKLGLNIGWFTDPHTAIFGIVMVCLWIGMPFDFLLFLSALRNIPSSLMDAADIDGAGFAHNLFRIQIPLAAPTILFVICTNTVLAMMTSTPVMIITGGQPGYSTATLIYMMYTWGYQSSNYSLASCISIVTFALTFGLVLLAFSFEHKKVHYQ

SEQ ID NO: 54885 - DNA, 951 bp, Unknown
  Obtained from environmental sample
  misc_feature (1)..(951): n is a, c, g, or t
atgttgggactgaaccaggaagaaatagatcttgttgggaaaattgaagttttccttgattcaagcttccctgaagaaagcgccctggtaaagaacagatttgaatgtcttaacgctcttggagcggcaatctcccgatacccgtcggtacgggaaagccagacactgcgtggaatacaaagagacgaagcacagttgctgaatgctctttgttcgtttgcctctcccgcgcatctgctccacattcccacaagggtagtggccgcaaggagctacttggtcgcgaaataccagtttttctcacttctgcacataatggccggcgaccagcaggaattcatccttccccttcgcaaggttattctgacgataatccacaccctcatggccgaggaagtctatttttcctgccttgacgattccggattttcccaggaaataaaacttaatctggctaatgatcttattatgctatgggacagcggcactgatccccgcacggtcaggcacttgccgtcccttgatgccctttggactgcccgtgactcatccccgcccgctttcgggacaatgaatgcaacaagcgagcttcttcgaatatccatagatctggaagaagactggcatgatttcctgattgcaaatgtttcaataaaagaaacccgttgggctcttgaggaatttctttttggcctttcgtatgaagaaataaattcggtacgctcgcggctattaaaatttggcattactgctgtcagccgcgacgagattccttcctttctcggaagtcgtcccgcttacggaattataaacagctccgattaccgggcgatgtatgatttttatgttgaccgccgcgacgcggcacggctgcgccagaaactctctgttcctggccccaaccgtaccctggaagagatatacatcaaataccgcatagcccaggaataa

SEQ ID NO: 54886 - protein, 316 aa, Unknown
  Obtained from environmental sample
  misc_feature (1)..(316): Xaa is any amino acid
MLGLNQEEIDLVGKIEVFLDSSFPEESALVKNRFECLNALGAAISRYPSVRESQTLRGIQRDEAQLLNALCSFASPAHLLHIPTRVVAARSYLVAKYQFFSLLHIMAGDQQEFILPLRKVILTIIHTLMAEEVYFSCLDDSGFSQEIKLNLANDLIMLWDSGTDPRTVRHLPSLDALWTARDSSPPAFGTMNATSELLRISIDLEEDWHDFLIANVSIKETRWALEEFLFGLSYEEINSVRSRLLKFGITAVSRDEIPSFLGSRPAYGIINSSDYRAMYDFYVDRRDAARLRQKLSVPGPNRTLEEIYIKYRIAQE

SEQ ID NO: 54887 - DNA, 489 bp, Unknown
  Obtained from environmental sample
  misc_feature (1)..(489): n is a, c, g, or t
ttgaaacaaattataaaanggcccacatgggacgagtactttatggaagtctgcgaagccatctcaaagcgggcgacctgcgatcgtggcagatccggatgtgtaatcgcgaagggcaaccaactgcttgtcaccggttatgtgggcgctccggccgggcttcctcattgcgatgaagaaggccatcagtttaaaaaaatgctccatgaggatggctcggtaaccactcactgcgtgcggaccgtgcacgccgaacaaaacgcgatttgccaggccgctaagcgcggcatttctatcgaaagcgcgactttatattgtagaatgacgccgtgcagaacgtgcgccatgcttatcattaactgcggaataaaaagggtagtatgtcagagacgttatcacgacgctgacgattctgaggctatgtttaagcttgtcgggataaaactggaatatgtgtataatgaaactcagctatacaataatcaatga

SEQ ID NO: 54888 - protein, 162 aa, Unknown
  Obtained from environmental sample
  DOMAIN (8)...(130): Cytidine and deoxycytidylate deaminase zinc-binding region
  misc_feature (1)..(162): Xaa is any amino acid
MKQIIKXPTWDEYFMEVCEAISKRATCDRGRSGCVIAKGNQLLVTGYVGAPAGLPHCDEEGHQFKKMLHEDGSVTTHCVRTVHAEQNAICQAAKRGISIESATLYCRMTPCRTCAMLIINCGIKRVVCQRRYHDADDSEAMFKLVGIKLEYVYNETQLYNNQ

SEQ ID NO: 54889 - DNA, 627 bp, Unknown
  Obtained from environmental sample
  misc_feature (1)..(627): n is a, c, g, or t
ttgaacaaaagctccaccggccttgtcgccggcaataccgaaaccctcgttccaaccataacgcccgataacgctacaaacaagaacgttgtatggacaagtagcgaacccaatgtagccagggtatcaaatagcggcgttgttaccggaactggcgctggaacggcaactattaccgttaccactattgacggcaataaaactgccacttgtgctgttactgttacacttccagtacctgctatcccaacaaacgtatctgctgcatccggaaacagtatagtagttagctgggcctctgttccatgggctacgggttataaagtgtaccgaagcttaaacctttccaccaattacgtgttatgtcaaactgtatcgtcagcgccatttacagatacagggttatccgaggataccacatactattacaaggtttccgcttacaacagcacaggcgaaagcgctcaatcttcgtatgtttctgcaaccactccgccaccgctatcagatattcctacttttaacgatgttgaagcctttaaaatctggttaaacgctaaaggtgccaacaccaaagacaaaccttatttcgttatcttgaaacttagcagtttggaaagcctctaa

SEQ ID NO: 54890 - protein, 208 aa, Unknown
  Obtained from environmental sample
  DOMAIN (80)...(157): Fibronectin type III domain
  misc_feature (1)..(208): Xaa is any amino acid
MNKSSTGLVAGNTETLVPTITPDNATNKNVVWTSSEPNVARVSNSGVVTGTGAGTATITVTTIDGNKTATCAVTVTLPVPAIPTNVSAASGNSIVVSWASVPWATGYKVYRSLNLSTNYVLCQTVSSAPFTDTGLSEDTTYYYKVSAYNSTGESAQSSYVSATTPPPLSDIPTFNDVEAFKIWLNAKGANTKDKPYFVILKLSSLESL

SEQ ID NO: 54891 - DNA, 804 bp, Unknown
  Obtained from environmental sample
  misc_feature (1)..(804): n is a, c, g, or t
atgatgattgaagccgtcgagcgcggggttatagccacagacccaaccgccaaagtcgagcgtcttataaacgaccgcaacgaaattaagattatcactccccttgaattcaagaagctatttgtggtggattggcgcaaagcttgggaaggcaatttcatcgcctgtaccgtgaacaaactggcggctctgtcgggcatgagggtgtcggagattttggggcttaaagggagctgcctgttcgacgaccatatttacgtctgcatgcagcatgacatttacggctacaggccgaccaaaacgaaagacaggcataatataccccttcccgcttccctgattgccgatttgaaactgctcaaagaaacaagcggggacggctacctgttttccactaacggcgggggcagccccatatgcaggaaaactgttttgatgtatctgcgaaaggctttgataaatatcgggataaccgccgccgaaattaaagagcgcaatttgcatatccacgcatggcggcattttttcaatacagaaatgctaaagggcgggatgaccacagaacaggcgcaggcgataaccacgcacaaaagcgaaaggatgacggaacggtacacgcattttgacccgcttgaatttgtaaaggcgaaagaaattcaggaagctttgctgcagcctgtcggcgaaaaaccgcaagggctggaagcggaaaaaaaggaaatgccgctaaatgtgttttctttccctgcgtccggcactccgcaangagggactgaacagggcataaaactgtttggaacataa

SEQ ID NO: 54892 - protein, 267 aa, Unknown
  Obtained from environmental sample
  DOMAIN (42)...(215): Phage integrase family
  misc_feature (1)..(267): Xaa is any amino acid
MMIEAVERGVIATDPTAKVERLINDRNEIKIITPLEFKKLFVVDWRKAWEGNFIACTVNKLAALSGMRVSEILGLKGSCLFDDHIYVCMQHDIYGYRPTKTKDRHNIPLPASLIADLKLLKETSGDGYLFSTNGGGSPICRKTVLMYLRKALINIGITAAEIKERNLHIHAWRHFFNTEMLKGGMTTEQAQAITTHKSERMTERYTHFDPLEFVKAKEIQEALLQPVGEKPQGLEAEKKEMPLNVFSFPASGTPQXGTEQGIKLFGT

SEQ ID NO: 54893 - DNA, 2124 bp, Unknown
  Obtained from environmental sample
  misc_feature (1)..(2124): n is a, c, g, or t
atgctttttctacctggttcaattgcggtttctgatttccggctttcgcaatttccggttaaaggcataagcgcggaatatttgcacatagcagaaaccgaaagggatttaacagcagaagaattaaaaaaactggaaatattattagaatacggcgaggtaggggcacgggtaagggcgcgggtaagggcgcgattaatcgcgcccttactcgcgccccccgccgccacccaactcatcgtcgcgccacgtgctggcacaataagcccgtggagctcaaaagcaaccgatatactccacatttgcgggctgcacgctgttattcgcatagagagggcagtggtttggaattttgcccaagacctgccgccaaaagagatgctctttgacagaatgactcagcaaattttccagtcaaaagaggaactcgccgctctgttcgcgcacaaagaaccaaagcctttaaccagaatttccgatttggaaaaagccaattcagaactggggcttgccctctccgcagaggagataaattatttaaaggaaaaatttgccgagctgggacgtgagccaagcgatgttgaactgatgatgttcgcacaggcaaattccgagcattgccgccataaaatattcacgcacagtggggaaataaatggggaaaaacaggatttatccctatttcaaatgattaaaaatacctacaaatgctcaccagatggtattctaagcgcgtacaaagacaatgccgctgtgatggaaggttttgaagccgctcgtttttatgcagaacccaaaagcaatgaatatgcttggcacagagaacctgtgcatatcttgatgaaggtggaaacccacaaccacccaacggcaattagccccttcccgggtgctgcaactggaagcggcggcgaaataagagatgagggcgcaactggcataggttcaaaaccaaaggcaggcttgtgcggattctctgtttccaatttgaaaatacctggctatgttcagccttgggagcgtgactttggaaaacctagccgcatagaaagccctttgcaaataatgatagacggacctctcggagcggcggcatttaacaatgaatttggcagaccaaatatctgcggttattttagaacttatgagcaagaggtgaacggaaaaattcgcggctaccacaagcccataatgctcgcaggcggaataggcaacataaaagctcgccacgttcaaaaaggctctctcaaagaaggagatttgctaattgtgctgggcggtcctgctatgctcattgggttggggggaggggcggcaagttcaatggcaaccggaagcggcggcgaagatttggattttgcaagcgttcaacgcggcaacccagaaatgcagcggcgttgtcaagaggttatagaccgttgctgggcattggaagaaaaaaatcccatagcctttatccacgatgttggggcggggggtctttcaaatgcactccccgaattggtgaaagacgctggctttggtggcaaattccgtttgcgcgatattccaagcgaagaaaaaggaatgagcccactggaaatatggtgcaacgaagctcaggagcgttatgtgcttgcaatttccaaagaaagcctgcccacattcaaagaactatgcgaaagagaacgctgcccctttgccgtagcaggagaggccataacagaacagaatttaattttaagcgatgagcattttgaaaacaaccccatagatattccgattgaattgctgctcggcaacccaccgaagatgatacgtagagacaaagccgaaattagttctttctttgagcgattgagcgaagcgaacagcgaaaagaaagaagctaatgcaggcttagataatattgcaaccagagttctctcacaccccgctgtggcagacaaaggctttttaatcacaataggagaccgttccgtaaccggtatggttgttagggagcagatggttggtccttggcaggttcctgttgcggactgtgcggtaacaacaagcaccttggattccacaaaaggggaggcattttccattggggaacgcactccgctcgcctcgctaattcagcggctgtctcggccataa

SEQ ID NO: 54894 - protein, 707 aa, Unknown
  Obtained from environmental sample
  DOMAIN (228)...(407): AIR synthase related protein, N-terminal domain
  misc_feature (1)..(707): Xaa is any amino acid
MLFLPGSIAVSDFRLSQFPVKGISAEYLHIAETERDLTAEELKKLEILLEYGEVGARVRARVRARLIAPLLAPPAATQLIVAPRAGTISPWSSKATDILHICGLHAVIRIERAVVWNFAQDLPPKEMLFDRMTQQIFQSKEELAALFAHKEPKPLTRISDLEKANSELGLALSAEEINYLKEKFAELGREPSDVELMMFAQANSEHCRHKIFTHSGEINGEKQDLSLFQMIKNTYKCSPDGILSAYKDNAAVMEGFEAARFYAEPKSNEYAWHREPVHILMKVETHNHPTAISPFPGAATGSGGEIRDEGATGIGSKPKAGLCGFSVSNLKIPGYVQPWERDFGKPSRIESPLQIMIDGPLGAAAFNNEFGRPNICGYFRTYEQEVNGKIRGYHKPIMLAGGIGNIKARHVQKGSLKEGDLLIVLGGPAMLIGLGGGAASSMATGSGGEDLDFASVQRGNPEMQRRCQEVIDRCWALEEKNPIAFIHDVGAGGLSNALPELVKDAGFGGKFRLRDIPSEEKGMSPLEIWCNEAQERYVLAISKESLPTFKELCERERCPFAVAGEAITEQNLILSDEHFENNPIDIPIELLLGNPPKMIRRDKAEISSFFERLSEANSEKKEANAGLDNIATRVLSHPAVADKGFLITIGDRSVTGMVVREQMVGPWQVPVADCAVTTSTLDSTKGEAFSIGERTPLASLIQRLSRP

SEQ ID NO: 54895 - DNA, 477 bp, Unknown
  Obtained from environmental sample
  misc_feature (1)..(477): n is a, c, g, or t
gtgcgttccccaatggaaaatgcctccccttttgtggaatccaaggtgcttgttgttaccgcacagtccgcaacaggaacctgccaaggaccaaccatctgctccctaacaaccataccggttacggaacggtctcctattgtgattaaaaagcctttgtctgccacagcggggtgtgagagaactctggttgcaatattatctaagcctgcattagcttctttcttttcgctgttcgcttcgctcaatcgctcaaagaaagaactaatttcggctttgtctctacgtatcatcttcggtgggttgccgagcagcaattcaatcggaatatctatggggttgttttcaaaatgctcatcgcttaaaattaaattctgttctgttatggcctctcctgctacggcaaaggggcagcgttctctttcgcatagttctttgaatgtgggcaggctttctttggaaattgcaagcacataa

SEQ ID NO: 54896 - protein, 158 aa, Unknown
  Obtained from environmental sample
  misc_feature (1)..(158): Xaa is any amino acid
MRSPMENASPFVESKVLVVTAQSATGTCQGPTICSLTTIPVTERSPIVIKKPLSATAGCERTLVAILSKPALASFFSLFASLNRSKKELISALSLRIIFGGLPSSNSIGISMGLFSKCSSLKIKFCSVMASPATAKGQRSLSHSSLNVGRLSLEIAST

SEQ ID NO: 54897 - DNA, 645 bp, Unknown
  Obtained from environmental sample
  misc_feature (1)..(645): n is a, c, g, or t
atgaacgcaaacgaaatagcttgggtaagcggatgggcaagcgatatttctctttgggaaaatagcatttatgagcgtttctcaaatttcagccatcgttttgtggattattttgatttgctgcctaacccagacgaattacagggaatatgggaggctggcgtagttgtgggttggagcatggggacacttgcaattttgaggaatttgcataaaattaaaaaagaacaaaaactggttttgatttgcccaattgctgatttctgcgcagaaggttgctggcaaccctcagcccttagagccacaaagcaagggattttgcagaacacagagcaaactcttatgtctttttcttccttgatgggaaatgtggaaaaagaagagagggaaaaatgggtggaaaatgctatgcgttattctccaaaacaattggcaactgggcttgattatttaatgcaaaaaaaagcggatgtttctgggtcttattcaaatgtaaagttcgtatttggggggcaagacaaggttgtgcctcttgcgcaaaaagaattgttttcttcccataaggaattcattgttgtttgcgaaaattcaggtcactggctgccggattatttgaataatcatattattttgccaaaaatgtaa

SEQ ID NO: 54898 - protein, 214 aa, Unknown
  Obtained from environmental sample
  misc_feature (1)..(214): Xaa is any amino acid
MNANEIAWVSGWASDISLWENSIYERFSNFSHRFVDYFDLLPNPDELQGIWEAGVVVGWSMGTLAILRNLHKIKKEQKLVLICPIADFCAEGCWQPSALRATKQGILQNTEQTLMSFSSLMGNVEKEEREKWVENAMRYSPKQLATGLDYLMQKKADVSGSYSNVKFVFGGQDKVVPLAQKELFSSHKEFIVVCENSGHWLPDYLNNHIILPKM

SEQ ID NO: 54899 - DNA, 1716 bp, Unknown
  Obtained from environmental sample
  misc_feature (1)..(1716): n is a, c, g, or t
ttggatatattgctttctttggctggcggcataggtattttcctattgggaatgaaatttctctccgatggcttgcaaaccgttgcgggcgaccgcttgaaaacccttgtgggtatggctaccaataataggctctttggggtgggcattgggcttttggtaaccggcataatacaatccagctctgttacaactgttttggtggtgagctttgtggatggaggcttaatgacccttgctcaggcggttggggttattatgggcgcaaacataggaaccacggtaacagcttggattttaaccataaaaatagaccaatacgggcttcctatagcaggtatatctgccatagtgtatatattttgcaaaaaagaaaccgttaaatacatagcccttggatttttagggcttggttgcatatttttagggcttctctttatgaaagaagctgtgactccaattaaggaaaatccagacttcgttaaaatgttcaacatttttaacgccaacagctacctaggcattttaaaatgtgcagcactcggttgcattctaacgctcatagtacaatccagcagcgttacaattggcatcactatggtgcttgctagtcagggtttaatgaattttcacaccgctgccgctcttgttttgggcgaaaacgttggcacaaccataacggcaattttggcttctttggcggcaaacaacaatgctcgccgcgcagcttatttccactctctgtttaacttaataggtgtattctatataacgcttttgttccacccttttataggttttgtagaatgggagttaaacaccttctttggattaacacatttggacgaatccaaaaacgtcagttttgcaatagcggctgtgcattccacatttaatattttcaacactcttgtatttttagccccttgtagaattgtggcaaattttttggaaaatcccaaggttacaagatttttaacaaaaataaaactgcttcgcaaagaaacagagcaaccaccagaaataggagccttgctcacaatttcatacacccaccgagacacatcgtcttacactatgttttttgaaatggagcaccgtattcaaaaggttttgagttatatgggaaatcaattgaaaatgggaatagataatttgagcagttgtattgaaaatcccgaaaaaggttctcctgaagttgagcagatttttgaaatggaaaatcaatacgataaaataaaagccaaattgatgagtattttaacgagctttgttggtaacgaagaaacagcaacatctgccgtgcagcatagaattttcgcttatgaaaaaattttcgataatctggaaagcacttctgattatatcgcgcaagtggcaaaactaaggcttagggttttggataataaggtggactttttggattaccaaaaaaatgatttgctcaagctaaacacccttatctctcaggcttatggcaaactgcttccagttttgggaaccggacgcaggtataatcagcaaatgatagaagaacacgaaagggattttgccgaagtaaaagattttattcgttcaatgagggctacattctggagcgtgtctagtgggaatgtaactgaaccagtggttgatgatgcctattcaaatatgctttacgccttccgcaaaatccgcgaccatttgcgtagcacgggcaatgctgttttgggatag

SEQ ID NO: 54900 - protein, 571 aa, Unknown
  Obtained from environmental sample
  DOMAIN (13)...(170): Na+/Pi-cotransporter
  misc_feature (1)..(571): Xaa is any amino acid
MDILLSLAGGIGIFLLGMKFLSDGLQTVAGDRLKTLVGMATNNRLFGVGIGLLVTGIIQSSSVTTVLVVSFVDGGLMTLAQAVGVIMGANIGTTVTAWILTIKIDQYGLPIAGISAIVYIFCKKETVKYIALGFLGLGCIFLGLLFMKEAVTPIKENPDFVKMFNIFNANSYLGILKCAALGCILTLIVQSSSVTIGITMVLASQGLMNFHTAAALVLGENVGTTITAILASLAANNNARRAAYFHSLFNLIGVFYITLLFHPFIGFVEWELNTFFGLTHLDESKNVSFAIAAVHSTFNIFNTLVFLAPCRIVANFLENPKVTRFLTKIKLLRKETEQPPEIGALLTISYTHRDTSSYTMFFEMEHRIQKVLSYMGNQLKMGIDNLSSCIENPEKGSPEVEQIFEMENQYDKIKAKLMSILTSFVGNEETATSAVQHRIFAYEKIFDNLESTSDYIAQVAKLRLRVLDNKVDFLDYQKNDLLKLNTLISQAYGKLLPVLGTGRRYNQQMIEEHERDFAEVKDFIRSMRATFWSVSSGNVTEPVVDDAYSNMLYAFRKIRDHLRSTGNAVLG

SEQ ID NO: 54901 - DNA, 1200 bp, Unknown
  Obtained from environmental sample
  misc_feature (1)..(1200): n is a, c, g, or t
atgaagggcggctttttcgcgaaattgttccggttcggttcgcgcggcaaagatgtggatttggacgacgacttgccgcccgacgacgatctgtcgctcaacgatagtgtactcatcgccccgccgccgcctcctaccggacggctggcggcgacaaagacatccgactccggcgtcttcgagtttaagccgtcgacgagcgagccggtatctgaggcgagtgatgaacacgcgcccgtcggtacggtaccggaagtgaccgactcaggcgtcttcgagtttaagccgtcaacgagcgaaccggtatctgaggcgagtgatgaacccgcgcccgccggtacggtacctgaagtgaccgattccggcgtcttcgagttcaagccgtcagcaagcgaacccgtatccgaatcaagtgatgaatccgcgcccgtcagtacgatacctgaagtgaccgattccggcgttttcgagttcaagccgtcaacaagcgaacccgtatccgaatcaaatgacgaacccgcgcccgtcagtacgatacctgaagtgaccgattccggcgtctttgagttcaagccgtcaaccgccgaggccgcttctgaggcgactgatgaacccgcgcccgttagcacagtaccggaagtaaccgactccggcgtctttgagttaggccccgccgccgcggagcctcatccgcacggcgctcacaagggaagcggcgacgagtgggagatcggttgggagcctgagggcgacgggtcgtccgccgagtccggcgcgtcgggcgccgctgcggcatcggacgccccgccgccggtgttcacgcggttcgcgcacgtctgcttatatgtgaaagacctcgggcgggcggtcgaatttttacacaaactcgggcttccaaagcgtttcgttttcatagaaacgggagcgtcttcggcgcttaccttgagttcggtaacggcaacttcattgaactttttgaggatgtctcccgcagcgccgcagcggccctcggcaggctcgcccacttctgtttggagacgccggacatcgacgctgcaatggagtcgctctccgccagagggatcggcttctcgcccaagaaactggggagcgattccacgtatcagatatggcttaaagatcccgacgggaatgagtttgagattcatcaatacacggctgagagctcgcagattgtag

SEQ ID NO: 54902 - protein, 399 aa, Unknown
  Obtained from environmental sample
  misc_feature (1)..(399): Xaa is any amino acid
MKGGFFAKLFRFGSRGKDVDLDDDLPPDDDLSLNDSVLIAPPPPPTGRLAATKTSDSGVFEFKPSTSEPVSEASDEHAPVGTVPEVTDSGVFEFKPSTSEPVSEASDEPAPAGTVPEVTDSGVFEFKPSASEPVSESSDESAPVSTIPEVTDSGVFEFKPSTSEPVSESNDEPAPVSTIPEVTDSGVFEFKPSTAEAASEATDEPAPVSTVPEVTDSGVFELGPAAAEPHPHGAHKGSGDEWEIGWEPEGDGSSAESGASGAAAASDAPPPVFTRFAHVCLYVKDLGRAVEFLHKLGLPKRFVFIETGASSALTLSSVTATSLNFLRMSPAAPQRPSAGSPTSVWRRRTSTLQWSRSPPEGSASRPRNWGAIPRIRYGLKIPTGMSLRFINTRLRARRL

SEQ ID NO: 54903 - DNA, 1473 bp, Unknown
  Obtained from environmental sample
  misc_feature (1)..(1473): n is a, c, g, or t
atgaaataccaaactttcgccagaaccaccttagagggcggggagaaccataaaaaacataacaagccttgtcaggatcgttctttcagattttccggcgagggcatgcacatcgccgtggtcgccgacggccacggcagcgacaactgtttccgcagcgagtacggcgctcaattcgccgtgaacgccgccagaaaaggcatcaatgcttttatcaagagtcttcagggtaacgaactccccctggaagacaacttcgcgcggcaggtaaaaaaacttgtcggcactatcgtggacaactggatatacctcgttgccgagcattacaaacgctgccccattaccgaagaagacaaggactacattgtcgatggcaaaacagtgtgctttaaggggcttaacagttttcaggtggacaaaacctaccgcgacctctaccttcaggaagccgccggcggcagttccggcaaaggcggcctgcttgccgatgacgagcgccccgttacgcgccatgcctacggcgcgaccctcatcgccgccgccgtcaccgaggactactggttcggcatacaaatcggggacggaaaactcaccgccttttaccccgacggcagttttgaccagcccgttccctgggacgacaaatgctaccttaatgtaaccacgtccatctgcgacgacgacgcggcggaacgggccagggtgtatgtcaaaaagcgcagcggctgcgccgcccacatcgacgccataggggcgataaaaaagattgaagacagccgccccctgccctcggcggttttcctgaacagcgacggagtagacgacagcttccccatcgaagacaacatggatcacatggcaaagaagttttactactccgtactgcgaatgtttatagaggacgatgacgatcccgccaaaggctgggaagccgcggttcaagagcttgccgaataccttcccgacctcagcaaacgcggctccggtgacgacatctcggtagccggcatcattgacatggacgcggtaaaagccggacctttccgcgcagctctccaaaaagcaaaagcggaagccgaagaacgccgtgcaagggagaaggaagaaaaggaaaaagccctaaaagcggcggaagaagcaagggcgaaagcggcggaagaaaagaaagccagggaagcggaagccgcgaaaaaagcggaagaaaagaaagccgccgaaagcgccgccaaaggcggggctgactatagcgcgagggacggatcagcaaccggtacagcccaacgcgcaaggcccgtttccggcaaacaggtggccgtagaccccctggttcaggagaaggcgcaggagtttaaaaaggctcaggaggagatgaacaaagccagaaaggaatttgtggaagcaattcagttgagccgccggaagaacaccggcgaagacgacaccgacatcccttcaagcctcggccgattctga

SEQ ID NO: 54904 - protein, 490 aa, Unknown
  Obtained from environmental sample
  misc_feature (1)..(490): Xaa is any amino acid
MKYQTFARTTLEGGENHKKHNKPCQDRSFRFSGEGMHIAVVADGHGSDNCFRSEYGAQFAVNAARKGINAFIKSLQGNELPLEDNFARQVKKLVGTIVDNWIYLVAEHYKRCPITEEDKDYIVDGKTVCFKGLNSFQVDKTYRDLYLQEAAGGSSGKGGLLADDERPVTRHAYGATLIAAAVTEDYWFGIQIGDGKLTAFYPDGSFDQPVPWDDKCYLNVTTSICDDDAAERARVYVKKRSGCAAHIDAIGAIKKIEDSRPLPSAVFLNSDGVDDSFPIEDNMDHMAKKFYYSVLRMFIEDDDDPAKGWEAAVQELAEYLPDLSKRGSGDDISVAGIIDMDAVKAGPFRAALQKAKAEAEERRAREKEEKEKALKAAEEARAKAAEEKKAREAEAAKKAEEKKAAESAAKGGADYSARDGSATGTAQRARPVSGKQVAVDPLVQEKAQEFKKAQEEMNKARKEFVEAIQLSRRKNTGEDDTDIPSSLGRF

SEQ ID NO: 54905 - DNA, 789 bp, Unknown
  Obtained from environmental sample
  misc_feature (1)..(789): n is a, c, g, or t
atgggtttgaatgacgaagtagaagtatcaagaagagtgatggtcttgttttttctggtggacacatcgggaagcatgagcggctcaaagattggcgcggtcaaccacgccatagaggaagttgtcccggagataaaaagcatctccgtggggaacgcggacgcgcagatcaaaatcgcggtaatgaagtttgacaacagcatcgaatggattaccaaaaacgggcctgaggattcggaaacctttatctggcgcagcctggacgcaaacggcatgacctacatgggcgaagcttgcagacagcttgacaaaaaactctccaccaaagaaggcgggtttatgcgggaggcctccggctcttacgcgcccgcgatttttatgatgtccgacggccagccaaacgatgactttgacggagggctgagcgcgttaaaacaaaacaactggttcaaggcatcggtgaaggttgcaatagctatcggcgacgacgccgacaaggacgtgctcgcccagtttgtaggctccccggagggggtgattaccgcccacgacgccgccacattaaaaaaatggataaagttcgtcagcgtaaccgccagcaaggtagccagcaagagttccaacgccaaatccaacgcggacggaacccccgcgccggataacgccaaacaggacgaactgaacaaggccatagccggacaggcgcaagccacaggcgcggtcaaatcggctgacggcacaataaacgcgccgcccacatcctcggctcctcccgacgacgtatggtaa

SEQ ID NO: 54906 - protein, 262 aa, Unknown
  Obtained from environmental sample
  DOMAIN (16)...(192): von Willebrand factor type A domain
  misc_feature (1)..(262): Xaa is any amino acid
MGLNDEVEVSRRVMVLFFLVDTSGSMSGSKIGAVNHAIEEVVPEIKSISVGNADAQIKIAVMKFDNSIEWITKNGPEDSETFIWRSLDANGMTYMGEACRQLDKKLSTKEGGFMREASGSYAPAIFMMSDGQPNDDFDGGLSALKQNNWFKASVKVAIAIGDDADKDVLAQFVGSPEGVITAHDAATLKKWIKFVSVTASKVASKSSNAKSNADGTPAPDNAKQDELNKAIAGQAQATGAVKSADGTINAPPTSSAPPDDVW

SEQ ID NO: 54907 - DNA, 390 bp, Unknown
  Obtained from environmental sample
  misc_feature (1)..(390): n is a, c, g, or t
gtgcccatgaaaccgagtccgaaatttttaatctgcaaacatgncggaaacattgcggtcgccgtcgtcaacaagggggggccgatatcgtgttgcggtgaaaacatgagcgagctcgtacccaacacggtggacgccagcaaggaaaaacatcttccggccgttacctcctccggcggcagcataagcgttgacgtaggcagcgtagcccacccgatggaagaggcgcaccgcatcgaattcgtctacgtggaaaccgaacgcggcggccagcgcaaaaacctgaaagtcggcgagaaaccgtctttgacgttctccatcaccgacgacaaacccatagccgtttacgcgtactgcaatctccacgggctttggaagacggaggtctga

SEQ ID NO: 54908 - protein, 129 aa, Unknown
  Obtained from environmental sample
  DOMAIN (43)...(128): Desulfoferrodoxin
  misc_feature (1)..(129): Xaa is any amino acid
MPMKPSPKFLICKHXGNIAVAVVNKGGPISCCGENMSELVPNTVDASKEKHLPAVTSSGGSISVDVGSVAHPMEEAHRIEFVYVETERGGQRKNLKVGEKPSLTFSITDDKPIAVYAYCNLHGLWKTEV

SEQ ID NO: 54909 - DNA, 420 bp, Unknown
  Obtained from environmental sample
  misc_feature (1)..(420): n is a, c, g, or t
ttgcccctttttgttgcaccaatatttgtatttagggcaggcgaaccctgcccctacgtttatatttacaatctggtaaatcctgtgaatcggggttctgacaaaaaaattttactatattacccctatatgcctaaagattacgcaaaaagcaatcgcaagagcctggatatggagcaactgcaagatttgcggcttcctatgattatagaacttggctcaacaatggtaaccgtaagggatttgctaaattggcaaaaagattccataatagagctagacagagtggctggcgagaatgtggatttgcaaattaatggcaaaattatggcaaaaggcgaagttgtggttatgaacgaccatttggggttcaggcttgttacacttttaagcccagaagaaagactaaagagtctgtaa

SEQ ID NO: 54910 - protein, 139 aa, Unknown
  Obtained from environmental sample
  DOMAIN (57)...(133): Surface presentation of antigens (SPOA) protein
  misc_feature (1)..(139): Xaa is any amino acid
MPLFVAPIFVFRAGEPCPYVYIYNLVNPVNRGSDKKILLYYPYMPKDYAKSNRKSLDMEQLQDLRLPMIIELGSTMVTVRDLLNWQKDSIIELDRVAGENVDLQINGKIMAKGEVVVMNDHLGFRLVTLLSPEERLKSL

SEQ ID NO: 54911 - DNA, 1044 bp, Unknown
  Obtained from environmental sample
  misc_feature (1)..(1044): n is a, c, g, or t
atgataaggttagccaaacggcgtgtaaagtggcatattccacctcctgttatacacctgctcatttggctgtttttatatttagttcccatagtgatgggaaatcaggggagcgaagaagcttggcgctttcgttattggacaaccattccattttttgcaattataattgctttttatgcaaacttctcatttttaataccaaaatttctttttgaaaaaaaacgcgttttatacatattcataaatttgctcatatttgcagccgctcttctcttgattagtatatggagagaccacgttgtatctattggagttatgaaaataaaaaatgataattggcttctcaaaagtgttataagttatgtatttacaattggaatagcaatgtctgcctattcaactacaatgtggtttaagtctaaagatgcaatgtataaacttgaacttgaaaatataagttcggaattatcttttttgaaaatgcaaatatcaccgcattttttgttcaacacgctaaacaatattttaacgcttatagatgaaaacaaagaacttgcaaaagaatctgtgctacaactttcaaaactgctacgttccgtgctttatgaatctgaaaacgataccgtgacaataaagcaggagatagaatttttaacaaattattcaaatttaatgcggcttcgctatggttctgagttgaatttcagtttggaaacggatttacaagaaccagatgctcccattgcccctcttttgcttatgccattgtttgaaaatgttttcaaacacgggatatgcaattctgtgaaagatagttttatagacataaaaataagttctaaaaatggaaaaattatttatgaaagcacaaatacatattttccaaaaacgcctcaagataaaagcggcagcggcataggcattgccaatatgcaaaaaaggcttgacctgctttacgaagatcgtttttattacgattgcaaaattgatggggaaaactatataacaaaactagaattgcaatatgacccaagcaattga

SEQ ID NO: 54912 - protein, 347 aa, Unknown
  Obtained from environmental sample
  DOMAIN (156)...(238): Histidine kinase
  misc_feature (1)..(347): Xaa is any amino acid
MIRLAKRRVKWHIPPPVIHLLIWLFLYLVPIVMGNQGSEEAWRFRYWTTIPFFAIIIAFYANFSFLIPKFLFEKKRVLYIFINLLIFAAALLLISIWRDHVVSIGVMKIKNDNWLLKSVISYVFTIGIAMSAYSTTMWFKSKDAMYKLELENISSELSFLKMQISPHFLFNTLNNILTLIDENKELAKESVLQLSKLLRSVLYESENDTVTIKQEIEFLTNYSNLMRLRYGSELNFSLETDLQEPDAPIAPLLLMPLFENVFKHGICNSVKDSFIDIKISSKNGKIIYESTNTYFPKTPQDKSGSGIGIANMQKRLDLLYEDRFYYDCKIDGENYITKLELQYDPSN

SEQ ID NO: 54913 - DNA, 453 bp, Unknown
  Obtained from environmental sample
  misc_feature (1)..(453): n is a, c, g, or t
atgacccaagcaattgaaattctgggagctagggaacacaatcttaggggcatagatataaacctgcctcgcgattcctttgttgtgattaccggagttagcggctctggcaaaagcagcctcgcttttgataccatttttcaagaggggcagcgcagatatatagaatcactttcagcttatgcgcggcaatttataggtacaatgaaacgccccgatgtggaaagcataaagggaatttcgcccacaatttcaatagaccaaaaaaccataaacagaaaccctcgttcaacggtgggaacagtaattgagatttttgaccattaccgcttgttgtttgcacgccttggaaccccgcactgccccaaatgcagaaaagagataaaagcccaaaccaccgagcaaattgcagacaatattttattggagagagccagggcagccttgcggtaa

SEQ ID NO: 54914 - protein, 150 aa, Unknown
  Obtained from environmental sample
  misc_feature (1)..(150): Xaa is any amino acid
MTQAIEILGAREHNLRGIDINLPRDSFVVITGVSGSGKSSLAFDTIFQEGQRRYIESLSAYARQFIGTMKRPDVESIKGISPTISIDQKTINRNPRSTVGTVIEIFDHYRLLFARLGTPHCPKCRKEIKAQTTEQIADNILLERARAALR

SEQ ID NO: 54915 - DNA, 873 bp, Unknown
  Obtained from environmental sample
  misc_feature (1)..(873): n is a, c, g, or t
atgtcagcgataataatggacggaaaggcgcttggacaaaaaattcgtgagagcgcaaaaattagagcggcggcggtaaaggcaaaaggaattacgccgtgtcttgcagttgtgcttgtgggcgaagaccccgccagtctttcttatgtaaaatccaaggaaaaggcgttagctgaagcgggaatggaaagcagagatataagattgccgcaaactacaagcgaggcggaacttctttccctaataaacgaacttaacaaagataaaaaaatacacggcattcttgttcagtctcctgtgccgaaacacattgacgaggaaaaaataaacgccgccgtctctcccgaaaaagacgtagattgctttcatcctgtttcggttggaaatatgatacttggcagacccggatttttgccgtgtacgccgcacggtgttcttgtttttctgaaagagtataacgtacccgtctccggcgcaaatgttgtggtagtaggaagatcgaacatcgtggggaaaccgcttgcaaatcttttaatacgccgtgaatacaacgcaaccgtaacaatttgccacacaggcacaaaagaccttgcaagccatactttgcaggcggacattttaatagcggcggcagggaaagcggcatttataaaacctgaaatggtaaaagcaggagcaacagttattgacgtgggaataaaccgagtgcctgactcctcagccgaaaaaggctaccgagtttgcggcgatgtcgatccagccgtagcggaaaaagccgcatactttacgcccgtccctggcggcgtaggacttatgaccgtcgcaatgcttttgcaaaatgttgtagaagcggcggaaaggggtttgcaataa

SEQ ID NO: 54916 - protein, 290 aa, Unknown
  Obtained from environmental sample
  DOMAIN (4)...(120): Tetrahydrofolate dehydrogenase/cyclohydrolase, catalytic domain
  misc_feature (1)..(290): Xaa is any amino acid
MSAIIMDGKALGQKIRESAKIRAAAVKAKGITPCLAVVLVGEDPASLSYVKSKEKALAEAGMESRDIRLPQTTSEAELLSLINELNKDKKIHGILVQSPVPKHIDEEKINAAVSPEKDVDCFHPVSVGNMILGRPGFLPCTPHGVLVFLKEYNVPVSGANVVVVGRSNIVGKPLANLLIRREYNATVTICHTGTKDLASHTLQADILIAAAGKAAFIKPEMVKAGATVIDVGINRVPDSSAEKGYRVCGDVDPAVAEKAAYFTPVPGGVGLMTVAMLLQNVVEAAERGLQ

SEQ ID NO: 54917 - DNA, 879 bp, Unknown
  Obtained from environmental sample
  misc_feature (1)..(879): n is a, c, g, or t
gtgggcactacggttaagcttaactatacggttgcgaatacggcgcatgtcaatcaactggaattcgaaggcgttaccgccccgatcgattcggtagaaagcgacggatctggggagaaaacctacaccataagcgccgacgactccacaaacaacgttatcaccattatcgcagtctttaaccataccgatctgacagctgaccccatcgcctttaccacaaatgacaaaggacacataaccacaacttatggagaagcgtcgtttatcaacgctgttaaagcagggcaccaaggaaccggagcgataacctatcacagcaatactccaactgtcgccacggtgaacagttctgggcaggtaacaattctgaaagccgggtctgccgtcatttctgccgaaaaagcggctgacggaacatacgcctccgcccaaacaacctacacgctgacggtcaaccgcaagccggttaccataacaggcgtaaccgcaaatagcaaaacttacgacggcacaacagtggcgacacctagcggaaccgcggtagtcaatggaaaggtaggtagtgacgtggtaaccgtcactgcgggatcagctttgtttgtggacaaaaacgtaggtaccggcaagaccgttacattcagcgggtattctttgggcggcgcggacgcgggtaattacactctttcggcgcagccaaccgctacggcaaatattacagcgaagagcgttaccataaccggcctatccgtcagtaacaaaccttacgacggcaattcaacggcaactgttagcggaaccgcgacagtcaacggtaaggtgggtagtgatacggtaaccgtcaccgcgggatctgcttcgtttgcggataaaatgtag

SEQ ID NO: 54918 - protein, 292 aa, Unknown
  Obtained from environmental sample
  misc_feature (1)..(292): Xaa is any amino acid
MGTTVKLNYTVANTAHVNQLEFEGVTAPIDSVESDGSGEKTYTISADDSTNNVITIIAVFNHTDLTADPIAFTTNDKGHITTTYGEASFINAVKAGHQGTGAITYHSNTPTVATVNSSGQVTILKAGSAVISAEKAADGTYASAQTTYTLTVNRKPVTITGVTANSKTYDGTTVATPSGTAVVNGKVGSDVVTVTAGSALFVDKNVGTGKTVTFSGYSLGGADAGNYTLSAQPTATANITAKSVTITGLSVSNKPYDGNSTATVSGTATVNGKVGSDTVTVTAGSASFADKM

SEQ ID NO: 54919 - DNA, 981 bp, Unknown
  Obtained from environmental sample
  misc_feature (1)..(981): n is a, c, g, or t
gtgggcagtgaagatgtaaccgtcactgcgggaaccgcatcgtttgcgaacaagaatgttggaacaggaaaaacagtttcattcagcgggtattcgcttggcggagcggacgtgggtaattataccctttcgggacagccagcaagcgttacggcaaatatcacagcgaagtccgttaccataacagggctgtctgcaagcaacaaagtctatgacggcaattcaacggcaacggctaccggaacagcggcaatcagcggactggtgggcagtgataatgtaaccgtcattgcgggaaccgcatcgtttgcgaacaagaatgttggaacaggaaaaacagttacattcatcaattattcgcttggcagcacagacgcgggtaattacacccctgcacagcccgcaagcgttacggcaaatatcacacgcaagcccgttaccataacagggctgggagcggcgaataaaaattatgacggcaacacaacggcaacgattacgggaactgcaacactcaacggagtgatttcaggcgataatgtaaatgtcgtccttgggtctgcctcgtttgcgaacgcgacggttggcaacagcaagactgttacattcaacggctggtcattgattggcacggacgcgggtaattacagtctctcggcacagccagcaagcgtaacggcgaatataaccactaatacgaccggattaggccaactgtctgtaaattctatatcaagtactgaaattataattaaccccgtcttgattcttgataatccaggaaatcaggttgtggaatatgctatcagtacatcgactaccgtacctacaacacaatggaggacagcttctagtaattctactgttattttttacggattgagtgcaaatacgacatactatgtctatgcccgattacaggccaaaggcagttggagttctggacaggcagtaagtttgttggttataacgttacaatag

SEQ ID NO: 54920 - protein, 326 aa, Unknown
  Obtained from environmental sample
  misc_feature (1)..(326): Xaa is any amino acid
MGSEDVTVTAGTASFANKNVGTGKTVSFSGYSLGGADVGNYTLSGQPASVTANITAKSVTITGLSASNKVYDGNSTATATGTAAISGLVGSDNVTVIAGTASFANKNVGTGKTVTFINYSLGSTDAGNYTPAQPASVTANITRKPVTITGLGAANKNYDGNTTATITGTATLNGVISGDNVNVVLGSASFANATVGNSKTVTFNGWSLIGTDAGNYSLSAQPASVTANITTNTTGLGQLSVNSISSTEIIINPVLILDNPGNQVVEYAISTSTTVPTTQWRTASSNSTVIFYGLSANTTYYVYARLQAKGSWSSGQAVSLLVITLQ

SEQ ID NO: 54921 - DNA, 471 bp, Unknown
  Obtained from environmental sample
  misc_feature (1)..(471): n is a, c, g, or t
atgcaaaatgactctcttttgaaaaaagatttcagtgatgtgataaaattttntctggaagaacaagttcgttttctnttagtcggagggatttcaataaatctatacggttacgttcgtgctacaaaagatatggatttatggatagaggcaagcaaggaaaatgctctaaaagtttttaaagcattggcaaaattcggcgcacctatgcaagatatttcaccgcaggattttgaaaaagagggaatgatttttcaaataggcatagaccctattcgtatagacattataactacaatagctggcgtaaaatttgaagaagcgattcaaaataaaaagattatggaaatagacggcctaaacattcctacaatttccatacaagatttaataaaaaacaagaaagcaagcgggcggcataaagatttggcagatgcagaaattttggaaaaaatcttgcgagcgagttaa

SEQ ID NO: 54922 - protein, 156 aa, Unknown
  Obtained from environmental sample
  misc_feature (1)..(156): Xaa is any amino acid
MQNDSLLKKDFSDVIKFXLEEQVRFLLVGGISINLYGYVRATKDMDLWIEASKENALKVFKALAKFGAPMQDISPQDFEKEGMIFQIGIDPIRIDIITTIAGVKFEEAIQNKKIMEIDGLNIPTISIQDLIKNKKASGRHKDLADAEILEKILRAS

SEQ ID NO: 54923 - DNA, 420 bp, Unknown
  Obtained from environmental sample
  misc_feature (1)..(420): n is a, c, g, or t
atgagtttttatgaagtaatgaaaacagacaccgttaattattattgtctcttttctgaagccggtatagccgatcttaaaaccagaataagccggaaaaaccttgacgcgctcaaaagcgacatggaggatttattcaccaagccgctggaatcggttactgagaagaccaagcctgttccggacatagatcgccacgactatgtcagccttgcgacttacttctggcccgataaagacaatcctggcgggccctatgtatcgcgggacggttttgtgaacccggagggtgagttatatgacaaggataaactgaaacgcctggcttatctttcatatcacggagctttgttgtacctcattaccaatgaagagcgttacctcgatcttgtaaaaggcatctttacaactggtttgtag

SEQ ID NO: 54924 - protein, 139 aa, Unknown
  Obtained from environmental sample
  misc_feature (1)..(139): Xaa is any amino acid
MSFYEVMKTDTVNYYCLFSEAGIADLKTRISRKNLDALKSDMEDLFTKPLESVTEKTKPVPDIDRHDYVSLATYFWPDKDNPGGPYVSRDGFVNPEGELYDKDKLKRLAYLSYHGALLYLITNEERYLDLVKGIFTTGL

SEQ ID NO: 54925 - DNA, 519 bp, Unknown
  Obtained from environmental sample
  misc_feature (1)..(519): n is a, c, g, or t
ttgttgtttgagacagttgttccgaaacacatttcaatcgggctggggggcagtgaaacgcttgaggcaatggatgtattgacggttctgcggagcggggattatgaccttttcgatcgatacaactgcgctgaccattttgaggtgtgccgcgagagcctcatggcggaatattttttgaccggcgcaaatgccctgactatggacggcgaaatggtgaatctggattgttcaggcagccgtgtcgccgcaatggcctacgggccgcggcatgtggtggtggtagcaggcgcgaacaaactctgtgataccctggaggacgcgatagcgagggtgcgttctatcgccccaatgaactgcaagcgcaacaatcatcaaactccctgcgcccaggacggtgtttgtaccgattgcaatattcaggcgcgaatgtgcaatcatcttttaattacgtttaacgctcagaaattcgctggcagatttacgattattctggtgaatggggatttcggcttttag

SEQ ID NO: 54926 - protein, 172 aa, Unknown
  Obtained from environmental sample
  DOMAIN (2)...(172): Protein of unknown function (DUF1121)
  misc_feature (1)..(172): Xaa is any amino acid
MLFETVVPKHISIGLGGSETLEAMDVLTVLRSGDYDLFDRYNCADHFEVCRESLMAEYFLTGANALTMDGEMVNLDCSGSRVAAMAYGPRHVVVVAGANKLCDTLEDAIARVRSIAPMNCKRNNHQTPCAQDGVCTDCNIQARMCNHLLITFNAQKFAGRFTIILVNGDFGF

SEQ ID NO: 54927 - DNA, 2199 bp, Unknown
  Obtained from environmental sample
  misc_feature (1)..(2199): n is a, c, g, or t
atgaccccctcgttgtcgccttaccgacttagaaaagcccgtgaggtgtttaatcttttcaatgtttttaacgctctttcatggaatctgctggtggggagcattatcaccctgttcgccatacggctgggggcgacatctacctacattggaaccctcagcgccctcttgtatgtgtcgttttttttcctgccgctgggaaaactgctttcaaaaaaattcagtatagttggtattttcagctttacatggactatgcgggcgattggaatgattacggcggtattcgcgccgatttccgcgcatctgggccatcatgatacggcgctcggattgaccatgctgggggttggtattttccatgtggtacgcggcattggaatgatagccaaacaccctgttctgagcaatctttcaacggggcctgaccgcagcagttatatgacacagatacagatcatcaacagcgcggtgggaatgtttgccggttttgccatgcgggttattctgggcaaggaaccgcgtttattcatgtattcaatcattatggcagccggcattgtctgcgggattgtcagcggcatactgatagggaaagtgcccgagccgcctaccgaaggaaacgccgtaaaaaccagccttgccggcattttccgcgagaccctccatgagccgcaagtaaaactttttttgataatatttcttttcgttgttctggtatccggcgtgtcgaggactttccttgtcgtttatgcccgcgaggtgtttttgcaggaagacggcatggtgctgctgtattctgtttttggcggcctggggcaattattggcgaatatgctgataaaattccttgttgacagaattggcgcaaagccgatttttattatctgcgttttgcttggctttgtaatgatgatccccatagtgttttttccgctttcttctgttaacaacctgactatggtgatcctttttctttcctttttgttttttatgttgaatttcgggtttcttggctcagagggaatcgcgcagacatatttcatggggctggttccaacggaaaaaatgctggacatggggatgctgtatttttttgttttcggcgtcgccggcgccggcggatcttttctctcggggcttttgctggatatattatcggcgatagggctgtcgtcgttttattcattcaaaatactttatatcattctgattgtgttagccgcaatagccgtttttaaaatgcaaaaattgacgcctttgggcgccctttcatttacgggcgcggttaaggtgatgttttcctaccgtgacttgcaggccatctctctgcttgaccgtctggataaatccgccgattccgaccaggaacaggaactgttgggtgcgttgtacaataacccatcgcaattatcgacaaagggcctgcttgaaaaagcccgctctccacgccttgtaacacggctggaatcaatacgcgccctggacaaactcgattccctcaacgaagacgccgaaaacgcgttgattaatgacgttgtaaataatccttttaccaccgcgtatatttccgcgcgtattttaggaaatcacggctgtgtttcggctatacccattttgcgtgaactggcgtcttcaagcgattatatgcttgcgggcgaggcgatgatagctttggctaaaatgcgcgatcttgcgttccgtccccaaattgaaaatatcatccttgagatgcaaaaccccaagttaaaaattatgggcgtggaggcgctgggcatatacgccctgcccgattctcttaatacctttgtaaatataataaaaaacacggatccgccgccttatctgctttacgagattttactggctatgtcggcaattttgggcacgcaggatcagttttaccgcatactggtacgttttatcgccgacccttcgctgtcttcggcgcttgcccttgatgaggcggaatccgccgccgcttactacaaatccaatataggctggcggaaaggcggcaagagaaaagccgaattaccccttctggagaggcaggcgggcggtcttcaggaggctgtgtccgccatggaacaggacggcaaggttctgtcgggttggatacaggcccttccggcttttgccttttccgacgagccgtcctttaagaccgcacaggctctttttcagaaatccttgtga

SEQ ID NO: 54928 - protein, 732 aa, Unknown
  Obtained from environmental sample
  DOMAIN (17)...(384): Major Facilitator Superfamily
  misc_feature (1)..(732): Xaa is any amino acid
MTPSLSPYRLRKAREVFNLFNVFNALSWNLLVGSIITLFAIRLGATSTYIGTLSALLYVSFFFLPLGKLLSKKFSIVGIFSFTWTMRAIGMITAVFAPISAHLGHHDTALGLTMLGVGIFHVVRGIGMIAKHPVLSNLSTGPDRSSYMTQIQIINSAVGMFAGFAMRVILGKEPRLFMYSIIMAAGIVCGIVSGILIGKVPEPPTEGNAVKTSLAGIFRETLHEPQVKLFLIIFLFVVLVSGVSRTFLVVYAREVFLQEDGMVLLYSVFGGLGQLLANMLIKFLVDRIGAKPIFIICVLLGFVMMIPIVFFPLSSVNNLTMVILFLSFLFFMLNFGFLGSEGIAQTYFMGLVPTEKMLDMGMLYFFVFGVAGAGGSFLSGLLLDILSAIGLSSFYSFKILYIILIVLAAIAVFKMQKLTPLGALSFTGAVKVMFSYRDLQAISLLDRLDKSADSDQEQELLGALYNNPSQLSTKGLLEKARSPRLVTRLESIRALDKLDSLNEDAENALINDVVNNPFTTAYISARILGNHGCVSAIPILRELASSSDYMLAGEAMIALAKMRDLAFRPQIENIILEMQNPKLKIMGVEALGIYALPDSLNTFVNIIKNTDPPPYLLYEILLAMSAILGTQDQFYRILVRFIADPSLSSALALDEAESAAAYYKSNIGWRKGGKRKAELPLLERQAGGLQEAVSAMEQDGKVLSGWIQALPAFAFSDEPSFKTAQALFQKSL

SEQ ID NO: 54929 - DNA, 1104 bp, Unknown
  Obtained from environmental sample
  misc_feature (1)..(1104): n is a, c, g, or t
atgcggcggttcgtacaaaaattttccccttttgcccaaacgcttgacaaggccgccgttgatcttggcgttgattttgtcgggggcttttccgccctcgtgcagaaaggcctgtccggcggcgatgacaccttgattgcctcgctgccgcccgcgctttcccaaacagaaagggtatgcgcttcggtcaatgtcgccgccacaaaaagcggaatcaacatggacgctgtaagggtcatgggcggcgtgattaaacaaacggcggaaaaaaccgcgtcccgcgacggcataggctgcgcgaaactggtggtgttctgcaacgcccccgaggacaacccttttatggcgggcgcttttcatggcgtcggcgagggggaaagttgccttaacgtcggagtatcaggcccgggcgtagttaaggccgcgctggaaaacctgcggggggccagctttgacgaacttgccgacgcgataaaaaaaaccgcctttaagattacccgcatggggcagcttgtgggaatggaagcggctaaacggttaaacgtaccttttggcatattggatctttccctcgcacccacccctgaggttggtgattcggtcgcccgtatccttgaggagatgggtcttgaaaccgcgggaacccatggcacaacggcggcccttgccatgttaaccgacatgataaagaaaggcggcattatggcgtccacccatgtgggcggtttttccggggcctttatccccgtctccgaagatgaaggcatggtaaacgcggtgaagaaaggcgcgatcagccttgacaagcttgaggcgatgacttcggtttgctctgtcggcctggacatgatcgccctgccgggcgacacgagcgccgccactatttcggcgatcatcgccgatgaaatggcgattggcatggtgaacaacaagacaactgcggtacggattattcccgtgcccggcaaaaaagcgggcgactgggcggaattcggcggcctcctgggaggcgctccggtcctggcggtaaaccccgcaagaagcgacgctttcatcaatcgtggcgggagaataccggcgccggtacattcgttcaggaattag

SEQ ID NO: 54930 - protein, 367 aa, Unknown
  Obtained from environmental sample
  DOMAIN (1)...(367): Uncharacterized ACR (DUF711)
  misc_feature (1)..(367): Xaa is any amino acid
MRRFVQKFSPFAQTLDKAAVDLGVDFVGGFSALVQKGLSGGDDTLIASLPPALSQTERVCASVNVAATKSGINMDAVRVMGGVIKQTAEKTASRDGIGCAKLVVFCNAPEDNPFMAGAFHGVGEGESCLNVGVSGPGVVKAALENLRGASFDELADAIKKTAFKITRMGQLVGMEAAKRLNVPFGILDLSLAPTPEVGDSVARILEEMGLETAGTHGTTAALAMLTDMIKKGGIMASTHVGGFSGAFIPVSEDEGMVNAVKKGAISLDKLEAMTSVCSVGLDMIALPGDTSAATISAIIADEMAIGMVNNKTTAVRIIPVPGKKAGDWAEFGGLLGGAPVLAVNPARSDAFINRGGRIPAPVHSFRN

SEQ ID NO: 54931 - DNA, 702 bp, Unknown
  Obtained from environmental sample
  misc_feature (1)..(702): n is a, c, g, or t
ttgatgaaagcgtcgcttcttgcggggtttaccgccaggaccggagcgcctcccaggaggccgccgaattccgcccagtcgcccgcttttttgccgggcacgggaataatccgtaccgcagttgtcttgttgttcaccatgccaatcgccatttcatcggcgatgatcgccgaaatagtggcggcgctcgtgtcgcccggcagggcgatcatgtccaggccgacagagcaaaccgaagtcatcgcctcaagcttgtcaaggctgatcgcgcctttcttcaccgcgtttaccatgccttcatcttcggagacggggataaaggccccggaaaaaccgcccacatgggtggacgccataatgccgcctttctttatcatgtcggttaacatggcaagggccgccgttgtgccatgggttcccgcggtttcaagacccatctcctcaaggatacgggcgaccgaatcaccaacctcaggggtgggtgcgagggaaagatccaatatgccaaaaggtacgtttaaccgtttagccgcttccattcccacaagctgccccatgcgggtaatcttaaaggcggttttttttatcgcgtcggcaagttcgtcaaagctggccccccgcaggttttccagcgcggccttaactacgcccgggcctgatactccgacgttaaggcaactttccccctcgccgacgccatga

SEQ ID NO: 54932 - protein, 233 aa, Unknown
  Obtained from environmental sample
  misc_feature (1)..(233): Xaa is any amino acid
MMKASLLAGFTARTGAPPRRPPNSAQSPAFLPGTGIIRTAVVLLFTMPIAISSAMIAEIVAALVSPGRAIMSRPTEQTEVIASSLSRLIAPFFTAFTMPSSSETGIKAPEKPPTWVDAIMPPFFIMSVNMARAAVVPWVPAVSRPISSRIRATESPTSGVGARERSNMPKGTFNRLAASIPTSCPMRVILKAVFFIASASSSKLAPRRFSSAALTTPGPDTPTLRQLSPSPTP

SEQ ID NO: 54933 - DNA, 723 bp, Unknown
  Obtained from environmental sample
  misc_feature (1)..(723): n is a, c, g, or t
atgccccgattttttattttgttgctgcttgcccttgtccttgtcggttgcgggcagaagaaagtgactataaacaacgaacccacaggcgaaaagcccacttcctcttctgatctgaaaagcagcagttcggagaaagtggatgagagcaagctagaggaagagaagccgtttatagacagcagagacggcaagaaatacaaaatggtgaaaatcggcagccaaacttggatggctaagaatttgaactacaatgcaaacggcagcaaatgctacgaaaacaaacccgtcaactgcgacaagtacggaaggttgtacgattgggcaacggctatgaaggcttgccccaaaggttggcacttgccaaagaatgaagactgggacaagctgtatcgctttgcagacaacacaagcggcacagatagcccatacataagcgaaactgcaggcaaatatctaaaaacggttagcggctggaaagatgagaaagggaaaccgggcaacggcgaagacaagtacggtttttctgcccttccaggtggttttagcgaccacgattccagattcaactttgccggttgctgggcagtttggtggagtgctagtgaatatgatcatgatttatacgcctacaatcagcatattatatgcacagacaaggtagcctactggagttacaacgataagaattatttattcagtgttcgttgtttgaaggattaa

SEQ ID NO: 54934 - protein, 240 aa, Unknown
  Obtained from environmental sample
  SIGNAL (1)...(20)
  misc_feature (1)..(240): Xaa is any amino acid
MPRFFILLLLALVLVGCGQKKVTINNEPTGEKPTSSSDLKSSSSEKVDESKLEEEKPFIDSRDGKKYKMVKIGSQTWMAKNLNYNANGSKCYENKPVNCDKYGRLYDWATAMKACPKGWHLPKNEDWDKLYRFADNTSGTDSPYISETAGKYLKTVSGWKDEKGKPGNGEDKYGFSALPGGFSDHDSRFNFAGCWAVWWSASEYDHDLYAYNQHIICTDKVAYWSYNDKNYLFSVRCLKD

SEQ ID NO: 54935 - DNA, 1095 bp, Unknown
  Obtained from environmental sample
  misc_feature (1)..(1095): n is a, c, g, or t
atgacagattggccgagagcctcccgctttttggcgggaaataccggtgtgggggcgcgttactgcccttctattgaggacaaggtcgtacgttttcccgaaagaacgcggcaccatatttttatagagcctgaaggtttgttcacaaacgaaatgtacatgaacggcgcgtcaagttccctgccggaagacgttcagcgggatttcatccgcagtattcccggttttgagcaggcgcgtatcgtgcggcccgcttacgcggtcgagtacgattaccttgatccgcttgacctgtacccaagcctggaatcgaaaaggctctccggttttttcacagccgggcagaccaacggcagttccggttatgaggaagccgcggcccaggggcttatggcgggcataaacgccgcgatgaaactgcttggccgtccgccgctggtactaacaagggcggaagcctatataggcgtgctggtggacgaccttaccaccctgggaaccaaggagccgtaccgcatgttcaccagccgcgccgaacaccgcctcgtgctgcgccacgacaccgccgatacaaggctttgtcccaaaggccgcgatgtcggcctggttgacgatgagcgatgggaaattttccaaaaaaaagccgaagccctggacgagatcaaggagcttctggcgcagcgaanattttcatccacagccaaaaccgaaaatgcggcccttatttcccactcaggcgagagccttgaacgctgccttaccgacacccgcgtcgagttagccgacattcttccattcgtcccggagctttccgcctaccccgccgaatggcttgaacgcgccaggctggacatccgttacgccggttatatagaaaaagaaattcgctttgccgcaaaagcggctaaaatggacgctattaaacttgatccgaatttggattatgcttctgttatggggctttcaacagaggcaaaggaaaaactgacggctgtaaaaccgttgaatgtggggcaggcggcgaggatacccggcgttaggcagggagatattgcgctgttgattattatggcgaacaagaggaacgcaaaatga

SEQ ID NO: 54936 - protein, 364 aa, Unknown
  Obtained from environmental sample
  DOMAIN (1)...(144): Glucose inhibited division protein A
  misc_feature (1)..(364): Xaa is any amino acid
MTDWPRASRFLAGNTGVGARYCPSIEDKVVRFPERTRHHIFIEPEGLFTNEMYMNGASSSLPEDVQRDFIRSIPGFEQARIVRPAYAVEYDYLDPLDLYPSLESKRLSGFFTAGQTNGSSGYEEAAAQGLMAGINAAMKLLGRPPLVLTRAEAYIGVLVDDLTTLGTKEPYRMFTSRAEHRLVLRHDTADTRLCPKGRDVGLVDDERWEIFQKKAEALDEIKELLAQRXFSSTAKTENAALISHSGESLERCLTDTRVELADILPFVPELSAYPAEWLERARLDIRYAGYIEKEIRFAAKAAKMDAIKLDPNLDYASVMGLSTEAKEKLTAVKPLNVGQAARIPGVRQGDIALLIIMANKRNAK

SEQ ID NO: 54937 - DNA, 591 bp, Unknown
  Obtained from environmental sample
  misc_feature (1)..(591): n is a, c, g, or t
atgataaaactggtcgcttttctcggcaatcccggcgctgaatattctcgtaacagacacaacgccggacgtatgcttgcgcaggcgcttccgttttatcaatctctttcatggcaaaaaaaatacaaaggattatacgcctcgcataacggcagacattttcttatgcctgaaacatttatgaatttgtcgggcgagtctgtgcaggcagccgcagggtttttgaaaattgacgtaaaggaaattatcgtaattcatgatgaattggaattgccgctgggtgttctttccttaaaatattcaggcggtcttggcggacacaacggacttcgctccatgaaaaaaagttttaacagcgcggatttttggcgcataaaaatcggtataggccgccccgattccagaattccaggcgggggcggacgtgaaggaagcggggagggtgtttacgattgggttttatcggacttttcaaaaaatgaacaagagattcttatgccagctctcgacgcaggcgcaaatcttttaatgcagacttttgaaaatgaacctgaaactctgttaaaagagtgggcaaaaaagaaaatataa

SEQ ID NO: 54938 - protein, 196 aa, Unknown
  Obtained from environmental sample
  DOMAIN (4)...(192): Peptidyl-tRNA hydrolase
  misc_feature (1)..(196): Xaa is any amino acid
MIKLVAFLGNPGAEYSRNRHNAGRMLAQALPFYQSLSWQKKYKGLYASHNGRHFLMPETFMNLSGESVQAAAGFLKIDVKEIIVIHDELELPLGVLSLKYSGGLGGHNGLRSMKKSFNSADFWRIKIGIGRPDSRIPGGGGREGSGEGVYDWVLSDFSKNEQEILMPALDAGANLLMQTFENEPETLLKEWAKKKI

SEQ ID NO: 54939 - DNA, 585 bp, Unknown
  Obtained from environmental sample
  misc_feature (1)..(585): n is a, c, g, or t
atgggagcgtccggttccggcaagtctacattgatgaacgtgataggctgccttgacgtgcccgacgacgcttcctatatgctcgacggcgtgagggtgcgcggcatgagccgccgcgacttggcagatttgcgcaaccgcaaactgggcttcgtcttccagaatttcagcctcttggcccgtactacggcgctggaaaatgtggaactgcctatgcactaccgccacggcccgaagcaagattaccgcgccgccgctcgcaacgccttggaaaaggtggggcttgggggccgcgtagggcacatgcccaatcagctctccggcggccagcagcagcgcgtcgcgatagcgagggcgatagtcaacgacccgccgctagtcttggccgacgaacccacaggcgcgctcgacacccagacatccatagaggttatgcgcctctttgtagacctgaacaacaacggcaaaaccatcgtcctggtcacccacgagccggacatcgcaatgtacgccaaacggctgataaagatgagggacggagaaatcatcagcgacgagccggtggagaatagggtagtggcgtga

SEQ ID NO: 54940 - protein, 194 aa, Unknown
  Obtained from environmental sample
  DOMAIN (1)...(180): ABC transporter
  misc_feature (1)..(194): Xaa is any amino acid
MGASGSGKSTLMNVIGCLDVPDDASYMLDGVRVRGMSRRDLADLRNRKLGFVFQNFSLLARTTALENVELPMHYRHGPKQDYRAAARNALEKVGLGGRVGHMPNQLSGGQQQRVAIARAIVNDPPLVLADEPTGALDTQTSIEVMRLFVDLNNNGKTIVLVTHEPDIAMYAKRLIKMRDGEIISDEPVENRVVA

SEQ ID NO: 54941 - DNA, 708 bp, Unknown
  Obtained from environmental sample
  misc_feature (1)..(708): n is a, c, g, or t
ttgatcgcgagggaatctagttcgtctatcagcaacggctatgtttctagctcgtcagttgcaggcggcggtaacggcggcagttccagtttcgtaacgggcgggggtggctcgtcaagcagcagtatcaacctatgtagcggcggcgatggcacctctggcattaacggcggaagcgacaaaggcaacgacatagcgaattatagaatagttcaaatcggcgagcaatggtggatggcggagaatttgaattatgcggttgaaggtagcaagtgcggtgggaatgattgtctcctctacgatgaaaatactataaactgcgacaaatacgggagattatacgactggaacacagctattaccgtatgccccaacggttggcatttgcctgattttacggaatggcaggaacttgtggatttttcaggtggcgatactattgcaggcaggtatttgaaagcagctagcgggtggtgcagcaatggcaatggcgaggacaagttcggcttttccgccctgccgggcggcggcggcagttctggtggcggtttcagcaatgtcggctacggcggctggtggagtgctagcgagtacgatagcgaccgcgcttacctccggctcatgaccgactaccgcgagtacgtgagctacggcagcttcgataagaactacatgtacagcgttcggtgcctccaagattcaccttga

SEQ ID NO: 54942 - protein, 235 aa, Unknown
  Obtained from environmental sample
  misc_feature (1)..(235): Xaa is any amino acid
MIARESSSSISNGYVSSSSVAGGGNGGSSSFVTGGGGSSSSSINLCSGGDGTSGINGGSDKGNDIANYRIVQIGEQWWMAENLNYAVEGSKCGGNDCLLYDENTINCDKYGRLYDWNTAITVCPNGWHLPDFTEWQELVDFSGGDTIAGRYLKAASGWCSNGNGEDKFGFSALPGGGGSSGGGFSNVGYGGWWSASEYDSDRAYLRLMTDYREYVSYGSFDKNYMYSVRCLQDSP

SEQ ID NO: 54943 - DNA, 417 bp, Unknown
  Obtained from environmental sample
  misc_feature (1)..(417): n is a, c, g, or t
atgtacagatcggccgaggctgctcaaactattccgggaataggggcaaagacggctgcagtcatgctcgtgtgctgcagggggatggaaaatttccaaacgcataggcagctggcggctttcgtgggcgtttcgcctaccgtcaaggaatccggcacctcggtcaggggaagcggaagagtggcgaaggttgggaatccttatatgcgaagcctgctgttcatgtgcgctttcactgcttcaaaggcatgcagaccgtgcagcgaattgtatgcaaggctgacgggaaaaggaaaaagcaaaatggctgcgcttatggcggtcatgcatcgcctgataaaaattgctttcggagtggtgcgatcgggtgaaccgtacaggggaggttggggaaaaaaaataaccgaacaggaatga

SEQ ID NO: 54944 - protein, 138 aa, Unknown
  Obtained from environmental sample
  DOMAIN (1)...(91): Transposase IS116/IS110/IS902 family
  misc_feature (1)..(138): Xaa is any amino acid
MYRSAEAAQTIPGIGAKTAAVMLVCCRGMENFQTHRQLAAFVGVSPTVKESGTSVRGSGRVAKVGNPYMRSLLFMCAFTASKACRPCSELYARLTGKGKSKMAALMAVMHRLIKIAFGVVRSGEPYRGGWGKKITEQE

SEQ ID NO: 54945 - DNA, 666 bp, Unknown
  Obtained from environmental sample
  misc_feature (1)..(666): n is a, c, g, or t
atgggacaggtagcggcttcaggcggttattgggcggctatgaacgcaagtcatatcatggcaactccttacactattacaggatcaatcggcgtaatcggaagctggttttatgataacggtctttacggcagaataggattgagtacggatactattctgcgcggcgcacattcagatttgatgaccggagcgtttgtgccgtataggaacttaactcagcttgaagaagaacggtataaaaattatatattggacatttatcgtatctttatagaaaaagtcgccgcaggacgcggcatagaagcggaaaaagtggaaactgtcgcacagggaaggatattctcaggcacaaaggcggttgaaatcggattaattgacagtataggcactctttccgatgccctgcgaatggcgcaaaagttagctgaaataccggaggataaaacggttctttatagaaaatatcctgaaccaagtttttttgaaaaacttgttaacttttttcctatggcgaagattcttatcaaaaataaaaacagtcaaacaagtacggcttcgttatttacagggttatttttatcagatgatattagttaccggcttgaaaaaaacggtcaggtcatgcctattttaccgctggagttttctttgcttaggaaatag

SEQ ID NO: 54946 - protein, 221 aa, Unknown
  Obtained from environmental sample
  DOMAIN (1)...(146): Peptidase family S49
  misc_feature (1)..(221): Xaa is any amino acid
MGQVAASGGYWAAMNASHIMATPYTITGSIGVIGSWFYDNGLYGRIGLSTDTILRGAHSDLMTGAFVPYRNLTQLEEERYKNYILDIYRIFIEKVAAGRGIEAEKVETVAQGRIFSGTKAVEIGLIDSIGTLSDALRMAQKLAEIPEDKTVLYRKYPEPSFFEKLVNFFPMAKILIKNKNSQTSTASLFTGLFLSDDISYRLEKNGQVMPILPLEFSLLRK

SEQ ID NO: 54947 - DNA, 891 bp, Unknown
  Obtained from environmental sample
  misc_feature (1)..(891): n is a, c, g, or t
atgagcggtcagggtgattattcaaacgtattccacggttttgaagatatattcggcgagggcggtttcagcagcatatttgagaattttttcggcggcggttttcgaagaagttcatcaagcggcgtaaggcagggagctaatcttcgctacgatattgaaattccgtttaaggacgcagttttcggcacaaaggttgaaattcaatattcacataacgaatcctgcacaacctgcaaaggttccggcactgcggacggatcgggtaaaaaaacctgcccgacctgccggggctcaggacaggtgcggcacagtcagggatttttctcggtagcaaccacctgccatagctgccacggcgaagggtatataattgaaaaaccatgcagcgactgcggcggctcaggaacccagaaaaaacggcaaaaaataatggttactatccccgcaggcgtagagaacggcaagcgtgtggtaattcccaaacaaggcgacgcaggacctaacggagggtcttcaggcgatttgtatgtgttcatcaggataaaaccgcatgaatactttgaacggcagggaaccgatctttactgcgctgtcccaatttcaatatgccaggctgcgcttggcgctgatattcacgtaacaacattggataataaaacaatcaaggttaaaataccggccggtatccagaccggaaaaatgctccgtatccgtgatgaaggaataccttcaggaagccatcgcggcagtctctatatcaaacttatgatacaaataccggaaaaactttcccgacgcggcagggaactgctggaagaacttgcaaaagttgaaggccagaacgatagtcccaaacctattgcgctttcacagcttggggaaaattaa

SEQ ID NO: 54948 - protein, 296 aa, Unknown
  Obtained from environmental sample
  DOMAIN (63)...(143): DnaJ central domain (4 repeats)
  misc_feature (1)..(296): Xaa is any amino acid
MSGQGDYSNVFHGFEDIFGEGGFSSIFENFFGGGFRRSSSSGVRQGANLRYDIEIPFKDAVFGTKVEIQYSHNESCTTCKGSGTADGSGKKTCPTCRGSGQVRHSQGFFSVATTCHSCHGEGYIIEKPCSDCGGSGTQKKRQKIMVTIPAGVENGKRVVIPKQGDAGPNGGSSGDLYVFIRIKPHEYFERQGTDLYCAVPISICQAALGADIHVTTLDNKTIKVKIPAGIQTGKMLRIRDEGIPSGSHRGSLYIKLMIQIPEKLSRRGRELLEELAKVEGQNDSPKPIALSQLGEN

SEQ ID NO: 54949 - DNA, 1455 bp, Unknown
  Obtained from environmental sample
  misc_feature (1)..(1455): n is a, c, g, or t
ttgcgtgcctgcgcgtccactcaggaggatcccactatttttctcaggaatattaagggaaccctgattatcggccttgccaggcccatttccattctgcttaccttaatgtgcatggcttttttcggctttaccctgaacctcctgactcttaccggccttataatgggtttgggcatgaccgtggacggttccatagtcatacttgaaaacatccatagttaccgcctgcgcggcgcaaaaccacaaatagccgcgatacttggaagcagggaaatgctcagggcaattattgcttcagcggcaaccaccctttgcgtatttattccccccattatttacaagaacagcctggaaatgattgggcaatttgccagcgatttgatttttacggtggtaatttcccttacctgctctcttgccgtagcggttaccctggtacccagtctctgtggcagtatcctaaaacttgataccagaaaacaaaagcccctgaagatacccccgcttagagctatcgacaacgcgtttgagggacttttagtcgccattgaaaacggctacaaaagggcgcttggctactgcctttcgcacaggcttctgatagtaacgcttgccgttgtgcttctgctgttttccctgttgcagtttagcagtatcgggatgaatatgttttttcgaaccagaaccgatgacaacgtgaatatcaatgtctccatgccgcttggtactactatagaagaaacagaaagagttctttttgaactggaagaagtaattaaagatgagatcgagggatacaaaagcgtcattcttaccgcaaggcggagcggaagcacccagggttccattcaaattacgcttccagagcctgccaggcagatcgatactcccgataccatcatcaacaagttgaccccctataccaattccatacccggggcaagggtgagttttcgggcgggccgtttcgtaggctcgggttcccaagtggaacttgcgcttagttccaggagctacgatgctgccatggaaactgccgatgaaatcatccacatttttgagcgctatcttcctgaaatcgagaacccaacagtgaacatagacgaggggccgcctcaattaatcgtcaacatagaccgcgacagggccgccgccttgggagtgccgctgtcttctatcgcctcggagattcgcaccgccatggacggaaccaccgccgcaaccataagcataggagaccgaattttaaacgtaagggtatcgctccgcgacgaggatcgcatcgggatacccaacctggacgcgatctctgtgaatagccgcaacggctcaaggatttccgtgtccaatgtcgctgaaattgttgaaagccgcgcgccgtcttccatacgccgtgaaaaacaggaacgggttgttcgcgtancgggaaaaaaaaagccggaattgccgtaa

SEQ ID NO: 54950 - protein, 484 aa, Unknown
  Obtained from environmental sample
  DOMAIN (1)...(484): AcrB/AcrD/AcrF family
  misc_feature (1)..(484): Xaa is any amino acid
MRACASTQEDPTIFLRNIKGTLIIGLARPISILLTLMCMAFFGFTLNLLTLTGLIMGLGMTVDGSIVILENIHSYRLRGAKPQIAAILGSREMLRAIIASAATTLCVFIPPIIYKNSLEMIGQFASDLIFTVVISLTCSLAVAVTLVPSLCGSILKLDTRKQKPLKIPPLRAIDNAFEGLLVAIENGYKRALGYCLSHRLLIVTLAVVLLLFSLLQFSSIGMNMFFRTRTDDNVNINVSMPLGTTIEETERVLFELEEVIKDEIEGYKSVILTARRSGSTQGSIQITLPEPARQIDTPDTIINKLTPYTNSIPGARVSFRAGRFVGSGSQVELALSSRSYDAAMETADEIIHIFERYLPEIENPTVNIDEGPPQLIVNIDRDRAAALGVPLSSIASEIRTAMDGTTAATISIGDRILNVRVSLRDEDRIGIPNLDAISVNSRNGSRISVSNVAEIVESRAPSSIRREKQERVVRVXGKKKPELP

SEQ ID NO: 54951 - DNA, 447 bp, Unknown
  Obtained from environmental sample
  misc_feature (1)..(447): n is a, c, g, or t
atgttatttacacctgattgcaacagcagtaattgtgcttcgtccataagtgcaaagtatcagggaatatgccctatcggttggcatattcccagcgatgatgattgggaggttttgatgaaatttgtaaatccaaattgttttaaccataataatgaatgttattatgcgggaaccaagttgaaggctactattggttggacttcatataatggaattcccactggtacggacaattatggtttttccgccctgcctggcggcaacggctcgccggcaggtggctatttcagcgctgtaggcgacttcggctcctggtggagtactagagaggtttctgccaacgaaatctttattcggagaatgttctaccatagcgagagcgttgaatggaatgtctccgggaagaattacttgcatagtgtccgttgcgtgatgaacgattaa

SEQ ID NO: 54952 - protein, 148 aa, Unknown
  Obtained from environmental sample
  misc_feature (1)..(148): Xaa is any amino acid
MLFTPDCNSSNCASSISAKYQGICPIGWHIPSDDDWEVLMKFVNPNCFNHNNECYYAGTKLKATIGWTSYNGIPTGTDNYGFSALPGGNGSPAGGYFSAVGDFGSWWSTREVSANEIFIRRMFYHSESVEWNVSGKNYLHSVRCVMND

SEQ ID NO: 54953 - DNA, 1158 bp, Unknown
  Obtained from environmental sample
  misc_feature (1)..(1158): n is a, c, g, or t
ttgggaactgtttttgacgaacagatttacgatgacatcgaaggtgacaagcgcgagaactttatgcttcactacaactttcccccctattcagtcggcgaagtcggcagaatgggaacgggacgcagggagatagggcatggcaatttagcccaacgttctttaaaagctatgattcccacaaaagatgaattcccttatacggtccgcgtcgtctctgaaattatggagtccaatggctcttcttcaatggcgtcagtctgcggcggaaccctttccatgcttcatgcgggcgttccgatgaaaaaacccgtggcgggcatcgcaatggggcttatcactgaggggaaagccggtcccggggacaggttcgcggtgttatctgacattttaggcgaggaagaccacttgggtgacatggattttaaagtcgcgggaacaaaagacggaataaccggttttcagatggacataaaaatcgccggtgtaagcccagaaattatgcgcaaagcgcttgatcaggcaaaacggggaaggatgcatatcctttcaataatgaaccaatgtatagacaagcctgtcgaacaaatcagcgaatacgctcccaagattgtcactttacggattgatattgataaaatcggggcgcttatcggtcccggtggaaagaacatcaaggcgttatgcgaacaatattcggttaaaattaacacggaggatgacggcaccgtaacgatttttggcaagagcacgaaggacgctgaagacgcgaaagccgccgttgttggtatcgcatgcgatccggaaattggcagggtgtacaacggcacggtaaaacggattatggattttggagcctttgtggagattctgccgggaagggaagggctggtgcatatcagcaagctttcccgccagcgtatagccaatgtcaccgacgtgctgaaggaagggcaggagattcccgtcaagcttaccgaaattgacaaaatgggcaggcttaacctttcgtatatcgacgccatcgatccggacggcgccgattcaggttccggcgctgcgggcggcgctcctcgtggcggcggcagtggtggcggtcattcaggccacgacagcagggggcataataaatccggcagggatcgcccccggcattaa

SEQ ID NO: 54954 - protein, 385 aa, Unknown
  Obtained from environmental sample
  DOMAIN (1)...(100): 3' exoribonuclease family, domain 1
  misc_feature (1)..(385): Xaa is any amino acid
MGTVFDEQIYDDIEGDKRENFMLHYNFPPYSVGEVGRMGTGRREIGHGNLAQRSLKAMIPTKDEFPYTVRVVSEIMESNGSSSMASVCGGTLSMLHAGVPMKKPVAGIAMGLITEGKAGPGDRFAVLSDILGEEDHLGDMDFKVAGTKDGITGFQMDIKIAGVSPEIMRKALDQAKRGRMHILSIMNQCIDKPVEQISEYAPKIVTLRIDIDKIGALIGPGGKNIKALCEQYSVKINTEDDGTVTIFGKSTKDAEDAKAAVVGIACDPEIGRVYNGTVKRIMDFGAFVEILPGREGLVHISKLSRQRIANVTDVLKEGQEIPVKLTEIDKMGRLNLSYIDAIDPDGADSGSGAAGGAPRGGGSGGGHSGHDSRGHNKSGRDRPRH

SEQ ID NO: 54955 - DNA, 1959 bp, Unknown
  Obtained from environmental sample
  misc_feature (1)..(1959): n is a, c, g, or t
ttggcaacggaagaccgcaagttttggaatcattggggcatgaacccacttgctattccaagtgctgtacttgagagtgttagaacaggcaacaaaatgagaggggcaagttcgctaacccaacagctcacaaagcttttatttttaaccccagaacgttcaattacccgcaaaatacgcgaagcaatgactgccattcgcttggaaaaaacatataccaaagaagaaattttagaattttatatgaacgaggtttatttggcaggcggcaattatggatttcagtctgctgggcagttttattttggccgacctttggattcgcttaccattcccgaaatagccgtgcttgcaggaatgctccaacgcccagaagcctaccgccccgatcgcaaacccgaagccgccattgcccgcagaaacacggttttattcgctatgaaagatgcaggctatatttcaaaagatgattacaacaactacattaaaatgcctttgactattgagacaaagatagactctgctatagcaccgtattatatggaagagatacgtaaatatttggaaaataaatacggtgaaaattctctttatgcagacggcatttcaatttacagcaccatagacccaaatgcgcaacaaatagttgaaacagccgcactaaagcaaagaacaagagttgacaggcggcttcgccagcgtgctatttggaaacttaacttggtaaaaaaatataatatgccaaacgacactattctcaataaatttgattctgtttacgcagatttcactagaaattatctagcaaaagatacggcaaaaatactctatccagattcttcgcgttatagacaggcacaggtggcagttattttgatagagaatgaaactggtgcaattagggcaatggttggcggaaaagatttcaacgagagcaaatggaaccgcgcagtacaaactttaagacaaccaggttcttcattcaaaccctttgtttatgcaactgcaatggacaatggggcatctccttgcgattccgtaaatgatgctcccataacaattccagaccccatggacacatcaaaattttggaggcctggcaattattcaaaagagttcaagggaatgatgagctaccgcaaggcacttgggctttcgcaaaatttgccggcaattcaagttggcatgaaatatggacttagaaatgttgtggaatatgcgcgcaagtttggagtgaaaaaatcccctttgaaggcggtgccaagcattgccttaggttcggtgggtgcaacgcttatggaaatgacaagtgcttatacggtttttccaaatcttggcactagaatagaacctcattttatagaggctatagttggcaaaaatggagaagtaatagaaaagaactacaagattgaacacgaggttttaaaaagaccctcagcttatcttatggtttcaatgctgcaaacggtgaatacaggcggcacagcagcgaaagtgtgggcgagcggttttcaccatccaagcggaggcaaaacaggaaccacaaatgattataccgatgcgtggtatataggtttcaccaggcaatacacaatgggtgtgtggattggaacagatgatttcttgccgatgggacctgggcacacaggcacagaagatgcactgccggtgtggctgaattcaatgccattgattcataaaaatttgccagaattgcaattccctgttccgggtggagttttttcaaaaaggatttgcaactacactggcaaagtagcaggctcatattgcaatcaatcaacaagctgcctttacaccgcaagttctccagacattgaggaatgcgatggaaagcattttgagcaaccaaaagaaagcggtgccaccatattcagcaatacttccgcccccgctgctcccaatgcaaaaaccgctaaggcaaggcaggtgttttaa

SEQ ID NO: 54956 - protein, 652 aa, Unknown
  Obtained from environmental sample
  DOMAIN (288)...(564): Penicillin binding protein transpeptidase domain
  misc_feature (1)..(652): Xaa is any amino acid
MATEDRKFWNHWGMNPLAIPSAVLESVRTGNKMRGASSLTQQLTKLLFLTPERSITRKIREAMTAIRLEKTYTKEEILEFYMNEVYLAGGNYGFQSAGQFYFGRPLDSLTIPEIAVLAGMLQRPEAYRPDRKPEAAIARRNTVLFAMKDAGYISKDDYNNYIKMPLTIETKIDSAIAPYYMEEIRKYLENKYGENSLYADGISIYSTIDPNAQQIVETAALKQRTRVDRRLRQRAIWKLNLVKKYNMPNDTILNKFDSVYADFTRNYLAKDTAKILYPDSSRYRQAQVAVILIENETGAIRAMVGGKDFNESKWNRAVQTLRQPGSSFKPFVYATAMDNGASPCDSVNDAPITIPDPMDTSKFWRPGNYSKEFKGMMSYRKALGLSQNLPAIQVGMKYGLRNVVEYARKFGVKKSPLKAVPSIALGSVGATLMEMTSAYTVFPNLGTRIEPHFIEAIVGKNGEVIEKNYKIEHEVLKRPSAYLMVSMLQTVNTGGTAAKVWASGFHHPSGGKTGTTNDYTDAWYIGFTRQYTMGVWIGTDDFLPMGPGHTGTEDALPVWLNSMPLIHKNLPELQFPVPGGVFSKRICNYTGKVAGSYCNQSTSCLYTASSPDIEECDGKHFEQPKESGATIFSNTSAPAAPNAKTAKARQVF

SEQ ID NO: 54957 - DNA, 468 bp, Unknown
  Obtained from environmental sample
  misc_feature (1)..(468): n is a, c, g, or t
atggagggccggatagatgcctttgtcgctggcatgggcactggtgggacaatcgccggcgtggggcgatacctgaaagagaaaaacccaaacatcaagattgtcggcgttgacgtcgaggggtctatttttactgaatactttaggacgggaaaaatcggcgagccaggcccatacttgcttgaaggccttggagacgaatttttgatagggacggcggatttttctgtaatagacgacatggtgcaagtctctgaccgcgccgcatttctggcagcgagggaactggcgaagcgcgaagggcttttggcgggcggctcaagcggggccgccattttcgccgcgctgcaaattgccaaagaaatgccgcctggctccacagtcgtgaccctcttcccagacagcgcaagcaggtatttgagcaccatctacaatgacgactggatgaaagaaaaagggttcatgtga

SEQ ID NO: 54958 - protein, 155 aa, Unknown
  Obtained from environmental sample
  misc_feature (1)..(155): Xaa is any amino acid
MEGRIDAFVAGMGTGGTIAGVGRYLKEKNPNIKIVGVDVEGSIFTEYFRTGKIGEPGPYLLEGLGDEFLIGTADFSVIDDMVQVSDRAAFLAARELAKREGLLAGGSSGAAIFAALQIAKEMPPGSTVVTLFPDSASRYLSTIYNDDWMKEKGFM

SEQ ID NO: 54959 - DNA, 924 bp, Unknown
  Obtained from environmental sample
  misc_feature (1)..(924): n is a, c, g, or t
atgacgcctcccgaagacttcggcttccaatggcacataaccgaccgctgcgcgggcgggtgccggcactgctatcaggcggcttttgacggcgcctcggagatgccaataggtacgttgatacgcatagccggttgcataatgaccgctctttccgacacgcgggtcagcgtgaacgttaccggaggggaaccgctgctctatcaacacggaggggtgttcgagttgatgtcgcacctatcgacattcggcaacctaggcgaactcaatatcatcaccggtacatacggtctggatcaatccggtatcgataggctgaaatcgattcccaagctgacatccgtcaaggtttcgctggaatcacacgacccgcaaattaacgacgctatccgcaattcgggccacttcgatatggctacgcgcaatatcaaagcgttggccgactcagggctgccggtggtcgtgatggccacgcttagtcaacgcaattatgaatccgttgacgggctatgcgaactaagcgccgggttgggcgccgccgggattatcctcgaacgctacgtgccgctgggacgcgggaccgatatggcgtacagcgtgctgacgtcccgcgagtggcgggacatagccgccgccgtgatccgcgtcgcgaatatcgacgcatcaatagacgatctgctcccctacagagcctttcggatagatatgcccggcggaactctgggcgacgagtgcgaggcaagcggcgccttctgcaacctaggccccgagtcgatggccctgatgcctgacgggacggtatacccctgccgccgcgtacccatagccgtcggcaagctgccggacgacgggatggagcggatattaacattattggatggttattcatctacaccgcaattatgtttcgggtttgatttttaa

SEQ ID NO: 54960 - protein, 307 aa, Unknown
  Obtained from environmental sample
  DOMAIN (11)...(174): Radical SAM superfamily
  misc_feature (1)..(307): Xaa is any amino acid
MTPPEDFGFQWHITDRCAGGCRHCYQAAFDGASEMPIGTLIRIAGCIMTALSDTRVSVNVTGGEPLLYQHGGVFELMSHLSTFGNLGELNIITGTYGLDQSGIDRLKSIPKLTSVKVSLESHDPQINDAIRNSGHFDMATRNIKALADSGLPVVVMATLSQRNYESVDGLCELSAGLGAAGIILERYVPLGRGTDMAYSVLTSREWRDIAAAVIRVANIDASIDDLLPYRAFRIDMPGGTLGDECEASGAFCNLGPESMALMPDGTVYPCRRVPIAVGKLPDDGMERILTLLDGYSSTPQLCFGFDF

SEQ ID NO: 54961 - DNA, 603 bp, Unknown
  Obtained from environmental sample
  misc_feature (1)..(603): n is a, c, g, or t
atggtatcctcaaccgagggctccgccgtgtacacttgctggaagcggcgttcaagggccgcgtctttttcaatgtgcttgcggtactcgtccagggtggtagcgcctatgcagcgcagttcgccgcgcgccagcgcgggtttgagcaggttggaagcgtctgtcgcgccttccgcggcgcccgccccgaccagggtatgcagctcgtcaataaatagaattatcttcccttcggcggcctgcacctcgtgtatcagcgccttcaggcgttcctcaaattcgccgcggaattttgtccccgcgacaagcaggcccaaatccagggcgaggagttttttgtctttcaaaccctccggtacatcccccgcaactatgcgccgcgcgagcccttccacaatggcggtcttgccaacgcccggctctcctatcagaatggggttgttttttgtgcgccgtgacagcacctgcatacagcggcgtatttcctcgtcgcgcccgatgactggatcgattttttcctgcctcgccagggcggtaaggtcgcggcagaagcgttccagcacctggtacttgttttcggggttttggtcggtcacgcgctga

SEQ ID NO: 54962 - protein, 200 aa, Unknown
  Obtained from environmental sample
  misc_feature (1)..(200): Xaa is any amino acid
MVSSTEGSAVYTCWKRRSRAASFSMCLRYSSRVVAPMQRSSPRASAGLSRLEASVAPSAAPAPTRVCSSSINRIIFPSAACTSCISAFRRSSNSPRNFVPATSRPKSRARSFLSFKPSGTSPATMRRASPSTMAVLPTPGSPIRMGLFFVRRDSTCIQRRISSSRPMTGSIFSCLARAVRSRQKRSSTWYLFSGFWSVTR

SEQ ID NO: 54963 - DNA, 894 bp, Unknown
  Obtained from environmental sample
  misc_feature (1)..(894): n is a, c, g, or t
atgggagtaaggcgggccgtcaagattgcttgcaatcagctcgcctacaaccagcttgcctgcggcaaggcggatagtcccggaaaagtttatacactcggtcctttaatccacaacccacagacgcttgaagaccttaaacaacgtggtattgaaatactggaggaaaacaaccttccggaaaacctttcaggcgctgttgtaattatccgtgcccacggtataagccccaaaacagaagcagaactgcgcggactcggggctgtggttgttgacgcgacctgtccaaaagtaaaagccagccagttaaaggccgcgtctctcgcaaaacagggatacaggcttttccttgccggtgaagaaacacatgcggaaatcgtcggtattcgcggctacgcggaagacggctggcttcaaagaaacggcgccgccggaagcaaacagttcctgcgcgttgtaagctgcgccggggaagcccaaacagtcgcgacgaaattatctgaagacccggaactccagagtcaaaaaacggcgcttctcgcgcaaacaaccatttcagaggatgaataccatgctattggcgcggtaatctcgcaatattttcccatgctggaaatcatacaaacaatctgcgccgcaaccagggaaaggcaggacagcctgagggaacttttgggcagagtagacgctgtggccattgggggcgggaaagattccgccaacacccgccgcttgttgaatatcgcgcaagcatcggggaaaccttgcgttattgtggaaacagccgcggatattccgccggattttttcagttttgaaaccgtgggccttgcggccggggcatctacgccggattcggtaaatgattccatagagaagggactggcaaaataa

SEQ ID NO: 54964 - protein, 297 aa, Unknown
  Obtained from environmental sample
  DOMAIN (1)...(294): LytB protein
  misc_feature (1)..(297): Xaa is any amino acid
MGVRRAVKIACNQLAYNQLACGKADSPGKVYTLGPLIHNPQTLEDLKQRGIEILEENNLPENLSGAVVIIRAHGISPKTEAELRGLGAVVVDATCPKVKASQLKAASLAKQGYRLFLAGEETHAEIVGIRGYAEDGWLQRNGAAGSKQFLRVVSCAGEAQTVATKLSEDPELQSQKTALLAQTTISEDEYHAIGAVISQYFPMLEIIQTICAATRERQDSLRELLGRVDAVAIGGGKDSANTRRLLNIAQASGKPCVIVETAADIPPDFFSFETVGLAAGASTPDSVNDSIEKGLAK

SEQ ID NO: 54965 - DNA, 837 bp, Unknown
  Obtained from environmental sample
  misc_feature (1)..(837): n is a, c, g, or t
gtgctaattcttgatgataaaggcgatattatgctctgcaatacggcctctgaaagttttttcaggaaaaatgttgaacagcttacaaaaataaaattgtttagcctgtttgactttatggaagattcattgtcagaagcctcattcttattgcaccgtcataaaaaagacgcgtctgtttttaactgcggcgccgtttgccgggttgaggggcagaaatgccaaatttcattgaattatgtttatgataaatttgacgaaatgatctgcactgttgtgattgttacggacatcaccgaaaaagaggacttgatacggcagcttaatgaatctaacgcaaagattgagcaatttaacaaagaactgcaatcggaagttgaccggcagaccgaaagcatccgcaatcttcaaaaagcgattgtgtattcaatgagcgacttgatagaaaaaaaagacggatacacgggtgtgcatacaaggcgtgtaagcgaatacgtcgctattttacttcgtgaattggcgcggcgcggctatcaatttaccgaatcggaaattcaaagaatagcggaatcttcccttttgcatgacatgggaaaaatcgctataccggacagtattcttcttaaaagcggaaaattgaacgatgatgagtttgacgtaatgaaaagccacagtgcaaaaggagcggattcattgcaaaagtcaatgcagtttgcgaaggacgacgaatttctaaataacgcgtttattatggcaaagcatcatcatgaaaaatggaacggcggcggttatccggacggtaaaaagaaaatgagatacctcttcttgcccgcgtaa

SEQ ID NO: 54966 - protein, 278 aa, Unknown
  Obtained from environmental sample
  DOMAIN (155)...(276): HD domain
  misc_feature (1)..(278): Xaa is any amino acid
MLILDDKGDIMLCNTASESFFRKNVEQLTKIKLFSLFDFMEDSLSEASFLLHRHKKDASVFNCGAVCRVEGQKCQISLNYVYDKFDEMICTVVIVTDITEKEDLIRQLNESNAKIEQFNKELQSEVDRQTESIRNLQKAIVYSMSDLIEKKDGYTGVHTRRVSEYVAILLRELARRGYQFTESEIQRIAESSLLHDMGKIAIPDSILLKSGKLNDDEFDVMKSHSAKGADSLQKSMQFAKDDEFLNNAFIMAKHHHEKWNGGGYPDGKKKMRYLFLPA

SEQ ID NO: 54967 - DNA, 774 bp, Unknown
  Obtained from environmental sample
  misc_feature (1)..(774): n is a, c, g, or t
atgaaaacacagccgcaatttactatcatttatgaagacgacaacatcatagcggtcaacaaagccgccggaatttcggtgggcggcgaccggtgggacgaatccaaagagcggctggacaggctggtcgcggaagctattaaccccccggcgaaaatttttactgtccaccgtatagaccgcgatacttccgggctggtggtattcgcgaaaaatgaggaaacccaccgccgtctttcaatcgcttttgaagggcgggatgtcactaaacggtacatcgccgttgtccacggacgcccttcctggcaggaaacggcctgtaatcttcccttgattcccaatggcaacaagcagcatcagaccattattgacaaatatcaggggaaaaaatctcttacccgctttgtgctgctgggcagcgcgggcaatttaagcgttcttgaagtttttcccgaaaccggcagaactcaccagatacgggttcatgcggcggcgctgggttttcctgttgtgtgcgattcattgtatggcaaggataaaccggtgctgctttccgccatcaaaaaaaactggcgtggtaatcttttggaagaaaggccgcttctggcgcggcttggtctccatgccgcggaactttctttgccttcatcacaaacactgtgcgccccgctgccgcgggacatgaccgccctaatcaaacagatgaagctttttcatctaacaatagagcctttcccaaaacctggtcgtaccgtaggtacgcagtttttgtaa

SEQ ID NO: 54968 - protein, 257 aa, Unknown
  Obtained from environmental sample
  DOMAIN (15)...(165): RNA pseudouridylate synthase
  misc_feature (1)..(257): Xaa is any amino acid
MKTQPQFTIIYEDDNIIAVNKAAGISVGGDRWDESKERLDRLVAEAINPPAKIFTVHRIDRDTSGLVVFAKNEETHRRLSIAFEGRDVTKRYIAVVHGRPSWQETACNLPLIPNGNKQHQTIIDKYQGKKSLTRFVLLGSAGNLSVLEVFPETGRTHQIRVHAAALGFPVVCDSLYGKDKPVLLSAIKKNWRGNLLEERPLLARLGLHAAELSLPSSQTLCAPLPRDMTALIKQMKLFHLTIEPFPKPGRTVGTQFL

SEQ ID NO: 54969 - DNA, 306 bp, Unknown
  Obtained from environmental sample
  misc_feature (1)..(306): n is a, c, g, or t
ttgccggcgcgcaccgcgatactcgcaagatgggtaacgcaaaatatctgccgactctcccccattttttcaaggtactcccctaccgcaagggcgacttccccgccgatacccgcatcgatttcatcaaagatcaaagtctcgacactgtctgcggcggacagcacggattttattgccagcatgacacgggacagttcgccgcccgacgctatcctggaaaggtctttaagcggttcgccggtattcgctgaaataagaaactcgacttcttccgcgccccatgggccgcagataacggtttga

SEQ ID NO: 54970 - protein, 101 aa, Unknown
  Obtained from environmental sample
  misc_feature (1)..(101): Xaa is any amino acid
MPARTAILARWVTQNICRLSPIFSRYSPTARATSPPIPASISSKIKVSTLSAADSTDFIASMTRDSSPPDAILERSLSGSPVFAEIRNSTSSAPHGPQITV

SEQ ID NO: 54971 - DNA, 1125 bp, Unknown
  Obtained from environmental sample
  misc_feature (1)..(1125): n is a, c, g, or t
gtgcgtcttacggaaaaagcagacaatctttgtaccctgcaaatttctgtaagcgacacaggaatcggcataagtcccgaacaacagacaaaattattcaagtcttttgaacaagccgagtccagcacaacccgcaaatacggcggcacgggacttggacttgcaatttccaaaagtatcgtagaactcatgggcggtaaaatttggattgaatcggagccgaataaaggctctacttttttctttaccattcagctaagacgcagtacaaatgaaaaacgcaggcttttatcctccgatataaactctaaaaatgtccgtatcatggcagttgacgatgacccggacgtattggtttattttaatgaaatatcaaacggcttcagcatgatgtgcgatacagccctaagcggggaagaagcgcttaaacttataaaacaaaaaggcggctacaatatttattttatagactggaaaatgcccggcatggacggcatacaacttgcacatgaaataaaagagcacgcaaaagaaaatcccgttgtaataatgatatccgccgccgaatggagcgtaattgtcgaagaagcgaaagcggccggcgttgataaattcctgtccaaaccccttttcccctccgctattgcggaagtaattaatgaatgcctcggagttgaccggcagcaagctgaacaatcacatgcttcggacattgcgggcatcttttcagggcggcatttactgctggttgaagatgtggaaattaaccgtgaaatagtacagaccctgctggaaccgacaaaactggaaatagactgcgccgagaacggcgcggaagcagtacgcatgtttaccgaagccccgcttaaatacgatatgattttcatggatatacaaatgccggaaatggacggttacgaagctacacagcgcattagagccgccgaagatgccggaatatcggaacggccggaaaaaattccgataattgccatgacagctaacgtatttaaagaggacgttgaaaaatgccttgatgccggtatggacagccatgtcggcaagccgctggattttgaagaagttatgaaatgcctgcgttcttatttaggcctggctttgtaa

SEQ ID NO: 54972 - protein, 374 aa, Unknown
  Obtained from environmental sample
  DOMAIN (5)...(87): Histidine kinase-, DNA gyrase B-, and HSP90-like ATPase
  misc_feature (1)..(374): Xaa is any amino acid
MRLTEKADNLCTLQISVSDTGIGISPEQQTKLFKSFEQAESSTTRKYGGTGLGLAISKSIVELMGGKIWIESEPNKGSTFFFTIQLRRSTNEKRRLLSSDINSKNVRIMAVDDDPDVLVYFNEISNGFSMMCDTALSGEEALKLIKQKGGYNIYFIDWKMPGMDGIQLAHEIKEHAKENPVVIMISAAEWSVIVEEAKAAGVDKFLSKPLFPSAIAEVINECLGVDRQQAEQSHASDIAGIFSGRHLLLVEDVEINREIVQTLLEPTKLEIDCAENGAEAVRMFTEAPLKYDMIFMDIQMPEMDGYEATQRIRAAEDAGISERPEKIPIIAMTANVFKEDVEKCLDAGMDSHVGKPLDFEEVMKCLRSYLGLAL

SEQ ID NO: 54973 - DNA, 777 bp, Unknown
  Obtained from environmental sample
  misc_feature (1)..(777): n is a, c, g, or t
atgctggaagttaaagatttatccgccggttacaataatggcgcaatcagagaatgcgatgacgttatacgcagcatcagttttaaggcggagaggggagaaagcctttgcatactgggtcctaacgggagcggaaaaagcactttgcttaaatcaatagcgcgtattattgattaccgagggtgcgtgttaataaacggcgaggatatttccgccgtttcgcgcaaagagctggcaaaaaaaatcgccttgctgtcccagagcgcgcaggtgttttttcccttcacgatttacgagaccgtatcaatgggacgttacgcgtattctcagggttttctgaaaaatctttccgccgaagacaggtcagttatcgaaaatattttgaaaaaactggacatttgggaaaacaaagaccgaatgatcgatgaactaagcggcggagaattacagagggtttttctggcgagaacattggcgcaaaaccccgatttaattttacttgacgagcctagcaatcaccttgacttgaaacatcaaattgaactgcttaagtatttaaaggcgtgggtcaaagagaacaacaaaaccctaatctgcgtgtttcacgatcttaatcttgcgcgtcttttcggcgacactgcggttgttttaaacaacggaacgttagccgcaagcggacaaattgaggaaattctaaacggcggaatattaaacgaagtctacggcatagacatccggggctttatgcgggaatcattggaaaagtggaaattataa

SEQ ID NO: 54974 - protein, 258 aa, Unknown
  Obtained from environmental sample
  DOMAIN (33)...(220): ABC transporter
  misc_feature (1)..(258): Xaa is any amino acid
MLEVKDLSAGYNNGAIRECDDVIRSISFKAERGESLCILGPNGSGKSTLLKSIARIIDYRGCVLINGEDISAVSRKELAKKIALLSQSAQVFFPFTIYETVSMGRYAYSQGFLKNLSAEDRSVIENILKKLDIWENKDRMIDELSGGELQRVFLARTLAQNPDLILLDEPSNHLDLKHQIELLKYLKAWVKENNKTLICVFHDLNLARLFGDTAVVLNNGTLAASGQIEEILNGGILNEVYGIDIRGFMRESLEKWKL

SEQ ID NO: 54975 - DNA, 1029 bp, Unknown
  Obtained from environmental sample
  misc_feature (1)..(1029): n is a, c, g, or t
atgaataacagaacacgcatcataatcggtgcaattgtatcgctattaataattgtcgccgccgcctctttgggcagttcgggcataagtttgcgcgataccgtcttgatcattttccacaaaattttccatctgcggcttcctcataatatagacgcgaaaaatgtttcgattgtgtggctgttacggctccctcgcgtaattctggcgttccttgtcggcggcgggcttgcggcaagcggcgcggtttgtcagtcaatcctgcgaaatccgctcgcctccccctacattttgggagtctcctccggcgcgtctctgggtgcgggaataatcatcatcagcggaatcgcgcttcctttgcttggcggcttcacattaccgctgacaggatttgtttttgggttagcggcggttttttgtgtcgccgctttttcctcgcggatagacagatcaatgtcgaataacacaattattctgtgcggaatggttttttcgctttttttaagcgcgatgcttacaatgttaagcgctgttttttccgatgacttgcggcgaatcgcgttgtggcaaatgggcagtttcgccatgcgcggctggtcgtcggtatgctttttacttccgttnttagtcatcggaataacggggattttcctcttcacaaaagaaatggacattntaagcttcggcgacgaacaggcaaaatcatccggagtggaaacaggcgcggtgcgtaaaaaactactcgcactctgcgccgtgctgacaggcgccgctgtcgctctctcaggcgttatcggttttgtagacttgatagcccctcacgcggcgcgccgaatctgcggttctaaacataaacatttaattccaatgtcatttattttaggcggctccttgcttgttttaaccgatctgttggcaagaactctggtctctccctcggaacttcccgtaggcgcgattactgcgctaatcggcgcgccgtttttcgcgtgggtttatttcaggcggcggcgcaaggcgcaggtgtaa

SEQ ID NO: 54976 - protein, 342 aa, Unknown
  Obtained from environmental sample
  SIGNAL (1)...(25)
  DOMAIN (87)...(336): ABC 3 transport family
  misc_feature (1)..(342): Xaa is any amino acid
MNNRTRIIIGAIVSLLIIVAAASLGSSGISLRDTVLIIFHKIFHLRLPHNIDAKNVSIVWLLRLPRVILAFLVGGGLAASGAVCQSILRNPLASPYILGVSSGASLGAGIIIISGIALPLLGGFTLPLTGFVFGLAAVFCVAAFSSRIDRSMSNNTIILCGMVFSLFLSAMLTMLSAVFSDDLRRIALWQMGSFAMRGWSSVCFLLPXLVIGITGIFLFTKEMDIXSFGDEQAKSSGVETGAVRKKLLALCAVLTGAAVALSGVIGFVDLIAPHAARRICGSKHKHLIPMSFILGGSLLVLTDLLARTLVSPSELPVGAITALIGAPFFAWVYFRRRRKAQV

SEQ ID NO: 54977 - DNA, 2232 bp, Unknown
  Obtained from environmental sample
  misc_feature (1)..(2232): n is a, c, g, or t
gtgttctttatcattaccaatatcaatgtggattctgaaaggccgggaaacttcagtgattttgaagcgggcaaagttgcggatcgggaccttatcgccgaatatccgttttcgtatattgataaagaagcgacgcgcctgcgtatggaagcgcaggaatctctggttcccgcggtattccggtattcatccgctgtcaccgatgaaatacttgcgtcatggaataaattttgcgattttaccgacgcgttgataacgcaggaatcatccgcggcttcactgcgcctggcggttcaggccgagtatcccgcttattttaccgttgatacgctgaacgcctattttgccagcccgcagcgcgaggagttcagggactatgggcttgatctgctggacactgtcctgaaaaaaggggtgtttgcgctgaaggctgtggatatggggcggcataaccccgacagggtagaactgctggtttctttgggagaccgtaccgaacgggaacaggtcagctttaacaatattatttcccgggacagcgtaaaggacgcgattctggcggcggcggaaaacgcgcggatgccgtccggcgttaaagttattgccccgtcactgctgtatccctttattcaggagaacgtgctgttttcccgtgaagacactgatctgcgggttacggaggcaatggaacatgttaccgcggtagtaaaacatattgaaaaaggcaagcgtataatcaggaaaggttttattatcaccgaagatgaaatgcaggatattgaggcgctcggcgcggcgcttcccaggaaagacccccgcggcatcattgggttaattttattgctggccctgctgtatgtgctgtttattcttttgcagagcaaactggtcatgaaccgggatctttccaacagtgaacgctgcctgttgtttgttctggtctgcctgtatctggccggggcggggtttgcgaaaaatcttgttcccgcccagagtaattttctggtttccctgtttttccccaccgccctcatggtgatgatccccgcagtgtttatggggcctttgctggccctggtgatggcgctggcttttcctctgggcgcctgttttgccggtttctttgacattccatcgtacatttttgcccttatttccggcatagccgcttccacggtattaagaagcgccgaaaagcgcatggacctgatcaaggcggggctggcaatcgccgcggttaacgctctggcggtcattgtgattctgctgatgcgcacgtctcccatcgccgaatatccttcgatgctgctctgggccgccctcaacggcattgtgtcggggatgttgatcctgggcatactgccgcctttggaacacgccttaaacgccgccacgactttcagactgattgaactttccgaccttaacgcgccggtattgcgcaaactctttaccacggcgcccggcacctacagccattccattatggtggcgaaccttgccgaacaggcctgtcaggacattggggcaaacgccctgcttgcgcgggtaggggcctattaccatgacattggcaaaatggataaccccgattactttgtggagaaccagaccgattataaccggcacgacaatattaatccccgtctttcggctaccgtgatacgcagccacgtaaagctgggagttgaaaaggcaaggcagttgggcctgccggatgaggtaattaatattatcgccgagcatcacggcaattcggttattacctggttttacagcaaggcgctgaagcgggataaccccaaaaatcccacggtgaatatagaagactaccgttatcccgggaacccgcctcattcacgggagagcgccgtggtaatgctggcggatgtcagcgaagccgcggttcgcaccataagcaagcccaacgcggtaaagattgaaaagtttatcaaggagcttatcgcgaaaaaagttgaacacggacagctctcccagtcggagctgacattccgcgaccttgagataattgaaaacacttttgtcagggttctggtcggctactaccattcaagaatcgaatatcccaaaatcgatcctcaaatggaacatcaatttgacaataaatcacctgacaatagattaattgacaatataccggaaaataacgatgctgacactaaatcagaaaacagcaatacacctgaaaccgtgaaggctgtaacagaatga

SEQ ID NO: 54978 - protein, 743 aa, Unknown
  Obtained from environmental sample
  DOMAIN (21)...(271): 7TM-HD extracellular
  misc_feature (1)..(743): Xaa is any amino acid
MFFIITNINVDSERPGNFSDFEAGKVADRDLIAEYPFSYIDKEATRLRMEAQESLVPAVFRYSSAVTDEILASWNKFCDFTDALITQESSAASLRLAVQAEYPAYFTVDTLNAYFASPQREEFRDYGLDLLDTVLKKGVFALKAVDMGRHNPDRVELLVSLGDRTEREQVSFNNIISRDSVKDAILAAAENARMPSGVKVIAPSLLYPFIQENVLFSREDTDLRVTEAMEHVTAVVKHIEKGKRIIRKGFIITEDEMQDIEALGAALPRKDPRGIIGLILLLALLYVLFILLQSKLVMNRDLSNSERCLLFVLVCLYLAGAGFAKNLVPAQSNFLVSLFFPTALMVMIPAVFMGPLLALVMALAFPLGACFAGFFDIPSYIFALISGIAASTVLRSAEKRMDLIKAGLAIAAVNALAVIVILLMRTSPIAEYPSMLLWAALNGIVSGMLILGILPPLEHALNAATTFRLIELSDLNAPVLRKLFTTAPGTYSHSIMVANLAEQACQDIGANALLARVGAYYHDIGKMDNPDYFVENQTDYNRHDNINPRLSATVIRSHVKLGVEKARQLGLPDEVINIIAEHHGNSVITWFYSKALKRDNPKNPTVNIEDYRYPGNPPHSRESAVVMLADVSEAAVRTISKPNAVKIEKFIKELIAKKVEHGQLSQSELTFRDLEIIENTFVRVLVGYYHSRIEYPKIDPQMEHQFDNKSPDNRLIDNIPENNDADTKSENSNTPETVKAVTE

SEQ ID NO: 54979 - DNA, 852 bp, Unknown
  Obtained from environmental sample
  misc_feature (1)..(852): n is a, c, g, or t
atgaaatacataggcccacacgtatccgcaacaggcggcgtacacaacgcccccgtcaacgccaacgccgtcggcgccaccggcttcggcatgtttgtcaaaaaccaacgccagtggaaggctaagccgcttgaaaccaaggttatcgacgaatttaaaaacaatatggaactctacggctacaaaccggaatccgtactggtccacgacggctacctaatcaatataggcaatccggacgcaacaaagagagaactgtccgttgtagccctgatagacgaggcggaacgctgcgccgctctcggccttacgcggctgaacatccacccgggtagcggattaggcgtaatcaccccggatgaatgcgccgccgtgatagccgaatctataaataccatccttgacaaaactagaaaatcaggcgtatcgatagtaatagaggccacagccggtcaaggcaacctcgtaggcgggcgctttgaggaattggccgtgattatcggtagggtagaggacaagtcgcgaataggagtgtgcatagacacctgccacatcttcgccgccggatacgatatacgggacaaacagagttacaaaaagacaatgaccgccttcgatgataccgtcggcttcaaatatatacgaggcctgcacctaaacgacgctaaggccgagataggcacccataccgatcgccacgagagcatagggaaagggcgtatcgggatagacgcttttcggatgttgatggaagacaaaaggtttgatgggattccgtgtgttttggaaacgcctaatgaggatatttgggaggatgaggtggagatgctgaaaaaatattgtctgaattag

SEQ ID NO: 54980 - protein, 283 aa, Unknown
  Obtained from environmental sample
  DOMAIN (18)...(241): Xylose isomerase-like TIM barrel
  misc_feature (1)..(283): Xaa is any amino acid
MKYIGPHVSATGGVHNAPVNANAVGATGFGMFVKNQRQWKAKPLETKVIDEFKNNMELYGYKPESVLVHDGYLINIGNPDATKRELSVVALIDEAERCAALGLTRLNIHPGSGLGVITPDECAAVIAESINTILDKTRKSGVSIVIEATAGQGNLVGGRFEELAVIIGRVEDKSRIGVCIDTCHIFAAGYDIRDKQSYKKTMTAFDDTVGFKYIRGLHLNDAKAEIGTHTDRHESIGKGRIGIDAFRMLMEDKRFDGIPCVLETPNEDIWEDEVEMLKKYCLN

SEQ ID NO: 54981 - DNA, 336 bp, Unknown
  Obtained from environmental sample
  misc_feature (1)..(336): n is a, c, g, or t
ttgtatcatcgtgaattgcaatgccttgtagccattgaacttaaaatcggcgaattccagccggaatacaaggggaaaatggaattctacctctcattattgaatgacatggtaaagctacctcatgaaaacgactctatcggtatcataatctgcaaagagaaaaatcggacaatagttgaatactcattaaaaacaagttccatgcccataggcgtatcaacttatactactacagcaaaacttcccaaggattataagaatttattgcctgacagcaaaacaatcagccaaaaaatagatatgatgtttaaagataataataaacaaaactag

SEQ ID NO: 54982 - protein, 111 aa, Unknown
  Obtained from environmental sample
  DOMAIN (1)...(93): Protein of unknown function (DUF1016)
  misc_feature (1)..(111): Xaa is any amino acid
MYHRELQCLVAIELKIGEFQPEYKGKMEFYLSLLNDMVKLPHENDSIGIIICKEKNRTIVEYSLKTSSMPIGVSTYTTTAKLPKDYKNLLPDSKTISQKIDMMFKDNNKQN

SEQ ID NO: 54983 - DNA, 735 bp, Unknown
  Obtained from environmental sample
  misc_feature (1)..(735): n is a, c, g, or t
atgcccttaactattaatcaacttaccttcatcgcctcaatcaaggaaaaaatccgctttgcccaatatgaggctttaaaggaagtaaatactcaacttattaagctatattgggaaataggcaaagatatttcagaaagacagggggaaagctggggaaaatcaatagtttcagttctttctaaagagttacagaaagaattcccgggaattagcggattttcagaacgtaatttgtggcttatgacccagttttacaacgaataccaaaatgctgaatttctgcaaccactggttgcagaaattagctggacaaaacatattacaataatgagtaaatgcaaagataacgaggaaagacgtttttatatcatggcaactaaaaatttcggctggacgaaaaatgtccttatccaccaaatagaaaacaaaacctatgaaaaatacctgttgggtcaaacaaatttcgatacaacccttcccgacagaataaaaaatcaggcgattctagcgattaaagatgaatacacttttgactttatggatctcgccgatgaccatagcgaacggcagttggaggcggcactagtcaacaatatccgttcatttctgctggaaatgggctcacaatttacgtttattggaaatcagtacaaaattaagatcgaggataaagagtattttattcggcgaagccgatacggtttaataccccgaggcttgcctcggctgtaa

SEQ ID NO: 54984 - protein, 244 aa, Unknown
  Obtained from environmental sample
  DOMAIN (10)...(244): Protein of unknown function (DUF1016)
  misc_feature (1)..(244): Xaa is any amino acid
MPLTINQLTFIASIKEKIRFAQYEALKEVNTQLIKLYWEIGKDISERQGESWGKSIVSVLSKELQKEFPGISGFSERNLWLMTQFYNEYQNAEFLQPLVAEISWTKHITIMSKCKDNEERRFYIMATKNFGWTKNVLIHQIENKTYEKYLLGQTNFDTTLPDRIKNQAILAIKDEYTFDFMDLADDHSERQLEAALVNNIRSFLLEMGSQFTFIGNQYKIKIEDKEYFIRRSRYGLIPRGLPRL

SEQ ID NO: 54985 - DNA, 885 bp, Unknown
  Obtained from environmental sample
  misc_feature (1)..(885): n is a, c, g, or t
atgttgcgttccacagcgcgtatatgcgtaagtacaattatcagagctgaaaaaactaagagtacagaacaggcgatgaaagtgatcagtcgtcacgaaacaataaaggacataataaacaaggtttccctgatttttttatctgaaaacaaagagaaagtcgaagatacaatggcggcaggcgtgcgcttgattgccgacatagctgaaattgacaggatgattctttgccgcaatcacatagcaggcgatattttgtatgtgtctgaagtctaccgctgggacaggtgtttcggtggcagcaccgaattgaccgacattttcatcaacataacttatgcggggttgataccggattgggaaggacatttgtccggcggaaatcacataaacagcccaacaaaactgatgtctgaaaaagcggccgcagtgtttaaatcttttggtgtcctgacagccgccgttataccgatacatattagcagtgttttctggggcttcgcgcttttcgccgataccagaaccgaacgttatttagaggaagataacattcatatgatgcgctcagcggcattattgtttgcgaacgcttttattcgcaacgaagtggattatgacgcgcttacaggcatttataacaggcggttccttgataataatatgaagcgcatcataagcttcttatcccgctcagagagtttattaagcatgatgatgatcgacattgacttcttcaagcgatacaacgatacatacggccatcttgaaggcgataaatgccttaaaattatcgcgcaaactcttaaaaaaagcatatcaaggccggatgattttgccgcaagatacggcggcgaaagaatttgccgttgttctgcccaatactga

SEQ ID NO: 54986 - protein, 294 aa, Unknown
  Obtained from environmental sample
  DOMAIN (199)...(293): GGDEF domain
  misc_feature (1)..(294): Xaa is any amino acid
MLRSTARICVSTIIRAEKTKSTEQAMKVISRHETIKDIINKVSLIFLSENKEKVEDTMAAGVRLIADIAEIDRMILCRNHIAGDILYVSEVYRWDRCFGGSTELTDIFINITYAGLIPDWEGHLSGGNHINSPTKLMSEKAAAVFKSFGVLTAAVIPIHISSVFWGFALFADTRTERYLEEDNIHMMRSAALLFANAFIRNEVDYDALTGIYNRRFLDNNMKRIISFLSRSESLLSMMMIDIDFFKRYNDTYGHLEGDKCLKIIAQTLKKSISRPDDFAARYGGERICRCSAQY

SEQ ID NO: 54987 - DNA, 390 bp, Unknown
  Obtained from environmental sample
  misc_feature (1)..(390): n is a, c, g, or t
ttgacttcttcaagcgatacaacgatacatacggccatcttgaaggcgataaatgccttaaaattatcgcgcaaactcttaaaaaaagcatatcaaggccggatgattttgccgcaagatacggcggcgaaagaatttgccgttgttctgcccaatactgacgagaacggcgcacgactggtagccaacacgatccttgaaagcatacgaaaactcaatatagcccacgaaaaaaacgatgtagctgattgtgtaactatttctatcgggggcataaccggcgatgtaactcatacacaaaaagtagacgattacataatacattcggataaaatgctttatgaatcaaagcaaaacgggcgcaacagatataccgcaggaaaattatga

SEQ ID NO: 54988 - protein, 129 aa, Unknown
  Obtained from environmental sample
  DOMAIN (3)...(123): GGDEF domain
  misc_feature (1)..(129): Xaa is any amino acid
MTSSSDTTIHTAILKAINALKLSRKLLKKAYQGRMILPQDTAAKEFAVVLPNTDENGARLVANTILESIRKLNIAHEKNDVADCVTISIGGITGDVTHTQKVDDYIIHSDKMLYESKQNGRNRYTAGKL

SEQ ID NO: 54989 - DNA, 855 bp, Unknown
  Obtained from environmental sample
  misc_feature (1)..(855): n is a, c, g, or t
atgcctatagtaatggacggcaagtcttttgccaaggaatccgaagcgctcatagccgagcgggttgaacggtttaagacgattgcggggcgcgtacctcgccttgcgacaatacttgtgggcgacgacccctcctccgccacatacgttaagatgaagggcaacgcctgcgttcgggtgggtatgctctcgctcaaggtcgagatggggcgcgatacggcgacggaggagcttttggggcggattaaagagctgaacgacgatccgctgacggacgggattctgctccagcaccccgtccccaagcagatagacgagcgcgccgcgtttgaggctatttctatagataaggacgtggacggcgtgacctgcctcggtttcgggctgatgtccatggggtgcgccgcatacggcagcgccacgccggcggggataatgcgtttgctcgaccgctacgagatccccattgaggggcgccacgccgtcgtcgtcggcaggagcccgatcctcgggaagcctatggccatgatgctgctcaaccgcaacgccacggtcaccgtctgccactccaagacggccgatttacccaagattatcaaacaggccgacatcgtggtcggcgctgtcgggaagccggaattcatacaagcggagtggataaaggagggcgccgtagcggtcgacgccggttaccacgcgggcggcgttggcgacatagacttgaaaaacgccgcgcaaaaaacaagcgcttacacgccggtgcccggcggcgtggggcccatgaccatctccacattgatactgcaaacgatgcgcgccgccgagaagacggcagggatcccggacaagcaatga

SEQ ID NO: 54990 - protein, 284 aa, Unknown
  Obtained from environmental sample
  DOMAIN (3)...(120): Tetrahydrofolate dehydrogenase/cyclohydrolase, catalytic domain
  misc_feature (1)..(284): Xaa is any amino acid
MPIVMDGKSFAKESEALIAERVERFKTIAGRVPRLATILVGDDPSSATYVKMKGNACVRVGMLSLKVEMGRDTATEELLGRIKELNDDPLTDGILLQHPVPKQIDERAAFEAISIDKDVDGVTCLGFGLMSMGCAAYGSATPAGIMRLLDRYEIPIEGRHAVVVGRSPILGKPMAMMLLNRNATVTVCHSKTADLPKIIKQADIVVGAVGKPEFIQAEWIKEGAVAVDAGYHAGGVGDIDLKNAAQKTSAYTPVPGGVGPMTISTLILQTMRAAEKTAGIPDKQ

SEQ ID NO: 54991 - DNA, 774 bp, Unknown
  Obtained from environmental sample
  misc_feature (1)..(774): n is a, c, g, or t
ttgcccggcgtatattattttatgattatggataactctaaagtactgataataatccccacgtacaacgaacgtgaaaatatcacgctgatcatcccggagatcaaaaaatctctgccgggagcgcacgtcctcgttgtagacgactcctctccagacggcacaagcgccgcggtcaaggagatggttgatgggggcgtaaaaggccttttcgtactcgaccgcgccgccaagcaggggttggggcgcgcctacatcgccggcttcaagtgggcgctggaacgcggctacgagtacatcttcgagatggacgccgacttctcgcacaacccggagtacctgcccaaattcatcgaggcggcgcaatcggccgacctcgtcatcgggtcgcgctacataaacggggtcaacatcgtcaactggccgatgtcgcgcctgctcctcagctacttcggaaatatgttcgcccgcttggtaaccggtcttcgcatagccgacagcaccggcggcttcaagtgcttccgccgcgccgtgctcgagtcgctgaacctgaacggaatcgcctcttcgggctactctttccaaatagaagtgaacttcttcgcctggaagagcggcttcaaaatcaaagagatcccgatattcttcaccgacaggcagcgcggcgtatcgaaaatgtcacccaagataataaaagaagcggcattattggtgtggaaattgcgggtgatgtcgctgtttagaagaaagaagcctaaaaaacgtccgaagtag

SEQ ID NO: 54992 - protein, 257 aa, Unknown
  Obtained from environmental sample
  DOMAIN (16)...(183): Glycosyl transferase family 2
  misc_feature (1)..(257): Xaa is any amino acid
MPGVYYFMIMDNSKVLIIIPTYNERENITLIIPEIKKSLPGAHVLVVDDSSPDGTSAAVKEMVDGGVKGLFVLDRAAKQGLGRAYIAGFKWALERGYEYIFEMDADFSHNPEYLPKFIEAAQSADLVIGSRYINGVNIVNWPMSRLLLSYFGNMFARLVTGLRIADSTGGFKCFRRAVLESLNLNGIASSGYSFQIEVNFFAWKSGFKIKEIPIFFTDRQRGVSKMSPKIIKEAALLVWKLRVMSLFRRKKPKKRPK

SEQ ID NO: 54993 - DNA, 1485 bp, Unknown
  Obtained from environmental sample
  misc_feature (1)..(1485): n is a, c, g, or t
atgcccaaatatgtgctggcgctggatcaggggacaaccagttcgcgcgcaattttgtttgatcaggaacaaaatatcgttgctcaggaacagcaagagtacacgcagatttatccccgcgaaggctgggtcgaacatgatcccatggagatatattcatctcagtatggggtgatggtggagttaatggcgcggcaaaacattgcgccggcggatatagccgcgattggcattgccaaccagcgggaaacaacgattttgtgggaaaaggcgagcggcaggcctatttataacgctatagtctggcagtgccgccgcacggccgccattgtggattcgctggttgaagccgaccttgccgatcatatcaaaaaaaccacgggtctggtgccggacgcttatttttccgggacaaaaatcaaatggattcttgaccatgttgaaggggcgcgggataaggcccgtaacggggaaatcctttttggcacggtggactcctggcttatctggaaattgtgcggaattcatctgaccgattacaccaatgccagccgcaccatgttattcgacattcacaaactggattgggatgacactttgcttgcttccctggacataccccgctccatgctgcccgaagtgcggccttcaagcgcggtatacggggaggccgttattcagggtacaaagattcccattgccggcgttgccggggatcaacaggcggcactgttcgggcagggctgctttgaaaagggacaggcgaagaatacctacggaaccggttgtttcctgctgatgaataccggcgaaaaacccgttgaaagccgcaacggcctggttagcaccattgcggcaagcctgcccggcaagctccgttatgcgctggaaggttcggtctttataggcggcgcggtagttcattggctgcgggatgagatgcgcctgattaccgaaagcgccgaaattgaattttacgcggcgcagacagccgatacgggcggggtgtacattgttcccgcctttgccggactgggcgcgccgtactgggatatgcacgcccgcggctgcatcgtgggtattacccgcggaactaatcgctgtcacatcatcagggcggcggaggaatccatcgcctaccaggtgacggaccttgtgcgggcaatggaaaaagattcaggttttgtcataccggaattgaaagcggacggcggcgcaagccgtgacaatttcctgatgcagtttcaggctgatatttccggttgcgcgataatccgccctgtgatccgcgaaaccaccgccctgggcgcagcctgtcttgccggtatagcgacaggtttttggaaaggcactgatgaactggaaagccgctggaaaagcgacgccgttttcagcccttccatggatattcaaaaacgggcgtccctgctttccggctggcacaaagccgtaagccgcagccacggttgggcggaaaacagttag

SEQ ID NO: 54994 - protein, 494 aa, Unknown
  Obtained from environmental sample
  DOMAIN (249)...(474): FGGY family of carbohydrate kinases, C-terminal domain
  misc_feature (1)..(494): Xaa is any amino acid
MPKYVLALDQGTTSSRAILFDQEQNIVAQEQQEYTQIYPREGWVEHDPMEIYSSQYGVMVELMARQNIAPADIAAIGIANQRETTILWEKASGRPIYNAIVWQCRRTAAIVDSLVEADLADHIKKTTGLVPDAYFSGTKIKWILDHVEGARDKARNGEILFGTVDSWLIWKLCGIHLTDYTNASRTMLFDIHKLDWDDTLLASLDIPRSMLPEVRPSSAVYGEAVIQGTKIPIAGVAGDQQAALFGQGCFEKGQAKNTYGTGCFLLMNTGEKPVESRNGLVSTIAASLPGKLRYALEGSVFIGGAVVHWLRDEMRLITESAEIEFYAAQTADTGGVYIVPAFAGLGAPYWDMHARGCIVGITRGTNRCHIIRAAEESIAYQVTDLVRAMEKDSGFVIPELKADGGASRDNFLMQFQADISGCAIIRPVIRETTALGAACLAGIATGFWKGTDELESRWKSDAVFSPSMDIQKRASLLSGWHKAVSRSHGWAENS

SEQ ID NO: 54995 - DNA, 342 bp, Unknown
  Obtained from environmental sample
  misc_feature (1)..(342): n is a, c, g, or t
atgatcctctatgcgggtttctctgctcatcgcggtttctaccgcgatctgacaaaaggcctgcgtcagattcaccgtaaaaaagctatgacccggatccgccgggatctgcctatttatatcttttgcggcggcgctgatcccgtagggaatatgggagccagcccggcggcgctggtcaacgcatatcgctcactgggattacagaaccttgaatttgtacagtaccccggagccaggcacgaaacgttaaacgaaactaaccgtgaagaagtgatgggaaacctgtcctcgtggataagcaggataatagacaggaagcaggaatccggtcatccctaa

SEQ ID NO: 54996 - protein, 113 aa, Unknown
  Obtained from environmental sample
  misc_feature (1)..(113): Xaa is any amino acid
MILYAGFSAHRGFYRDLTKGLRQIHRKKAMTRIRRDLPIYIFCGGADPVGNMGASPAALVNAYRSLGLQNLEFVQYPGARHETLNETNREEVMGNLSSWISRIIDRKQESGHP

SEQ ID NO: 54997 - DNA, 714 bp, Unknown
  Obtained from environmental sample
  misc_feature (1)..(714): n is a, c, g, or t
gtgggcggtaccggcaaaatggcgtactcggatgacggcgtaagctggacagccgtagcggacagcacattcggcacatccggtatctttgcaatagcctatggtggcggcaggtttgtagccgtgggcaatgccggcaaaatggcgtactcggataacaacggcgcaagctggacagccgtagcggacagcacattcgacacagatgccatctacgcaatagcctatggcggcggcaggtttgtagccgggggcgttaacgccaaaatggcgtactcggataacaacggcgcaagctggacagccataccagagggaaccaggccattcagctcaacaaccgtatcatccggcgctaaccgtatccaagcaatcgcctatggcggcggcaggtttctagtcgggtgccttgtcggccatatagcgtactcggataacaacggcgcaagctggacattcataaatcaggggagcggctatggctacagcatgttcacatccgaaatcttaggattcgcctacggcggcaataggtttgtagccgtgggcgtttccggcaaaatggcgtacgcgcttaacggcacaaactggctacccgtaacggacagcacattcggcacatacagcacatctgccatcaacgcaatagcctatggcggcggcaggtttgtagccgtgggcaatgccggcaaaatggcgtacgggaggtattaa

SEQ ID NO: 54998 - protein, 237 aa, Unknown
  Obtained from environmental sample
  misc_feature (1)..(237): Xaa is any amino acid
MGGTGKMAYSDDGVSWTAVADSTFGTSGIFAIAYGGGRFVAVGNAGKMAYSDNNGASWTAVADSTFDTDAIYAIAYGGGRFVAGGVNAKMAYSDNNGASWTAIPEGTRPFSSTTVSSGANRIQAIAYGGGRFLVGCLVGHIAYSDNNGASWTFINQGSGYGYSMFTSEILGFAYGGNRFVAVGVSGKMAYALNGTNWLPVTDSTFGTYSTSAINAIAYGGGRFVAVGNAGKMAYGRY

SEQ ID NO: 54999 - DNA, 369 bp, Unknown
  Obtained from environmental sample
  misc_feature (1)..(369): n is a, c, g, or t
gtgtacgcgcgatcccttaccttcatcaacaacaaggtactggccattgccggcgagaaccgaagcggcggcgctgtacggctgattgagatagacccccgcagcctggaaatggttaatcagggaaatgacgaccttcacccgggtagccttatatgggtaaacagcggcgacatgtatattattaccgcaaacggcgacaatacattcaatctgggacgctttagcgcggatctgacgctgcaggccaaatcaaaaatcaacgtacatcccaacgcgacggtaaccgtacaacaagggttggccctgacacagcgcgcggacggcagtttagtgattctggatccgaaggatttgacggaaaaatag

SEQ ID NO: 55000 - protein, 122 aa, Unknown
  Obtained from environmental sample
  misc_feature (1)..(122): Xaa is any amino acid
MYARSLTFINNKVLAIAGENRSGGAVRLIEIDPRSLEMVNQGNDDLHPGSLIWVNSGDMYIITANGDNTFNLGRFSADLTLQAKSKINVHPNATVTVQQGLALTQRADGSLVILDPKDLTEK

SEQ ID NO: 55001 - DNA, 918 bp, Unknown
  Obtained from environmental sample
  misc_feature (1)..(918): n is a, c, g, or t
ttgaggaagatacggctactcttcagcgacgccgcgctgcttgccgaatacatcaccatttacaacgcggtgtatcgcgggaactggagctatttttcaggacgcttcaagaaacctgttgtagataatcttaaccgcgattccgccgggttggctgtccgttatcaggaatggcccggcaaaaccctcatgctcgtacccttgaatttaggcggacttagttccattaacacttctgcaatctcggacagccgtgtggttgaaagaatgcggactgaagacgacaggggaatcccccagcgtcagggcatggttgatctgaaagagcgcgaggccgcgcaggccagaagggaagccgcggacaaacaagaagccgccaaagccgaagcaggcgcaatcgccagagacaggcagtcgcttgaacaggaacaacggcaaatagaaagggatagacagcgtcttgagcaggaaaaggcctcgggcaaagttactgatgaagaagctgcccggcgcgaagcggaactttcacagcgtgaagcggacgcggataaaaaatcagatgcgttggatcaacggcaaagcgaccttgccgcgcagaggcaggacgctgcaaaccaggaacagtttgccggacaaaaacaagatgaagcccggcaggatagggaaagcattgccagagaccagcaggcaatgcttgatttgggtttgccgccccagggttcattccagggcgtaatcagtattgtgatcgagcggccggacgccacctccggcaggctggtcagcattgatcccgctacaggccangagctgcggcgatcggcgttgaaaccgtgtacgcgcgatcccttaccttcatcaacaacaaggtactggccattgccggcgagaaccgaagcggcggcgctgtacggctga

SEQ ID NO: 55002 - protein, 305 aa, Unknown
  Obtained from environmental sample
  misc_feature (1)..(305): Xaa is any amino acid
MRKIRLLFSDAALLAEYITIYNAVYRGNWSYFSGRFKKPVVDNLNRDSAGLAVRYQEWPGKTLMLVPLNLGGLSSINTSAISDSRVVERMRTEDDRGIPQRQGMVDLKEREAAQARREAADKQEAAKAEAGAIARDRQSLEQEQRQIERDRQRLEQEKASGKVTDEEAARREAELSQREADADKKSDALDQRQSDLAAQRQDAANQEQFAGQKQDEARQDRESIARDQQAMLDLGLPPQGSFQGVISIVIERPDATSGRLVSIDPATGXELRRSALKPCTRDPLPSSTTRYWPLPARTEAAALYG

SEQ ID NO: 55003 - DNA, 1305 bp, Unknown
  Obtained from environmental sample
  misc_feature (1)..(1305): n is a, c, g, or t
atgttcgtcgcctccgacggcgccagagcgccgcttacggacaagaaggtgcacgtgctatttccatcgatgggttctctgacaagcgacatcttcgccgcggcgtttagcggggcggggatcaacgcctcggccataccggtgtatgataccgaagtgctgaaggtcggcaaggggcacagctcctgcaaagagtgcctgccgcttatactcactaccggcgggctgcttcactatttggccacgcgccgtgacaaagacgaatacctgatatacttcatgcccacatgcggcggcaactgccgcttctcacagtacaacgtctacatccgcagcgtcttggaaaaaaagcggattaaagacgtgacgcttttatccttgacaaatgagaacggctacgcggggcttgaggttaaggatacgctgaacgttatgaaaggcaccatagtatcggatgtaatggaagatataaaaaacgctctcggcgtattggctaaagacaagccctccgcgatgaaaatcttttacggggagtgggagcggattttggcgctgttccgcaccggtaagaccgcgaacctctacaaattattagttgatgtggtcgctaaactgaaagcgatccctataaaatatccgttgcgcgaggccaaggttatctcgcttctcggggaaatctttgtgcgcagagactactttgccgtgcaggatttgttcgagcgccttgagaaacgcgagataatagtaaaacgcgctcacctcttagagtggcttgaatactgcgactggaacgtgcagaacggcatatttgaagccgatttcaattttttgggaaagctcaaattcagggcgcagcggatattgcagttgcgcgccgaaaagaagataaagagtatcctcgcgaaatcggggctttacatgtacgagcttacggagatggataaggttatcgaatacgggcgcgagttctttgacccgcgtctcacgggggagccgattatcgtcgccggaaccttctttaaagccattttgcaatcaatccacggaactatccagataggcccatttgcttgtatgcccacgcgtgtcgtggaggcggtgctcacggccgaggcaaccgtagataacaagaaattgcttgacaaaaagttattaggcgacgaccgtttgtgggacaatataagcacattgccatttttatcaatagagagcgacggcaacccgttcccggctattttggagtctaggattgaggcgttttgtttgcaggttgagaggttgcacgagagggtgtcgcggcggtaa

SEQ ID NO: 55004 - protein, 434 aa, Unknown
  Obtained from environmental sample
  misc_feature (1)..(434): Xaa is any amino acid
MFVASDGARAPLTDKKVHVLFPSMGSLTSDIFAAAFSGAGINASAIPVYDTEVLKVGKGHSSCKECLPLILTTGGLLHYLATRRDKDEYLIYFMPTCGGNCRFSQYNVYIRSVLEKKRIKDVTLLSLTNENGYAGLEVKDTLNVMKGTIVSDVMEDIKNALGVLAKDKPSAMKIFYGEWERILALFRTGKTANLYKLLVDVVAKLKAIPIKYPLREAKVISLLGEIFVRRDYFAVQDLFERLEKREIIVKRAHLLEWLEYCDWNVQNGIFEADFNFLGKLKFRAQRILQLRAEKKIKSILAKSGLYMYELTEMDKVIEYGREFFDPRLTGEPIIVAGTFFKAILQSIHGTIQIGPFACMPTRVVEAVLTAEATVDNKKLLDKKLLGDDRLWDNISTLPFLSIESDGNPFPAILESRIEAFCLQVERLHERVSRR

SEQ ID NO: 55005 - DNA, 1242 bp, Unknown
  Obtained from environmental sample
  misc_feature (1)..(1242): n is a, c, g, or t
atgtttacttttctccataaggccagaaagttttttccggcttttatactattatttacttctttcttttttcccaatggcgtaaaagggcaggagatcgaagaggatggcgaactgtccttttacgaggaagaaggcataaccgttaccggaaccgcgcaaattacacaacaaatggctgtcatcgaaaaagatgaaattgaacgccgtaacgcgccggacattgcgaccctgttacaggagacgcttggtctcaacattacgcgatacggaacctacggcagtatggctctgcttaacctgcgcggtcttgatacaaaacggttggcgattctgatagacggagttccggtaaattcttcaatggacggaaaatttgacattgagcaaatcgaccttaattcaatcgagcgcattgaggtaatttacggcggttccgataccaagtacaatgtttcaggcgcgatgggcggggtaattaacattatcaccgttaaaaaacaacccaccggcctgcggctgggcgcttctgtttccaataccggcgtcttgcccggtgaataccgggggcgaaatgggcaaacacagggaccaaattgggaaaatttgacggatacacagaacatcgccgtttcagccgcttatggcggaaacggtttatcaattacagctaacatattcgcaaacagggcgcagaatcattttttatttaatgatcgctataattatacccgcagaaaggacaacaacgaagtgtgggatgccgggggcgcggtatctgtaacaggggaactgccagatctttcaaaattaattgcttcatcaatgttttattatggtgacaaaaatattcccagctccggcttttcaagcaatgttagcaaacaacaggatatattttcacgtaacaatgtaatgcttgatatgccccgagcctttcgggatgatctcgcaatggaagcgtctctggggtttaatttcgccagaaaggattatacatcgctcacggatgctttttcccgtcacgatcaacaacacttgacggtaataaaccgctggacttggtttacaaacgaacagttggcggtgaaaagcggtttcgattaccggtttatctatcttgattctacggatattggaaaacgggatcggcacgacggcggaatttacctgaccgcggaatacaaacnctttaaaacaatttatgatcattccttccgtaaaagctgtgttcgtaagtaa

SEQ ID NO: 55006 - protein, 413 aa, Unknown
  Obtained from environmental sample
  SIGNAL (1)...(28)
  DOMAIN (53)...(159): TonB-dependent Receptor Plug Domain
  misc_feature (1)..(413): Xaa is any amino acid
MFTFLHKARKFFPAFILLFTSFFFPNGVKGQEIEEDGELSFYEEEGITVTGTAQITQQMAVIEKDEIERRNAPDIATLLQETLGLNITRYGTYGSMALLNLRGLDTKRLAILIDGVPVNSSMDGKFDIEQIDLNSIERIEVIYGGSDTKYNVSGAMGGVINIITVKKQPTGLRLGASVSNTGVLPGEYRGRNGQTQGPNWENLTDTQNIAVSAAYGGNGLSITANIFANRAQNHFLFNDRYNYTRRKDNNEVWDAGGAVSVTGELPDLSKLIASSMFYYGDKNIPSSGFSSNVSKQQDIFSRNNVMLDMPRAFRDDLAMEASLGFNFARKDYTSLTDAFSRHDQQHLTVINRWTWFTNEQLAVKSGFDYRFIYLDSTDIGKRDRHDGGIYLTAEYKXFKTIYDHSFRKSCVRK

SEQ ID NO: 55007 - DNA, 843 bp, Unknown
  Obtained from environmental sample
  misc_feature (1)..(843): n is a, c, g, or t
atgatcattccttccgtaaaagctgtgttcgtaagtaaaggagatacgctatttaccgcagtaccaaaattgggccttctttggaatgtgacggattcgcttaccattagaaataattatttccgcagttttaaatttcctgactttgaagaactgtactggaacgatggcggtgcttccggtgttggtaatcctgacttaaaacccgaagacggctggggcggggatattggcgtgtcatggtgttttaaggagctacttagttttgaaagtacgttttttacccactggctcaaagattcaattcactggtatcccgggataggaggtatctggcggcctgaaaatgtgggtgaagcaatattctttgggctggacagcaaactgcgttttgaaattccggttaagctgggagcgataaaaaaaattatcccctcaatttcgtatcagtaccttttaagctatctgttaagttttggctatgaatttgcggacaataagagaatcccctacagtcctgcgcataccacaggcgtttcgcttgaggttccttggggtcttggttcattgctcatttcggggcattatgaaagcctgcgctatgacgacagggcaaaccttacgcaattgaaaccgcattttctgcttaacgccgctgttaatcaaaaaataggaaaaaaccttacggtattcggcgtactgcgaaatatcctaaatgaatcgtatcaatcatttaacgattaccccatgccggggatcacgctgacattgggaatacgcgctaattttgatattaacaaaaatcaaggagataaaaaaaatgcgtccatcccctaccactaa

SEQ ID NO: 55008 - protein, 280 aa, Unknown
  Obtained from environmental sample
  DOMAIN (21)...(263): TonB dependent receptor
  misc_feature (1)..(280): Xaa is any amino acid
MIIPSVKAVFVSKGDTLFTAVPKLGLLWNVTDSLTIRNNYFRSFKFPDFEELYWNDGGASGVGNPDLKPEDGWGGDIGVSWCFKELLSFESTFFTHWLKDSIHWYPGIGGIWRPENVGEAIFFGLDSKLRFEIPVKLGAIKKIIPSISYQYLLSYLLSFGYEFADNKRIPYSPAHTTGVSLEVPWGLGSLLISGHYESLRYDDRANLTQLKPHFLLNAAVNQKIGKNLTVFGVLRNILNESYQSFNDYPMPGITLTLGIRANFDINKNQGDKKNASIPYH

SEQ ID NO: 55009 - DNA, 408 bp, Unknown
  Obtained from environmental sample
  misc_feature (1)..(408): n is a, c, g, or t
ttgctcaaagcgggaaaaacatccgaggcggaaaaacttgcgcgtttttcccttaccggactgcctgaatttcagcgctcttatcagatattgggcgatctgtttattaattttaatggaatggacggcgaatatgaggaatataccagattgcttaatttggaaaacgcggtatcgcttgtaagttttaaaatcggcggatacagctatgaacgggaaatctttgcgtccgctcccgctgatgttattgttatgcggttgacaacaactaaccctgcgggcatttcctttgacgcgaggatcgtgcgtaaccgtttatatgatcatagcggaaaaattgacgggggaaacgatttttttttgagggcgtctccggtggcaactatggtatctccttctgctgcatga

SEQ ID NO: 55010 - protein, 135 aa, Unknown
  Obtained from environmental sample
  misc_feature (1)..(135): Xaa is any amino acid
MLKAGKTSEAEKLARFSLTGLPEFQRSYQILGDLFINFNGMDGEYEEYTRLLNLENAVSLVSFKIGGYSYEREIFASAPADVIVMRLTTTNPAGISFDARIVRNRLYDHSGKIDGGNDFFLRASPVATMVSPSAA

SEQ ID NO: 55011 - DNA, 1665 bp, Unknown
  Obtained from environmental sample
  misc_feature (1)..(1665): n is a, c, g, or t
atgatgacgggcgcggccaaaaacggcgaaatgaaagcaattggggaatatcttgtattcaataatgtgtgtgaagcgtttctctatataaacgcttcaacaaattttcggaacgccgacccgtctttagtctgcctttcggttctgaaggccgcgaaagagagcgggtatgatctcatactaaaagaacatattgcggactatcaaagaattgaacgccgcatgtccctgaaactaaaaacagacgatgcaaactcacttctccctaccaacgagcggctggaactatttcaaaaagatttctcggatataaaactgatagagttgtatttcagatacggccgttatctcctgatttcctgcagtcggcccgggactctcccggcgaatctgcagggtatatggtgtaacgattttctgccgccctgggacagcaagtacacgataaacataaatacccaaatgaactactggcctgccgaaaactgtaatctctcggaatgtcatctgccgctgtttgagcacatcaaaaggatgtacgaaaacggacggcatacagcacgggagatgtatggcgcgagggggtttgtagcccatcacaataccgatgtctggggagataccgcccctcaggatacatggatccccgccacatactgggttatgggagcggcatggctttgtctgcatatctgggagcattatcaatacacattggacaaagattttttacaggagtatttttacctgttgagggattcggctttattctttacagattacctcgtggaaaacgaacgcggcgaattgataatatcgccgtcagtatccccggaaaatgtctatgttctgccggacggtgtcagtgggagtttgtgcaacggttgcgcgatggattcccagatattgacggaactgttcaacgcctgcatcggcgcaagccggattttaggcgttgaacctgaatttgaaaatgagctcgccacgctgctaaaaaaattaccgccaatttccataagcaaaaacggcacgatactggaatggatggaagactacgcggaagctgaaccagggcatcgccatatgtcgcatctgtttgcgttatttcccggaacacaaattactgtaaaaaataaccccgatctggcaaatgccgcaaggcgaacccttgaacgcaggctttcccacggcgggggacataccggctggagcagggcatggattacaaatttttgggcgaaactcggggattcggaaaaagcgtctgaaaatattgatttacttctggcaaaatctaccctgcccaatctttttgacaaccaccctccgtttcaaattgacggaaattttggcggcgctgcggcaatagtgaatatgctgctgcagagtgaacctgacagccttacaatactgccggctcttccgcgcaaatggacaggcggggaagtaaacgggctcaaggcaaaaggcgctcttgaagtcaatatcgaatgggaaaacggggtattggtttacgcttctatcgcctgtaagcatgggtataaaggtaaagtggtatacggtgataccgaaattaccgtaaacatcgcagccggtgaaaccatacagcttgacggatgcctggagataacaaggagacaacgctataaaaaaacagggctttaa

SEQ ID NO: 55012 - protein, 554 aa, Unknown
  Obtained from environmental sample
  misc_feature (1)..(554): Xaa is any amino acid
MMTGAAKNGEMKAIGEYLVFNNVCEAFLYINASTNFRNADPSLVCLSVLKAAKESGYDLILKEHIADYQRIERRMSLKLKTDDANSLLPTNERLELFQKDFSDIKLIELYFRYGRYLLISCSRPGTLPANLQGIWCNDFLPPWDSKYTININTQMNYWPAENCNLSECHLPLFEHIKRMYENGRHTAREMYGARGFVAHHNTDVWGDTAPQDTWIPATYWVMGAAWLCLHIWEHYQYTLDKDFLQEYFYLLRDSALFFTDYLVENERGELIISPSVSPENVYVLPDGVSGSLCNGCAMDSQILTELFNACIGASRILGVEPEFENELATLLKKLPPISISKNGTILEWMEDYAEAEPGHRHMSHLFALFPGTQITVKNNPDLANAARRTLERRLSHGGGHTGWSRAWITNFWAKLGDSEKASENIDLLLAKSTLPNLFDNHPPFQIDGNFGGAAAIVNMLLQSEPDSLTILPALPRKWTGGEVNGLKAKGALEVNIEWENGVLVYASIACKHGYKGKVVYGDTEITVNIAAGETIQLDGCLEITRRQRYKKTGL

SEQ ID NO: 55013 - DNA, 2127 bp, Unknown
  Obtained from environmental sample
  misc_feature (1)..(2127): n is a, c, g, or t
atgatcagatcggccgaggcggtagtggcgggtggccttgccataattcagctgataaggtcaaccgctataaccatggaaaatgcccggcaaaaaactatgtatatggcgcggcagagagcagcatactgggacggccgtttgaacggctatttaaacatactgcaaacactttcaaatatcatgaatttttatgaagaacttccggtggagggccgtcgcaagcagtatgaagatacgttaaatggtgtttttgaggacacgcccgattttgtacggcttagcaccgtatggaagccgaacgccatagacgggcaggacgctcttaatataggcagggtaggctcaacccccactggacagttcgcttttaccctgtcaagggaaaccgggcagatagtgaaattggccagcagcgtcgtttcggaaacgatggccataatgaacggccccaacgcccgagtagtctcaatgagcgaccctgccgcttttacgaatatgggaaaagaaacctatgcggtcagaatcacatgccccattattaacaatcgtctcaatgatgtagtcggagctgtaatcgcccagttggatattgccatgatacaacccaggatagagcagactatgaaagaaaacgaggaagttgccagtatggtaatttattccgacaacgggtttattttggcaaattacctgcccaggatgataggaaagacaatttccgatgaaacacaatacggcccgtacttaaaacaggttaccgaagctattaaaaacgcanaggaatttgagtgttttgcttacgaccccgaactgaaaacaaacatggtaatggccgtcgccaatatccccataggggtttccccgacaacatggtcggtaatggtcggctcaaccgaggcttacatcctgaaagacgtcaacgtgatgagaaacttcgtcatcgtcctggcttcagcggcccttgtcgccgcggtggcgctcatataccttgtcctgagcaggaccaccaaaccgatcgttacggtagccgagacccttaaggatatttccgaaggcgaaggcgacctgacgcgggctataaccgtcagttccaaagacgagataggggaccttgccctgtacttcaacaaaacgctggaaaaaatcaagaatatgatcatccatatcaaggacgaggcgaacggcctgacagagataggcaacgacctcgccggcaacatgaccgagacagcagccgcggtgaaccagatcaccgccaacatccagagcatcaagggccgcgtcataagccagagcgccagcgtcacccagaccaacgccaccatggagcaggttatcgccaatatcaacaagctcaacggccatgtggaaaaccagagcagcaatatctccaaggcttcgtccgccatcgagcagatggtggccaatgtcggttcggtaacccagacgctggttagaaacgcagataatgtaaaaacactggaggaagcctcggaagtgggccgcaacgggctgcgtgaagtcgctacggatgttcaggaaatagcccatgattccgaagacctgttgaacattaacgctgtaatgaaattcatagccagccaggccaacctgctttccatgaatgcggcgatagtaatggctcacaccggagaagcgggcaagggcttcgccattgtcgccgatggaatccgtaaactggcggaaaactccagcgagcagtccaagaccatcgatgtcgtacttaaaaagataaaaaattcaatcgacaagataacccattccacggaaaacgtgcttaacgagtttgaagcgattgactcaagcgtcaagacggtaggcgagggcagcaggcagatactggacggcgtaagtaatgtaaccgaaattacccggcaggtaaagggcggttccgttgaaatgcttgaaagcagcaaggaagtgataaatgaaagccacaaccttgaaacagtaacacaggaaataaccggcggcatgaacgagatggcttctggtgccgagcaggtaaacatagcggtacaccatgtcaacgagatatgcgtaaagaaccgcgagaggattgggtctttgatgcaggaagtgtcacgtttcaaggtagcttaa

SEQ ID NO: 55014 - protein, 708 aa, Unknown
  Obtained from environmental sample
  DOMAIN (458)...(708): Methyl-accepting chemotaxis protein (MCP) signaling domain
  misc_feature (1)..(708): Xaa is any amino acid
MIRSAEAVVAGGLAIIQLIRSTAITMENARQKTMYMARQRAAYWDGRLNGYLNILQTLSNIMNFYEELPVEGRRKQYEDTLNGVFEDTPDFVRLSTVWKPNAIDGQDALNIGRVGSTPTGQFAFTLSRETGQIVKLASSVVSETMAIMNGPNARVVSMSDPAAFTNMGKETYAVRITCPIINNRLNDVVGAVIAQLDIAMIQPRIEQTMKENEEVASMVIYSDNGFILANYLPRMIGKTISDETQYGPYLKQVTEAIKNAXEFECFAYDPELKTNMVMAVANIPIGVSPTTWSVMVGSTEAYILKDVNVMRNFVIVLASAALVAAVALIYLVLSRTTKPIVTVAETLKDISEGEGDLTRAITVSSKDEIGDLALYFNKTLEKIKNMIIHIKDEANGLTEIGNDLAGNMTETAAAVNQITANIQSIKGRVISQSASVTQTNATMEQVIANINKLNGHVENQSSNISKASSAIEQMVANVGSVTQTLVRNADNVKTLEEASEVGRNGLREVATDVQEIAHDSEDLLNINAVMKFIASQANLLSMNAAIVMAHTGEAGKGFAIVADGIRKLAENSSEQSKTIDVVLKKIKNSIDKITHSTENVLNEFEAIDSSVKTVGEGSRQILDGVSNVTEITRQVKGGSVEMLESSKEVINESHNLETVTQEITGGMNEMASGAEQVNIAVHHVNEICVKNRERIGSLMQEVSRFKVA

SEQ ID NO: 55015 - DNA, 789 bp, Unknown
  Obtained from environmental sample
  misc_feature (1)..(789): n is a, c, g, or t
atgctcagaagcttcgaaaccgaagttcagcacctttgggatattcttgaagttatctatcaggataaaaagagcttcttcaaaatcaacgactttgatgatttggcaaaaagaaacaagaacagagtccgcaagacaattaaagaaaaaacaggcgaacccatgtacgaagatattgccaaagtttgggacgaaatttccttcatcaaatcggctgaaacagaagttgaaaaatccaaccgcacatacatttgggaaaaagacagaattcgttcacgcatcatccttatgcgcaataagatgaagagaatgtacgacttcatgtacccgattgaaagacgtgtaatgacagaaagacttgaatggcttgagaaggaatattacaggtttgactacatgatcaacccgtaccacctccagccgggactcctcttggacgtagatattacatccatcaagaggaagaaagtcactctggacgctatggcgaacgtactcaatgagttcctccacggcgtatccaaaggcttctccgatgcagcgtttgcgtcattcagccgcagaagatcaactgtccgcgaagacatcaatcagtcatttgcggccgttgccgatgaagaagaagaggaagcagttgccgcggcagccgctaaaccgagacctgctgttattgcggcccccaaaggcggcgcaaagaaaggcggctcgaaatcttcatcaaagaaaggcgtaattgattcaagagcaaaaagtaagaagtcttcacgcggtggaattgcagaactttaa

SEQ ID NO: 55016 - protein, 262 aa, Unknown
  Obtained from environmental sample
  misc_feature (1)..(262): Xaa is any amino acid
MLRSFETEVQHLWDILEVIYQDKKSFFKINDFDDLAKRNKNRVRKTIKEKTGEPMYEDIAKVWDEISFIKSAETEVEKSNRTYIWEKDRIRSRIILMRNKMKRMYDFMYPIERRVMTERLEWLEKEYYRFDYMINPYHLQPGLLLDVDITSIKRKKVTLDAMANVLNEFLHGVSKGFSDAAFASFSRRRSTVREDINQSFAAVADEEEEEAVAAAAAKPRPAVIAAPKGGAKKGGSKSSSKKGVIDSRAKSKKSSRGGIAEL

SEQ ID NO: 55017 - DNA, 345 bp, Unknown
  Obtained from environmental sample
  misc_feature (1)..(345): n is a, c, g, or t
atggcggatggcgctaatttggaaattctttctacccgttccggttttaacagcgcggttagacacataaaaagaacaatggatattgcgtcaaagaccaacgctaatctgggcgatgttgtttatgagctggatgatgaagaattaacaagcggacagaccggtttgctgttaagaatgttattggttgacaagcttggttacaaatcggcgtcaactaatctttcgtcgccggtaaatgacgtttcagttttagtgaaagaattcgcgaaatggaacggcgttgatcttgtagccgcttatttccatcctgaaatgggattgttaatagcaaatccaaagtag

SEQ ID NO: 55018 - protein, 114 aa, Unknown
  Obtained from environmental sample
  misc_feature (1)..(114): Xaa is any amino acid
MADGANLEILSTRSGFNSAVRHIKRTMDIASKTNANLGDVVYELDDEELTSGQTGLLLRMLLVDKLGYKSASTNLSSPVNDVSVLVKEFAKWNGVDLVAAYFHPEMGLLIANPK

SEQ ID NO: 55019 - DNA, 633 bp, Unknown
  Obtained from environmental sample
  misc_feature (1)..(633): n is a, c, g, or t
ttggtggtgtacgcgggtcttcagggcaaggaaacagacgagaattgtcagaaagcggcggacttggctttaaggctttttgaaggttccagagttacagccccgtcgtttcttacaagaggaaaattcacagctaaaaaagtttctaaaccaaaaaaaatcagtgaaacagaggtagtaaaaaaagtaaaagaaaaaatagcttccaaaggaaaagttccggctaaacgcgccgcagcggaaacagccgctccttctgcaaagaaggcggcgacgatagtacagaaatcatcgggaggacccgcaaggatgacaccccgctatgcggttatagtacaaaatgaacttttccataacggaaacgtagaagcatggaagagaatcattgcaagttacagggcgaaacatcccagtctggaagtctttatttactatgagcaggaaagaataatggacattaactcgttgtttaaatggggcaaggtaaaacatggcagcgctattgaatttgccgtagccggaaacgacattcaggatgttgcgaaattacagcgttatctggctcagggagccagtcatcaatttgaagcgtttttgcgcggacctgttaataccgtgcttaaattgttctaa

SEQ ID NO: 55020 - protein, 210 aa, Unknown
  Obtained from environmental sample
  misc_feature (1)..(210): Xaa is any amino acid
MVVYAGLQGKETDENCQKAADLALRLFEGSRVTAPSFLTRGKFTAKKVSKPKKISETEVVKKVKEKIASKGKVPAKRAAAETAAPSAKKAATIVQKSSGGPARMTPRYAVIVQNELFHNGNVEAWKRIIASYRAKHPSLEVFIYYEQERIMDINSLFKWGKVKHGSAIEFAVAGNDIQDVAKLQRYLAQGASHQFEAFLRGPVNTVLKLF

SEQ ID NO: 55021 - DNA, 879 bp, Unknown
  Obtained from environmental sample
  misc_feature (1)..(879): n is a, c, g, or t
ttgatgtttgaccagcttcgcagagagttgaactttccgttcaggcgctgcggaataattgttgcggctcttcatgaagaagaaatgaaggcggtcgaatatctttacatgcagggagtagagaacggcgttatcgggattgagctttgctcccgttaccggatacttgaacttgagccgaaacttttagcggatgtcgcgggagggctttatgcacccggcggcggaataattgagccttaccgttttgtttttgcccttgttgagtcggcgctgaaaaacggtgcggagctgtttaccgattttaaggtgaatgaggccgtgcgtgaaggggatttttggcgtatcctctccgaagacggcagggaaataaagagccgttacgcaataaatgccgccggtctttttgcagatgaagtttcaaaaattttcggcgctgaggagtttacaataagcgcgagaaagggcgaatattttcttttggatcgtcttacgaaagcctgtccttcaagagtggtttttcctgttcctacagcggtttcaaaaggaatgcttgttatcccgactgtagaaggaacggcgcttgtcggccccacagcagatgctgtggaagacaagaatgatttttctactaccgcgaaaaggctggaacaaataattgtttcaggcaaaacaatgataccgtctctaagtcaaaacgatgttattacaaatttcgcggggttacgcccgtgtcttggtgaagatttttttattgcggcttccgagaaagcgccggcctttgtgcaggtagccggtatacaaagtcccgggcttaccgcgtctcccgcaataggtgaatatgttaaaaatatctgctggaaatgggactcagcctga

SEQ ID NO: 55022 - protein, 292 aa, Unknown
  Obtained from environmental sample
  DOMAIN (1)...(285): FAD dependent oxidoreductase
  misc_feature (1)..(292): Xaa is any amino acid
MMFDQLRRELNFPFRRCGIIVAALHEEEMKAVEYLYMQGVENGVIGIELCSRYRILELEPKLLADVAGGLYAPGGGIIEPYRFVFALVESALKNGAELFTDFKVNEAVREGDFWRILSEDGREIKSRYAINAAGLFADEVSKIFGAEEFTISARKGEYFLLDRLTKACPSRVVFPVPTAVSKGMLVIPTVEGTALVGPTADAVEDKNDFSTTAKRLEQIIVSGKTMIPSLSQNDVITNFAGLRPCLGEDFFIAASEKAPAFVQVAGIQSPGLTASPAIGEYVKNICWKWDSA

SEQ ID NO: 55023 - DNA, 363 bp, Unknown
  Obtained from environmental sample
  misc_feature (1)..(363): n is a, c, g, or t
atgggactcagcctgacagaaaaactgcactggaatccttatgtagaaaatcgcccgttggcaagagaacttaatttaaatgaactggacaacctaatcgcaaaagaccctgcatggggcaacattgtctgccgctgtgaaaatgtcagcgaagctgaaatcgttcaggcggtaaaactcgggcatactaccctagacggagtgaagtactttacccgcgcgcaaatgggacgctgtcagggcggcttctgtacctacaagatcataaaaataataatgagagaaacagggctttcctggagtgaaattacaaaacacggcggaaaaagccgcgtattggaggcgtcattaaatgatatttaa

SEQ ID NO: 55024 - protein, 120 aa, Unknown
  Obtained from environmental sample
  DOMAIN (41)...(96): BFD-like [2Fe-2S] binding domain
  misc_feature (1)..(120): Xaa is any amino acid
MGLSLTEKLHWNPYVENRPLARELNLNELDNLIAKDPAWGNIVCRCENVSEAEIVQAVKLGHTTLDGVKYFTRAQMGRCQGGFCTYKIIKIIMRETGLSWSEITKHGGKSRVLEASLNDI

SEQ ID NO: 55025 - DNA, 1281 bp, Unknown
  Obtained from environmental sample
  misc_feature (1)..(1281): n is a, c, g, or t
atgtatgattatacagccgcaattaaggatatttccgtgaaagaacttgggtatgacgctgctgttataggcggcggcgcggcgggaatggcggcggcgcttgagcttgaagcagaaggctttacctgcgcaattattgagagagaagatcatctcggcggaattctcatgcaatgtatacacaacggttttggcctgcacgaattttcagaagaactcacaggccctgaatttgcggaacgtttcattgagcgcgtaataaaatctaaaattgccgtttatcttaacacaactgttacacggtttactccatcaaaggaactttactgtgtttctccttccggcgcaataaagataaagtgccgtgttgcagtgcttgcaatgggctgtcgcgagcgtaaccgcggtaatgtacgcataccaggttcgcgtcctgccggaatctttaccgcaggtcttgcgcagcgccttgtgaatatcgaaggatacattccgggaaaggaggctgtaattataggttctggcgatatcggtctgattatggcaagacgcatgagctgggcaggctgcaaagtaaaagccgtagtggaaattatgccgtatcccgcaggacttacgcgtaacatcgttcagtgccttaatgattttaacattccgctttatctttcgtcccagaccacaggtattttcggcaacgaccgtgtagaaggaattgaggttactccaatggaaaacggcgtacttgttcaggaaaaaagtttccgtattgactgcgacacagttctgctgtcagtaggtcttattcccgaaaacgagctatccaaaaccgcgggagtagagttaaacagcgtaacgaacggtcccgtcgtggattcaattcttatgacaaatatggacggagtttttgcatgcggaaatgtgctccatgtccacgaccttgttgattgggtttgcgaagaaagccgccgcgcggggtgtcatgctgttcaatggctgcgcggggatcgtcccttactgcaaatacgcgcgcgagccggttcaaatgtgcgttatgtgaacccggcgcggattgcgcctgatcgtgaaaaccacatttaccttcgttccatgattataaaaaacgacgctgtcatggaaatacgccttgataaccgcgtaatccgcagtaaaaaagagcgtcacgttcagccttcggaaatgataaattttaagttatctccgaaagattttgaaggaattgaaacaaactcagattccgttttggagtttgtaattaattag

SEQ ID NO: 55026 - protein, 426 aa, Unknown
  Obtained from environmental sample
  DOMAIN (168)...(266): Pyridine nucleotide-disulphide oxidoreductase
  misc_feature (1)..(426): Xaa is any amino acid
MYDYTAAIKDISVKELGYDAAVIGGGAAGMAAALELEAEGFTCAIIEREDHLGGILMQCIHNGFGLHEFSEELTGPEFAERFIERVIKSKIAVYLNTTVTRFTPSKELYCVSPSGAIKIKCRVAVLAMGCRERNRGNVRIPGSRPAGIFTAGLAQRLVNIEGYIPGKEAVIIGSGDIGLIMARRMSWAGCKVKAVVEIMPYPAGLTRNIVQCLNDFNIPLYLSSQTTGIFGNDRVEGIEVTPMENGVLVQEKSFRIDCDTVLLSVGLIPENELSKTAGVELNSVTNGPVVDSILMTNMDGVFACGNVLHVHDLVDWVCEESRRAGCHAVQWLRGDRPLLQIRARAGSNVRYVNPARIAPDRENHIYLRSMIIKNDAVMEIRLDNRVIRSKKERHVQPSEMINFKLSPKDFEGIETNSDSVLEFVIN

SEQ ID NO: 55027 - DNA, 381 bp, Unknown
  Obtained from environmental sample
  misc_feature (1)..(381): n is a, c, g, or t
atgagaaaactaacctgtattgtatgtccgataagctgttcgctggaggtggaggaaaaaacttcttcaccggatgaaaccattgatagcctttccataacggggaaccgttgctcgcgtggtgtaatttacgcaagagaagaaatccgcgctccaaaacgcattgtaacagctacctgtaaaatcgaaaaagaaacagaacactctgtaaggcgcgttccggtaaagaccgtttcaccctgccaaaaagaaaaaattcccgctctgttagacgatatttataaattaaggattacccttccggtaaaaaccggagacatttttatcgcaaactggaagggtgaaggaattgatgtggcagcgacaaggacaatcgtctga

SEQ ID NO: 55028 - protein, 126 aa, Unknown
  Obtained from environmental sample
  DOMAIN (2)...(123): Protein of unknown function (DUF1667)
  misc_feature (1)..(126): Xaa is any amino acid
MRKLTCIVCPISCSLEVEEKTSSPDETIDSLSITGNRCSRGVIYAREEIRAPKRIVTATCKIEKETEHSVRRVPVKTVSPCQKEKIPALLDDIYKLRITLPVKTGDIFIANWKGEGIDVAATRTIV

SEQ ID NO: 55029 - DNA, 474 bp, Unknown
  Obtained from environmental sample
  misc_feature (1)..(474): n is a, c, g, or t
atggcgagcgcccccgctgagtacatgccgcccaccaagttcatgacgggcgacatattcaggggagtggtgcagaacgcgctgttcaacttcgtgtcccaactgaccggccagggcatacacctgctggggatgctgacggaggctatccacacgccctacatgcaggaccgcgctctggcactggagaacgccaaatacgtcatggacaacatggcggacctgggcgacgagatcagcttccgcgaggacggcgtgatagcagcgcgagccaggcaggtgttgaaggagaccgtcgaattcctggggcaggtggccgaaaagggcctcatggagagcatggagcagggggcattcgccgacataaagaggccgagggacatgggcaagggtctggacggtttggtcaggaagggcggcgactactggaacccggcggaacaagcacttaaaaccaagctgttcggagcgtag

SEQ ID NO: 55030 - protein, 157 aa, Unknown
  Obtained from environmental sample
  misc_feature (1)..(157): Xaa is any amino acid
MASAPAEYMPPTKFMTGDIFRGVVQNALFNFVSQLTGQGIHLLGMLTEAIHTPYMQDRALALENAKYVMDNMADLGDEISFREDGVIAARARQVLKETVEFLGQVAEKGLMESMEQGAFADIKRPRDMGKGLDGLVRKGGDYWNPAEQALKTKLFGA

SEQ ID NO: 55031 - DNA, 789 bp, Unknown
  Obtained from environmental sample
  misc_feature (1)..(789): n is a, c, g, or t
atgtccattcacacgccattgcctccgggttttaagttgccgcctcttgccagcggcacggaggagttttttgtcaatatgggacctcagcaccccagcacgcacggcgcgcttaggcttgttttgcgtttgaatggcgaaacaatagtggaaattgtgccgcattttggctatatacacaggggtttggaaaaacaggcagaaagcgaaacttatattcaatacattcacctaacagataggcaggattatttaacctcgcaccaaaacaaccactgcgtatgcctagcgatagaaaaagctatgggcattggcgttccagaacgcggcgaatacataagggttatgctctgcgaactcaaccgcatagcctcgcatttggttttttacgcctgctttggcggcgatttgggcgggcaaaccgcgctgctttacggattcaaggaacgcgagatgattcacgatatttttgaagagatatgcggtcagcgtttgacaatgaattattttagaccaggcggttcttctaaagatgtcccagataccttcattccaagggttaaggcttttttggaacacatgaaacccaccatgaaagattacgaaactctgcttaccaaaaatgtgatagtgctgttccgctcgcagggaataggggttctctcaaaagagagagccgtagctcttggctgttcaggtccggttttgagggcaagcggagtgaattacgatgttcgcaaaaatgacccttattcaatttacagttcttttaatttcacattcccgtag

SEQ ID NO: 55032 - protein, 262 aa, Unknown
  Obtained from environmental sample
  DOMAIN (136)...(262): Respiratory-chain NADH dehydrogenase, 49 Kd subunit
  misc_feature (1)..(262): Xaa is any amino acid
MSIHTPLPPGFKLPPLASGTEEFFVNMGPQHPSTHGALRLVLRLNGETIVEIVPHFGYIHRGLEKQAESETYIQYIHLTDRQDYLTSHQNNHCVCLAIEKAMGIGVPERGEYIRVMLCELNRIASHLVFYACFGGDLGGQTALLYGFKEREMIHDIFEEICGQRLTMNYFRPGGSSKDVPDTFIPRVKAFLEHMKPTMKDYETLLTKNVIVLFRSQGIGVLSKERAVALGCSGPVLRASGVNYDVRKNDPYSIYSSFNFTFP

SEQ ID NO: 55033 - DNA, 324 bp, Unknown
  Obtained from environmental sample
  misc_feature (1)..(324): n is a, c, g, or t
gtgcgtatgcaagaaatttacgagtctatgaaaattttggagcagtgcatagagaagttcccaagcggcccttaccgctccaagccatcaccgagctataaacttcctcaaggcagctattatgcccaaacagaaacggcaaaaggtatttacggcacatacataatcgcagacaaaggcgacaaaccgtaccgcatccacacccgaagccctagctttgcaaatttgatgtcattgaatgagatgagcaaggggcataaggtttccgatttggttacgataatggcaacgttggatccggttatacctgagattgaccgataa

SEQ ID NO: 55034 - protein, 107 aa, Unknown
  Obtained from environmental sample
  DOMAIN (1)...(107): Respiratory-chain NADH dehydrogenase, 49 Kd subunit
  misc_feature (1)..(107): Xaa is any amino acid
MRMQEIYESMKILEQCIEKFPSGPYRSKPSPSYKLPQGSYYAQTETAKGIYGTYIIADKGDKPYRIHTRSPSFANLMSLNEMSKGHKVSDLVTIMATLDPVIPEIDR

SEQ ID NO: 55035 - DNA, 1296 bp, Unknown
  Obtained from environmental sample
  misc_feature (1)..(1296): n is a, c, g, or t
ttgaccggacaaaacgtagccttgttcagcgatgacttatcgcaatttgacagcatattcaaaagcagcaaagtaacggtattccgccaccccgccgctgccagatactgcaccgaacaagccgaatccgtattaaaaaatatacttgctttggcgcaccccgtcagcttcgctgccaccccgctagaagcggggattaagaccatagccctcccctttggcacccattttttgcaacaggaaattttaaacgccctaaaagagttgcaaatcccctgcataactctcccccagcagagcaaagaccctagccagcaagaatccttgcttatggagctgtttcagaaagatatgccccgccttgctctcagcgtaaatgcaaaaggcatagattccgaggggattttgctctccgtttgcaataggttttctgtgcctgtgcatatttggtttgtagatgacccacgccccatagcttgtttgttcagcaaagagcagtgcaaaaacatagtggcgtggacttgggaaaaagcctatattccgtggttgcttgataaaggttttgcaaaagcggagtggctcccccttgccggagatacgcatttattttacccgcaaaacaaaaagcctattcacgagttgatgttcacaggttctgccatagccggaaattttttagacgatatttggaaacatattcaatacaacaaagacgaagcattgcctatagcgcaaaatgccgcagagcaaattttgtcgcgagaaatttttgcgcagcaaatcccagccgataccaaagccgaagcgtggtttgccagttattgcatacatttggcatctgccgaaaagcggcgtttgtgtttggaacctttgctcgctttgggtttaatttttgcaggcgacccgaatggctggaaaaatttatttggcagcaacataaaaaccctccccgacatagattaccgaagcggcttatgctcgcattattcaagcggcaacattcacataaatataacaagttgccaaatgccctctgcggtgaatcaaagagtttttgacattcccctttgcgagcgttttgtgattagcgatgaccaaagcgatttatttgagctgttcccgaaagatgcaatttgcgtagcaaattctcctgaggaatatgcggatttagtaaaattttatttgaataattctgcggcaaaagaagaaatagtgaaaaatgcgagggagcatattttaagggagcatttgtatgtgaatagggtatcccaaattatcggtcaatctcaggtataa

SEQ ID NO: 55036 - protein, 431 aa, Unknown
  Obtained from environmental sample
  misc_feature (1)..(431): Xaa is any amino acid
MTGQNVALFSDDLSQFDSIFKSSKVTVFRHPAAARYCTEQAESVLKNILALAHPVSFAATPLEAGIKTIALPFGTHFLQQEILNALKELQIPCITLPQQSKDPSQQESLLMELFQKDMPRLALSVNAKGIDSEGILLSVCNRFSVPVHIWFVDDPRPIACLFSKEQCKNIVAWTWEKAYIPWLLDKGFAKAEWLPLAGDTHLFYPQNKKPIHELMFTGSAIAGNFLDDIWKHIQYNKDEALPIAQNAAEQILSREIFAQQIPADTKAEAWFASYCIHLASAEKRRLCLEPLLALGLIFAGDPNGWKNLFGSNIKTLPDIDYRSGLCSHYSSGNIHINITSCQMPSAVNQRVFDIPLCERFVISDDQSDLFELFPKDAICVANSPEEYADLVKFYLNNSAAKEEIVKNAREHILREHLYVNRVSQIIGQSQV

SEQ ID NO: 55037 - DNA, 717 bp, Unknown
  Obtained from environmental sample
  misc_feature (1)..(717): n is a, c, g, or t
atgatgatctatatcggaacctgcgccgccgcagccctcctgtacctgtttgtcaggtgcagataccgccgtaatgaagataaaataaaaaaaagccctatctacgcattaataactttaacttacctgaatattaccgcttttggaatatatttgggcgtatgggcaaacccgggaatgattgccggaacgtatctgggcattctgatatgcgccttattgcttttctatatccccgccgtatatcatctttgcctcacgctcttctcaatgattgttttcacggttcttgccgtcatattcaaaagtccggcgactaacaggatagacataccgaacgccttctttgccggagccatttcactggttatcggctggcaggttattatgaacagattgtcgttagcggcgctcgcgcgcaatatggaagacgagcgcaacaattattacgaccaaagcaatatagatgaactgactcaactgaaaaaccgcaggcattttacaaaaactattcagaggactgttaccaattacaggcaatcggacaattacctatgcgtcgcgattttggacattgattttttcaagaattataatgactattacggccaccctgaaggcgatgaatgtctgcgtaaagtcggcgaggcgcttaaagatctgaataacaatatgaatatctatgccgccaggattggcggagaggatttgccctga

SEQ ID NO: 55038 - protein, 238 aa, Unknown
  Obtained from environmental sample
  DOMAIN (149)...(238): GGDEF domain
  misc_feature (1)..(238): Xaa is any amino acid
MMIYIGTCAAAALLYLFVRCRYRRNEDKIKKSPIYALITLTYLNITAFGIYLGVWANPGMIAGTYLGILICALLLFYIPAVYHLCLTLFSMIVFTVLAVIFKSPATNRIDIPNAFFAGAISLVIGWQVIMNRLSLAALARNMEDERNNYYDQSNIDELTQLKNRRHFTKTIQRTVTNYRQSDNYLCVAILDIDFFKNYNDYYGHPEGDECLRKVGEALKDLNNNMNIYAARIGGEDLP

SEQ ID NO: 55039 - DNA, 1359 bp, Unknown
  Obtained from environmental sample
  misc_feature (1)..(1359): n is a, c, g, or t
atgatacagacccaggaaaaactcgcctggaatttcgggcgcaaacggcgctctatttcgatgggcgtgtacagaatcgcgaggatcaactggcccatcatttacaagggcgttgatcctgacagcgtttcttttgtgcccctgcaatgggactcacctttgaccctgcgggaaatcctcaaacaacatcccaaaggaaaagagtacgcctttatccttgagaaggagccggttcaccccctgttgactgattcgaagggcgaagtgctatcctatccgcccatcatcaattcaaatgatttgggcgcggtgcaggttggcgacacggacatctttgtggaattgaccggttctgacatcgcccaggtaacgctggcggcttcaatcgtcgcctgcgaccttgcggataacggcttctccattgagccggtaaaggttaaatacgaatttgacactctttttggcaggaatgttatctttccctgctattttcaacagcctgtgttttgttcccttgcgagaatcgagaaattcctcggcgaaaaactcaatggcgatgaatgtgtgcaggcgcttaaccgcatgggcgtaaaggccgaaaagtcagacggtatggagaaaggacagaacgccaaaggttcaatggaaggcgtcatcgcgtatccgcccgaataccgcaacgattttcttcacgccgccgatgtcgccgaagacgtgatgataggccgggggcttggctcgtttaaaccggagcgcccgggcgatcccaccgtaggcagactcagcccgctcactttgttcagccgccaggtaaaggaaattttcatcggcatgggctatcaggagatgatatacaactacctcggttcccgcaaagacctcgttgaaaaaatgcgcggcgcgggggatcgcataatccgcatcgccaaccccatgaccgaaaattacgagtatgtccgcgattcggtgatcgcttccctcatggaaagcgagtctgtttcgggcaattcggtatacccgcataaaattttcgagatcggcaaaatcgcgtaccttgacggcgcggacaattccggcactgtaacccgccagtacgcgggcttccttcacgccgacaaagaggcgaacttcaacaccgccgcgggccagatgcagaccttgttctattacctttcccgcgagtacgaggttgaggaagccgacgatccgcgttttattccgggccgcgccgccgcaatcctgtacaatggccgcaagataggcgtattcggcgagatacaccccgaagtcctggaaaactggggcataaccgtgccctgcaccgcgggggagtttgatttggatcaattaacggtttaa

SEQ ID NO: 55040 - protein, 452 aa, Unknown
  Obtained from environmental sample
  DOMAIN (236)...(452): tRNA synthetases class II core domain (F)
  misc_feature (1)..(452): Xaa is any amino acid
MIQTQEKLAWNFGRKRRSISMGVYRIARINWPIIYKGVDPDSVSFVPLQWDSPLTLREILKQHPKGKEYAFILEKEPVHPLLTDSKGEVLSYPPIINSNDLGAVQVGDTDIFVELTGSDIAQVTLAASIVACDLADNGFSIEPVKVKYEFDTLFGRNVIFPCYFQQPVFCSLARIEKFLGEKLNGDECVQALNRMGVKAEKSDGMEKGQNAKGSMEGVIAYPPEYRNDFLHAADVAEDVMIGRGLGSFKPERPGDPTVGRLSPLTLFSRQVKEIFIGMGYQEMIYNYLGSRKDLVEKMRGAGDRIIRIANPMTENYEYVRDSVIASLMESESVSGNSVYPHKIFEIGKIAYLDGADNSGTVTRQYAGFLHADKEANFNTAAGQMQTLFYYLSREYEVEEADDPRFIPGRAAAILYNGRKIGVFGEIHPEVLENWGITVPCTAGEFDLDQLTV

SEQ ID NO: 55041 - DNA, 774 bp, Unknown
  Obtained from environmental sample
  misc_feature (1)..(774): n is a, c, g, or t
ttggtctcacgaggcgcttatagtcggcaagacgacagggattcaatggatttttcggaacagacggcggataaattaaccgctcaggatgaacaaattcttaacggaaaagattttttgatttttgaggatcaaatagtttcaaagttggaccgcagcaaggtagtgtatcttgagaccataaaaacaccgcttattcaaaacggtaaaactgtcgggattctgggtatatcgcgcgacataaccaggcgcaaagcgctggagcgggaacttgagtaccagacgatcctgcttaaaacgataattgattcccttcctgacggcgtattctgcaaggatatgaaccttaattatacgttatgcaataaatatatgttggatacccttgataagaccctggatgaagtagtcggaagggacgatacagcggctttggggctgtcaacgaataccgcggcggttgcccgtgatactgacctgggaatcctgagcggacaacaacgggtagtatatcaggaatggataaccttttccgatggcaccatgcggctttttgaaacggcaaaatcgccgcttgtaatggacggcagcataatcgggatcgtggccgtggcgcacgacatttcagagcacagagcaatggaggaggaactccgctcggcatcgcgcgccaagtcaacttttcttgccaacatgagccacgagctcagaactccccttaacgtagtcataggcctgacagatttgatactggaagaaagcggccttgcctaa

SEQ ID NO: 55042 - protein, 257 aa, Unknown
  Obtained from environmental sample
  DOMAIN (102)...(213): PAS fold
  misc_feature (1)..(257): Xaa is any amino acid
MVSRGAYSRQDDRDSMDFSEQTADKLTAQDEQILNGKDFLIFEDQIVSKLDRSKVVYLETIKTPLIQNGKTVGILGISRDITRRKALERELEYQTILLKTIIDSLPDGVFCKDMNLNYTLCNKYMLDTLDKTLDEVVGRDDTAALGLSTNTAAVARDTDLGILSGQQRVVYQEWITFSDGTMRLFETAKSPLVMDGSIIGIVAVAHDISEHRAMEEELRSASRAKSTFLANMSHELRTPLNVVIGLTDLILEESGLA

SEQ ID NO: 55043 - DNA, 597 bp, Unknown
  Obtained from environmental sample
  misc_feature (1)..(597): n is a, c, g, or t
atgacgtgcatagcggttcttgtaagcggcggcggcacaaaccttcaggctttgattgatgcgcgggacagggaagaattatcaggcggcgaacttacccttgttatatcaaccaaggctggagttcaggcgctggaacgagcgaaaaaagcaggcattaaaacacaaattattgaaagaaaaaaatttaacgactcaaacgcttatgaccgcgcttttgcctcagcgttatctgaagaaaatattgatcttgtagtccttgccggatttttgtcgatactgggacaggaaacgcttaaactgtttgaaaaccgaattatcaacgttcatcccgcccttattccgtctttttgcggaaaaggattttacggtcttcgcgtccacgaagccgtccttgaatacggcgtaaaggtaacgggggcgactgttcactttgtaacggaagtcgtagacggcggaaaaattattctgcaaaaagcggttgatgtgctgcccggcgatacgcccgagacattgcagcagcgtgttatgcgcgaggccgaatgggttctgctgccgaaagctgtcgccatgttttgtaaaggagaaattaaatga

SEQ ID NO: 55044 - protein, 198 aa, Unknown
  Obtained from environmental sample
  DOMAIN (4)...(189): Formyl transferase
  misc_feature (1)..(198): Xaa is any amino acid
MTCIAVLVSGGGTNLQALIDARDREELSGGELTLVISTKAGVQALERAKKAGIKTQIIERKKFNDSNAYDRAFASALSEENIDLVVLAGFLSILGQETLKLFENRIINVHPALIPSFCGKGFYGLRVHEAVLEYGVKVTGATVHFVTEVVDGGKIILQKAVDVLPGDTPETLQQRVMREAEWVLLPKAVAMFCKGEIK

SEQ ID NO: 55045 - DNA, 780 bp, Unknown
  Obtained from environmental sample
  misc_feature (1)..(780): n is a, c, g, or t
gtggcaatgtgcgttaacgacataatctgcgcgggagccaagccgcttttctttcttgattatattgcgttaggcaaaaacatcccggaaaaagtagaacagattgtcgccggagtcgcggaaggctgcgtacaagctctctgcgcccttgtgggaggggaaaccgccgaacatcccggcatgatggcggaagatgaatacgaccttgcgggtttttccgtaggcatagctgaaaaatcaaaaatattggatattaattccgtaaaacccggcgatgtaataatagggcttgcgtcatcgggcgttcattccaacgctttttcacttacgcgcaaagtttttggaatagacaatgataaaagcgtactggaaaagcgctttgacgagcttggctgtacgctggcggaaactcttttaacgcccacaaaaatttatgtaaagcctgttctcgcgcttcttgaaaagacgcaagtgcgttcgttatgccacataacaggcggcggtttttacgaaaatattccgagagccttcgggaaaaatgtcggagccgttattaaaaaaaacacgcttaacattccgccgatttttaaccttatcgcggcgcagggaaaaattcctgaaagggatatgttcaatacttacaacatgggtatagggatgtgcgcctttgtgccgcagcaaaacgcggacgaagcggtgcgtattttaaaatcatcaggcgagagcgccgccgtaataggggagattaaaaacggcgtgaacggagtagttatagaatga

SEQ ID NO: 55046 - protein, 259 aa, Unknown
  Obtained from environmental sample
  DOMAIN (1)...(78): AIR synthase related protein, N-terminal domain
  misc_feature (1)..(259): Xaa is any amino acid
MAMCVNDIICAGAKPLFFLDYIALGKNIPEKVEQIVAGVAEGCVQALCALVGGETAEHPGMMAEDEYDLAGFSVGIAEKSKILDINSVKPGDVIIGLASSGVHSNAFSLTRKVFGIDNDKSVLEKRFDELGCTLAETLLTPTKIYVKPVLALLEKTQVRSLCHITGGGFYENIPRAFGKNVGAVIKKNTLNIPPIFNLIAAQGKIPERDMFNTYNMGIGMCAFVPQQNADEAVRILKSSGESAAVIGEIKNGVNGVVIE

SEQ ID NO: 55047 - DNA, 741 bp, Unknown
  Obtained from environmental sample
  misc_feature (1)..(741): n is a, c, g, or t
atgggctcagtcgggcttaacacagtggctttggctctgaagaatacctccggccctgttattatctcgggaatcgacttttcgttttccctggatacctgtcacgcgcgttccacgcctgggcgcagggatctcgaaaacaggcaaacccgcttcagaagccccatcgacgctgacaccgcgttaaaggatggaatctacgccactgtttccaaaacaggagagcaagtactgagcaatcctgccatgcggaaataccgcgatctctttgaactggaatttggcggaaatccaaggctatttgatataacaggccccgggcttccgttgggggttaaaacaattaccgccgcagaagccttcgtaatcctgaatgaagcagacaatcaacatacccctccgcgaaatttagcccagagcagcgaggaaaatacacaaaccaatcgaattacagcctttgccagacgcgaagctaacactttgaaagaactgaaaggtatgcttacaggagccataccacccgaacctgaaagattagagggtttgcttgatacagctgattacctctgggcgcacttccccgaatgcgccggtgcgggcggcagacgtcctccagccacagacttgagctttctgaaacgcatccgcacagagatcgaccctttccttaaactctgggaaatcactctggaagagctgacaggtagcctcacttacaataaaaattcaaaaaatttttaa

SEQ ID NO: 55048 - protein, 246 aa, Unknown
  Obtained from environmental sample
  misc_feature (1)..(246): Xaa is any amino acid
MGSVGLNTVALALKNTSGPVIISGIDFSFSLDTCHARSTPGRRDLENRQTRFRSPIDADTALKDGIYATVSKTGEQVLSNPAMRKYRDLFELEFGGNPRLFDITGPGLPLGVKTITAAEAFVILNEADNQHTPPRNLAQSSEENTQTNRITAFARREANTLKELKGMLTGAIPPEPERLEGLLDTADYLWAHFPECAGAGGRRPPATDLSFLKRIRTEIDPFLKLWEITLEELTGSLTYNKNSKNF

SEQ ID NO: 55049 - DNA, 327 bp, Unknown
  Obtained from environmental sample
  misc_feature (1)..(327): n is a, c, g, or t
atgataaacgatgaaataaccgcaataaaagacagtatcttaaaaactgtgggcgaaaattgtgaaaaaatcattctctttggttcatatgcctatggaatgcccagagaaggcagcgactatgatgtctttgtcattcttaaagatggtacagaaaaacctatcttggttttacaaaatatataccgaggcttgtctcaaaacccaaattacaaagcggttgatgtccttgcaaattataaaagccgctttgaagtaagaagcaaattaccaactattgaaaaaactattgcccaaaaaggaattgttctctatgaccacgcttga

SEQ ID NO: 55050 - protein, 108 aa, Unknown
  Obtained from environmental sample
  DOMAIN (2)...(104): Nucleotidyltransferase domain
  misc_feature (1)..(108): Xaa is any amino acid
MINDEITAIKDSILKTVGENCEKIILFGSYAYGMPREGSDYDVFVILKDGTEKPILVLQNIYRGLSQNPNYKAVDVLANYKSRFEVRSKLPTIEKTIAQKGIVLYDHA

SEQ ID NO: 55051 - DNA, 738 bp, Unknown
  Obtained from environmental sample
  misc_feature (1)..(738): n is a, c, g, or t
ttgctggagcttgtaaacgccgccggtgaatatcaaaacacccgtgaaggactgctcgaatttttggaagacatcgaacttgaccgttcaatggaagacaacgcaaacgcaaataaatccggcgacttgcaaaacgccgtaacgcttattacttttcacaacaccaaaggtttggaattcaaacgtgtaataatgacagggcttgaacagggtatctttccaagagaagacaaaaaagacgatgaacttgaagaagagcgcaggcttttttatgtgggagccacccgcgccatggacgaactatatttgacaacctgcgcagagcggcgaatgtacggaagaaccgcacctgcgcagccatcgctgtttttgcgagagatagacagaagctgtctgcaaataaaagaacttccgccgacgcaaggcactgcgccgcaatacgcaaacaaaagatcattcatcggtagaaactttaatccgcttaatccgcaaagcctgaaagcgagcggcgtaagtagcggcgcaaaaagcaaagtaaatgcagagcttgaagaacgtgcaggctggcggatagggcagcgtttgtttcacgaggatcacggttacggcgctgtcgtgggaataaaggacagcgaggacggacccgtcgttcatgttcgtttcgattcagggttggataagcgatttttaagtgagattcaaggcagggcttatgagaaagtaggggaagaatattaa

SEQ ID NO: 55052 - protein, 245 aa, Unknown
  Obtained from environmental sample
  misc_feature (1)..(245): Xaa is any amino acid
MLELVNAAGEYQNTREGLLEFLEDIELDRSMEDNANANKSGDLQNAVTLITFHNTKGLEFKRVIMTGLEQGIFPREDKKDDELEEERRLFYVGATRAMDELYLTTCAERRMYGRTAPAQPSLFLREIDRSCLQIKELPPTQGTAPQYANKRSFIGRNFNPLNPQSLKASGVSSGAKSKVNAELEERAGWRIGQRLFHEDHGYGAVVGIKDSEDGPVVHVRFDSGLDKRFLSEIQGRAYEKVGEEY

SEQ ID NO: 55053 - DNA, 540 bp, Unknown
  Obtained from environmental sample
  misc_feature (1)..(540): n is a, c, g, or t
atgtttatgacaatagacgatgtaaaccgtgaaatcgaaaaaatgattctttccgccagcggctggcgcggaatttntgcggcggataactctggaaatcccgatgaagaaaataaaacggcagaaattaccggtgttcataaaattattacaggagcggcagcttatattttttccgaatatctgcataaatcgaaaaataatccattggttctgctgggcatggatacgcgccctacaggcagggcagttgcacaaacaatgattcctgttttgcttgcttccggctgcaatgtgcgtttttcgggctatacagccgcgccggaaattatggcatgggcgcgcggaactgcgaacgccgcgggatttatctatatatcagcaagccacaacccggttggacataacggaattaagttcggtcttacggacggcggagtgttggcggcacaggagacaaacaaacttatcgcagatttccgcttgtttttaaaaaaagacgacagtattcaaaaacaggcaacttgctggagcttgtaa

SEQ ID NO: 55054 - protein, 179 aa, Unknown
  Obtained from environmental sample
  DOMAIN (14)...(166): Phosphoglucomutase/phosphomannomutase, alpha/beta/alpha domain I
  misc_feature (1)..(179): Xaa is any amino acid
MFMTIDDVNREIEKMILSASGWRGIXAADNSGNPDEENKTAEITGVHKIITGAAAYIFSEYLHKSKNNPLVLLGMDTRPTGRAVAQTMIPVLLASGCNVRFSGYTAAPEIMAWARGTANAAGFIYISASHNPVGHNGIKFGLTDGGVLAAQETNKLIADFRLFLKKDDSIQKQATCWSL

SEQ ID NO: 55055 - DNA, 1314 bp, Unknown
  Obtained from environmental sample
  misc_feature (1)..(1314): n is a, c, g, or t
atgcgcgaagccgactatcctccctatcttgccccgctcaacgacgaacaacgccgcgccgttctgcacacggggaagcccctgctgatactggcgggagcgggttcgggcaaaacaatagttatcactacaaagatagcgtggctaatcagagagcggggaatggatccgcgttcaattttggcggtaacatttacaaacaaagcggcaagagaaatggcggaacgagcaaagcagattgacgagagagccgagaacgcaatgctgaggactttccattcttttggagcgtggttcttgcggcgcaacggcagtcttatcggtcttgattcggggtttaccatttacgacgatgatgatgtcgtatcgcttctctcctctattttggaaaacatacccaaagccgatgtaaaacattacgctcacaacatttccagagcgaaagattattttctctcccccgacgatcccgagcttgcgattatcgatcacaacaaaaaattccgcgacatttacaagcgatacgaagagcgcatggcgcagattggcaatgtcgatttcggcgatttgataaaaaaacccgtggagattttacgcagtcagccggaagtggcgcggcgttttcatgagcgctttcaggtaataatggtggacgagtatcaggacgcaaacgtggcgcagttcaggctgttaaaagaattgtgcggcgctgatacctatgtttgtgtggttggcgatgatgaccagtccatttaccgtttccgcggcgcggaagtaaaaaatattcttgagtttccagaccgtttttcaggcgcggacattatccgccttgaacaaaattaccgctcgacatcttccattttgaaagttgcgtcttccgttgtcgattacaaccacggacgcttgggaaaaactctccgcgccgaaaaaggagacggacctgcgcccgcgcttgtctatcttcacgatcaaaacgaggaagcgtctttttgcgccgataaaatcgccgcctccgtaaaaaagaaagaaacagcatggtcggattgggctatcctttaccgcaccaatgcgcaatcggcagtgtttgaaactgtttttatgcgaaagagtatcccctaccgagttatcggctctttaagattttatgaacgtgaagaaataaaagactctctcgctcttttggctttccttgtaaatccccgtgatgaagtcgctttccgccgtgttgtaaacaaacccacaaggggcgtaggagcggcgacagtcgataagctaacgggaagcttgcgccgaacacaacggcgacttgcttga

SEQ ID NO: 55056 - protein, 437 aa, Unknown
  Obtained from environmental sample
  DOMAIN (13)...(437): UvrD/REP helicase
  misc_feature (1)..(437): Xaa is any amino acid
MREADYPPYLAPLNDEQRRAVLHTGKPLLILAGAGSGKTIVITTKIAWLIRERGMDPRSILAVTFTNKAAREMAERAKQIDERAENAMLRTFHSFGAWFLRRNGSLIGLDSGFTIYDDDDVVSLLSSILENIPKADVKHYAHNISRAKDYFLSPDDPELAIIDHNKKFRDIYKRYEERMAQIGNVDFGDLIKKPVEILRSQPEVARRFHERFQVIMVDEYQDANVAQFRLLKELCGADTYVCVVGDDDQSIYRFRGAEVKNILEFPDRFSGADIIRLEQNYRSTSSILKVASSVVDYNHGRLGKTLRAEKGDGPAPALVYLHDQNEEASFCADKIAASVKKKETAWSDWAILYRTNAQSAVFETVFMRKSIPYRVIGSLRFYEREEIKDSLALLAFLVNPRDEVAFRRVVNKPTRGVGAATVDKLTGSLRRTQRRLA

SEQ ID NO: 55057 - DNA, 441 bp, Unknown
  Obtained from environmental sample
  misc_feature (1)..(441): n is a, c, g, or t
atgctgtccgatgcgatgaccagctatggggataatattaccgaaaagcaattggaaatcctggcttctggctgcttgtcgcctcaccacgcaacacaattccgcgcgtttgtaaagcaaatacgcaatcggtatgcgctgtccgctatcataaatggcagtcagaaatggcctaacaagcctgaagacagggacgcgctttattttcttgcccagagttttaaagcacagcttgtcaaggaactgccgtccgataaaaacaacctttccgctgcgtcccaggatttggcgtttcgcgcaaaatcgctgatgaaggatttggcgaatatcagcctggaaatcgcacagatgacggtatcttcggaagatgcccaggttctgcccgactggttcattattgaggttatacgggatttacccagattggcggcaaaaaaataa

SEQ ID NO: 55058 - protein, 146 aa, Unknown
  Obtained from environmental sample
  misc_feature (1)..(146): Xaa is any amino acid
MLSDAMTSYGDNITEKQLEILASGCLSPHHATQFRAFVKQIRNRYALSAIINGSQKWPNKPEDRDALYFLAQSFKAQLVKELPSDKNNLSAASQDLAFRAKSLMKDLANISLEIAQMTVSSEDAQVLPDWFIIEVIRDLPRLAAKK

SEQ ID NO: 55059 - DNA, 1119 bp, Unknown
  Obtained from environmental sample
  misc_feature (1)..(1119): n is a, c, g, or t
atgaaaattaatcttcaaaaaggaataacccttttaaacagcggtcttactccttccgtgataaacgcgctttcttcagtcgccgcgattttagtcggcttgatcgccggttttataattttattgttaagcaacgcgtcgcaagccgggcaggggttcggcgccattttagcgagcggtttttcaaatatgaaccagcttgggcaggttctttactttgccaccccaataattatgacgggtctttccgtaggcttttcaagcagaacgggactttttaacattggagccgcggggcaatttattacaggcgcttacgcggctgttcttgtcggcgtaaaatgcgattttcttcccgggcatttgcattggatagccgctttagccgccgccgttcttgccggcgctctntggggcgctattcccggtttcttcaaagccgtctttaatgtgaacgaagtaatagcctgtataatgatgaattacacaggcacttatctggtaaattatctcgtaacaaaaacagtttttgattctctgcggaatcagagtatgcgattagcggagacagccaatcttccaaagatgggaatgaattatattttccgcgacggctataatgtttcaagcgcgaactcaggattttttatcgctattttattcgcggtattgatctatgttatcctagaaaaaactactttcggttacgagcttaaagcctgcggttttaaccgcgaagccgcccgttacgccggaattaacgaaaagaaaagtattatcctaagcatgacgattgcgggcgctcttgcgggacttggcggcgcgttgttgtacatggcaggttcaggcaaaggtatcactgttgttgacgtgcttgctcaggaagggtttaacggcattcccgtcgctcttttgggactgaataatcctctgggaataattttttccggtatgttagtcgcgtatttaaacgtaggcggttttaatatgcagttgtacaatttcgctccgcaggtaatcgaaataattataagcgtaataatttatttcagcgcgtttgcgctccttgtaaaaaactttttaaactcccttaaaaaacgaatgggaggcgaaacatga

SEQ ID NO: 55060 - protein, 372 aa, Unknown
  Obtained from environmental sample
  SIGNAL (1)...(28)
  DOMAIN (66)...(352): Branched-chain amino acid transport system / permease component
  misc_feature (1)..(372): Xaa is any amino acid
MKINLQKGITLLNSGLTPSVINALSSVAAILVGLIAGFIILLLSNASQAGQGFGAILASGFSNMNQLGQVLYFATPIIMTGLSVGFSSRTGLFNIGAAGQFITGAYAAVLVGVKCDFLPGHLHWIAALAAAVLAGALWGAIPGFFKAVFNVNEVIACIMMNYTGTYLVNYLVTKTVFDSLRNQSMRLAETANLPKMGMNYIFRDGYNVSSANSGFFIAILFAVLIYVILEKTTFGYELKACGFNREAARYAGINEKKSIILSMTIAGALAGLGGALLYMAGSGKGITVVDVLAQEGFNGIPVALLGLNNPLGIIFSGMLVAYLNVGGFNMQLYNFAPQVIEIIISVIIYFSAFALLVKNFLNSLKKRMGGET

SEQ ID NO: 55061 - DNA, 1518 bp, Unknown
  Obtained from environmental sample
  misc_feature (1)..(1518): n is a, c, g, or t
gtggcggactacattgtagagatggtcgggattacaaaaatatttcccggcatcgttgccaatgacaatattactcttcaattaaaaaaaggggagattcacgccttgttaggtgaaaatggggcgggcaaatcaacccttatgagcgttcttttcggcctgtatcaggctgaaaagggcgaaattaaaaaaaatggcgaagttgtccatattaacgggccgaatgacgcaagaagactgggaatcggaatggttcaccagcattttaaacttgttcataattttacggttctggaaaatattattcttggcgcggaaacagtcaaatacggaatgttaaaactggacgacgcccgcgcccagatagttgaattatccaaacgctacaaacttgaaatcgatcccgacgctcttatttccgacattactgtcggaatgcagcagagggttgaaatccttaaaatgctttaccgcgaaaacgaaatattaatttttgacgagccgaccgcggtgcttacgccgcaggaaatcgaagaattaatgcacataatgaaaaatcttatcgcggaaggcaaatcgattttgtttatcacccataaattggatgaaataaaagctgtcgccgaccgctgtaccgttcttcgcaaaggcaaatacataggaacggtagatgtcgcctctgtctcgaaagaagagttatctgaaatgatggtaggcagaaaagtaaatctgtctgtagaaaagacggaacggcaagcaggtgatgtaattcttaaagttgaaaatcttacggtaaaaagcaaacttcacgataaggcgcttgtaaacaacgcaagttttgaagtccgctccggtgaaatcctttgcattgcgggaattgacgggaacggacagcaggagctaatccatgcccttgccggaatgacagaatcaaccggacgcgttttccttgagggaaaagaaattacacataacgatatacgctcaaggggcatggctcatatccccgaagacaggcataaacacggtcttgtgttggactacaaccttgcttttaatcttgttttacaaagttattataccgaccgtttccagaaatacggttttcttaaatttgacgagatttataaatacgccgacgaactgattgaaaaatttgacattcgttcaggacaaggagcgtattcaattacgcgaagtatgtcgggcggcaaccagcagaaggcaatcatcgcgagggaaatatcccgcgattcgcgcctgcttgtcgcagttcagccgacaagagggcttgatgtcggcgctattgagtatatccacaaacagcttgtggcggagcgcgacaagggaaggggagtgcttttagtttctcttgaacttgatgaagtaatggatgtcagcgacagaattcttgttatatttgaaggaaaaattgtcgccgatgtcaaaccaaaagaagtaagttacaaagagcttggactttatatggcggggtccgcaaagcaggaagtagcatga

SEQ ID NO: 55062 - protein, 505 aa, Unknown
  Obtained from environmental sample
  DOMAIN (285)...(476): ABC transporter
  misc_feature (1)..(505): Xaa is any amino acid
MADYIVEMVGITKIFPGIVANDNITLQLKKGEIHALLGENGAGKSTLMSVLFGLYQAEKGEIKKNGEVVHINGPNDARRLGIGMVHQHFKLVHNFTVLENIILGAETVKYGMLKLDDARAQIVELSKRYKLEIDPDALISDITVGMQQRVEILKMLYRENEILIFDEPTAVLTPQEIEELMHIMKNLIAEGKSILFITHKLDEIKAVADRCTVLRKGKYIGTVDVASVSKEELSEMMVGRKVNLSVEKTERQAGDVILKVENLTVKSKLHDKALVNNASFEVRSGEILCIAGIDGNGQQELIHALAGMTESTGRVFLEGKEITHNDIRSRGMAHIPEDRHKHGLVLDYNLAFNLVLQSYYTDRFQKYGFLKFDEIYKYADELIEKFDIRSGQGAYSITRSMSGGNQQKAIIAREISRDSRLLVAVQPTRGLDVGAIEYIHKQLVAERDKGRGVLLVSLELDEVMDVSDRILVIFEGKIVADVKPKEVSYKELGLYMAGSAKQEVA

SEQ ID NO: 55063 - DNA, 405 bp, Unknown
  Obtained from environmental sample
  misc_feature (1)..(405): n is a, c, g, or t
atggacgtaatcttcgcgtgcggaggggccgtcggcaactctgtaatggcggcggctgagcaggccggtaaaaaagtaattggcgttgacgtggatcagtccggcgaatctcccaccgtaattacttcggcgatgaaggggcttcaggtttccgtttatgattgtattgccgatttttacaacggaaaattccccggaggacagactttagtttttgccgccgataaccagggcgttggacttccaatgcagtcttctaaattccagtctttcagtaaggctgattacaacagtattttcgcaaagctggcatcaggcgacattccaagaatggataatcttgacagcgaaggaagccccaaagtagtccctgttaccatatccagggttacggaagtaaagtaa

SEQ ID NO: 55064 - protein, 134 aa, Unknown
  Obtained from environmental sample
  SIGNAL (1)...(19)
  misc_feature (1)..(134): Xaa is any amino acid
MDVIFACGGAVGNSVMAAAEQAGKKVIGVDVDQSGESPTVITSAMKGLQVSVYDCIADFYNGKFPGGQTLVFAADNQGVGLPMQSSKFQSFSKADYNSIFAKLASGDIPRMDNLDSEGSPKVVPVTISRVTEVK

SEQ ID NO: 55065 - DNA, 585 bp, Unknown
  Obtained from environmental sample
  misc_feature (1)..(585): n is a, c, g, or t
gtgaaatgctgggaatcgggagataacctgaaccagcagacatctgatttcataaagatcagcaatgaggcgatgaacggcatgaacgaaatagtgaacggcgccatgcaggaaataaaagtcgcggtaacccatgttgacgaaatgagtaccgaaaacaccaagaacttcgaggagcttaaaacagaatcatcaaaattcaaagtcgattcaaacgatgagaagaaaaagatcatcgtggtagacgatgagcaaaccgttcttaccctgacaaaggctatactggatgctgagtacgaagtgagtacggccagttccggtaaacaagccctggctctgttcttccagggttatactccggatttagtgttattggatttatatatgcctgaaatgggcggatgggatacgtacctaaggatacgggatataaccaaattgcacaatgttccgatagcgatttactcggcttcggacgatccaaaggacagggtcaaggcgcaggaaattggcgcggttgactttatacataaacccgtcaaaaaggccgagctcctggacaaggcggcaaggctggtaaggtaa

SEQ ID NO: 55066 - protein, 194 aa, Unknown
  Obtained from environmental sample
  DOMAIN (76)...(190): Response regulator receiver domain
  misc_feature (1)..(194): Xaa is any amino acid
MKCWESGDNLNQQTSDFIKISNEAMNGMNEIVNGAMQEIKVAVTHVDEMSTENTKNFEELKTESSKFKVDSNDEKKKIIVVDDEQTVLTLTKAILDAEYEVSTASSGKQALALFFQGYTPDLVLLDLYMPEMGGWDTYLRIRDITKLHNVPIAIYSASDDPKDRVKAQEIGAVDFIHKPVKKAELLDKAARLVR

SEQ ID NO: 55067 - DNA, 486 bp, Unknown
  Obtained from environmental sample
  misc_feature (1)..(486): n is a, c, g, or t
atgtctgctggttcaggttatctcccgattcccagcatttcacccgcgcctttttttaccgttacgcttatctctttcaggcggcctatggagtccagtatttgcttcccgcctgtttcctgttcttccatcgcgttacggatagtttcttcatgttgtgaaaccgtttttactcccgtctcaatagcctcaaagcgggaaataacctcgtttgaagaagctgtaatactgtctatggacgcttttatctttttcagcatcgccgctgtcgttttcgactgctcgcttgacgattccgcaagcttgcgaatctcgtcggcgacaacggcaaaccctttccccgcttctcccgcgtgggccgcttcaatagcggcgttcatcgaaagcaaattagtctggctggcgatattgtccataaccgcgttgatttccaaaagcccttcggagtccttcgctatttcctgtattttctccgccactgcttga

SEQ ID NO: 55068 - protein, 161 aa, Unknown
  Obtained from environmental sample
  misc_feature (1)..(161): Xaa is any amino acid
MSAGSGYLPIPSISPAPFFTVTLISFRRPMESSICFPPVSCSSIALRIVSSCCETVFTPVSIASKREITSFEEAVILSMDAFIFFSIAAVVFDCSLDDSASLRISSATTANPFPASPAWAASIAAFIESKLVWLAILSITALISKSPSESFAISCIFSATA

SEQ ID NO: 55069 - DNA, 819 bp, Unknown
  Obtained from environmental sample
  misc_feature (1)..(819): n is a, c, g, or t
atgaaacataaaattgatgcgctgaccaacaccggtcatgaactttccgccaatatgggtaagacttccagatcggtagatcatatttcggtaaatttcgacggcatgaagggtaaaatgagcaagcaggaagaaagcgccgccgaagcggataaagcggtaaaaaatattaaataccttattgacaatctgaataagctgatagaagaacagtctgaaggaattaatacgtcgtcctccgcgattgaagaaatgacagctaatattaattccgtaaccaaaacccttatagaaaacagcaaaaatgttaccgaattggcagaagcgtcaggaaacggaaaggtcggagttcaagcagtggcggagaaaatacaggaaatagcgaaggactccgaagggcttttggaaatcaacgcggttatggacaatatcgccagccagactaatttgctttcgatgaacgccgctattgaagcggcccacgcgggagaagcggggaaagggtttgccgttgtcgccgacgagattcgcaagcttgcggaatcgtcaagcgagcagtcgaaaacgacagcggcgatgctgaaaaagataaaagcgtccatagacagtattacagcttcttcaaacgaggttatttcccgctttgaggctattgagacgggagtaaaaacggtttcacaacatgaagaaactatccgtaacgcgatggaagaacaggaaacaggcgggaagcaaatactggactccataggccgcctgaaagagataagcgtaacggtaaaaaaaggcgcgggtgaaatgctgggaatcgggagataa

SEQ ID NO: 55070 - protein, 272 aa, Unknown
  Obtained from environmental sample
  DOMAIN (62)...(255): Methyl-accepting chemotaxis protein (MCP) signaling domain
  misc_feature (1)..(272): Xaa is any amino acid
MKHKIDALTNTGHELSANMGKTSRSVDHISVNFDGMKGKMSKQEESAAEADKAVKNIKYLIDNLNKLIEEQSEGINTSSSAIEEMTANINSVTKTLIENSKNVTELAEASGNGKVGVQAVAEKIQEIAKDSEGLLEINAVMDNIASQTNLLSMNAAIEAAHAGEAGKGFAVVADEIRKLAESSSEQSKTTAAMLKKIKASIDSITASSNEVISRFEAIETGVKTVSQHEETIRNAMEEQETGGKQILDSIGRLKEISVTVKKGAGEMLGIGR

SEQ ID NO: 55071 - DNA, 489 bp, Unknown
  Obtained from environmental sample
  misc_feature (1)..(489): n is a, c, g, or t
gtggcggtaaaaggaaaagctggggatgtggtaaccgttctgattatggaagccgcaaaggcggatagcaaaacccaaactcaaactgggaaaaagaacgatataagtgttgggcagcaagctgctgtgggcaataaactttttagctggctacccggttttggagttaaaggttcggcagatattaactacgatggcaaaggaaccaccgcacgaaatggagaattgaaagcaaccgtaacagcacgcataacagaagttttagacaacggaaacctgctaattgaaggatctaaactcgttgccataaacaacgaagaagagattttggaggttagcggcacaataagagcagacgatatcaatcccgacaatacagtatatagctataaaatagccgaggcagttatccgttattctggaagtggaaccagttccgatgcggcaaagcctgggttaataacaagattttttaattggattttctag

SEQ ID NO: 55072 - protein, 162 aa, Unknown
  Obtained from environmental sample
  DOMAIN (1)...(160): Flagellar L-ring protein
  misc_feature (1)..(162): Xaa is any amino acid
MAVKGKAGDVVTVLIMEAAKADSKTQTQTGKKNDISVGQQAAVGNKLFSWLPGFGVKGSADINYDGKGTTARNGELKATVTARITEVLDNGNLLIEGSKLVAINNEEEILEVSGTIRADDINPDNTVYSYKIAEAVIRYSGSGTSSDAAKPGLITRFFNWIF

SEQ ID NO: 55073 - DNA, 1164 bp, Unknown
  Obtained from environmental sample
  misc_feature (1)..(1164): n is a, c, g, or t
ttggattttctagaaacctgcataacaaaaaaaggagttggtatgcgaatagacgacgaaaagaagtacaaaataggctggattgagctaaccattgccgtttgcattttgcttgcgattttggtttccaatgcgagcggagcaagggtcaaagacatagcaacgctggaaggcgtttctgagcagcaactagttggctatgggctagttgttgggcttgccggcacaggagacggcacccgaacccaattcacggttcaatctgttgcaaatatgctgcaaaagatgggcatagttgttaatcccgcagatttgcggcttagaaacgtggctgctgttatggtaactgcaagtttgcccacctttgttaagcccggtaaaaaaatagatgtgaacatttcaagccttggcgatgctcgctcgcttgaaggaggaacgctcttaatgaccccccttcaaggttccgatggcgaatactatgctcaggctcaaggagcaattaaccttggctcgctttctgcaagaacaggtcgcaatagcttcaaaaaggggcacaccaattctggaacactgccaaatggagcggttgtgtataaagagattgaaagcgcaaacttaaaaagcggcacgcttcgctgggtactttcaagcccagatttcacaagcgcagtggcaatggcaaatgcgataaacggggttttccctggtgcagcaagggcagaagatgcttctacagtattggtgaatgtgccggaaaatatgaaaaacgactatatgtctttcatagctcgtgccgaagttgctgagtttaatccaaacacaaattcacgcattgtgctaaacggaaaaacaggaacagtggttagcggagcaaatgttcaaatagacgaagttgccgtttcacacggaagcataacaattcaaattgccaatacgcaagaagcagcaccgccaactttcatagggcaggcaactctgataaacaatcagcaattgaatgtgcaggaaccacgtacagaaacacgggttttcccagctgtcacaaatgcgggtcagctagctcaagccttgaacggacttggtgtttcgccgcttgatataatctcaattttccaagctattaaaaaggcaggagcattgcacgcagagttggttgttatgtaa

SEQ ID NO: 55074 - protein, 387 aa, Unknown
  Obtained from environmental sample
  DOMAIN (49)...(387): Flagellar P-ring protein
  misc_feature (1)..(387): Xaa is any amino acid
MDFLETCITKKGVGMRIDDEKKYKIGWIELTIAVCILLAILVSNASGARVKDIATLEGVSEQQLVGYGLVVGLAGTGDGTRTQFTVQSVANMLQKMGIVVNPADLRLRNVAAVMVTASLPTFVKPGKKIDVNISSLGDARSLEGGTLLMTPLQGSDGEYYAQAQGAINLGSLSARTGRNSFKKGHTNSGTLPNGAVVYKEIESANLKSGTLRWVLSSPDFTSAVAMANAINGVFPGAARAEDASTVLVNVPENMKNDYMSFIARAEVAEFNPNTNSRIVLNGKTGTVVSGANVQIDEVAVSHGSITIQIANTQEAAPPTFIGQATLINNQQLNVQEPRTETRVFPAVTNAGQLAQALNGLGVSPLDIISIFQAIKKAGALHAELVVM

SEQ ID NO: 55075 - DNA, 1290 bp, Unknown
  Obtained from environmental sample
  misc_feature (1)..(1290): n is a, c, g, or t
atgaattttccaccattaaaagagcaaatgtcaaagctcacacgcggggtgcaagaaattgtccctgaacctgaatttgcaaaaaaaattcagaagtccatagatacgggcgttccgcttcgcattaagctcggtgttgacccaaccgcaccagatgtacatctagggcacactgtggttatgcgcaaactgcggcagtttcaggatatggggcatcaggttattttgatagttggggattataccgcaatgataggcgacccaagtgggcgtaacaaaacacgtccccgccttagccacgaacaagttatggaaaacgccaaggaatatcaggagcagtttttcaaaatagtgaaaaaagagcaaactgaaattcgctataatggagaatggctcggaaaaatgtcttttgataaaattacagaacttatgagcaacatcacagttgcccaaatgctggaaagaaaagattttaaaaatcgctataagaatgaacaagagattagtttgcacgagtttttataccctctaatgcagggttacgatagcattgcgataaaaagcgatattgaactcggcggaacagaccaaaaattcaacgttctgtgcgggcgtgaattgcaggagcgagaggaaatggagccacaaataggcttgtttatgcccatacttctcggcactgacggcgagcaaaaaatgagcaagtcgcttggcaactatgttggcataaacgaggcggcagatacaatgtaccataaaatttacaatatcacagatgctttagttgaaagttggtttgaattattaacagatattcccaaagaaaactatgaggctctgataaaggaaaatattttaaacgcaaaaaaagaacttgcctctgatatagttaagcaatatcacggctctgccgcggcagaggcggctgtagaaaaagaaaaagccattcacagcggcgatattttgccaagcgatacgccaacggtaaagctagaaactggcaattacggcattttggatttgctggtagctgccggagcctttgcgagcaaaggcgaagcccgccgcatgattcagaacaacggcgttaaaataaatgggtctgctgttgcagaccaaaatatgagtgtcgctgtggggagtggtgaaattgttttgcaaacgggcaagcgccaagttctacaagattacataacaaccaactctgcgtgcaatgctcctgcctttttaatagcttggaaaattgagattatatcaagcggcgaaacaccaagtccgttcaaggcttga

SEQ ID NO: 55076 - protein, 429 aa, Unknown
  Obtained from environmental sample
  DOMAIN (36)...(318): tRNA synthetases class I (W and Y)
  misc_feature (1)..(429): Xaa is any amino acid
MNFPPLKEQMSKLTRGVQEIVPEPEFAKKIQKSIDTGVPLRIKLGVDPTAPDVHLGHTVVMRKLRQFQDMGHQVILIVGDYTAMIGDPSGRNKTRPRLSHEQVMENAKEYQEQFFKIVKKEQTEIRYNGEWLGKMSFDKITELMSNITVAQMLERKDFKNRYKNEQEISLHEFLYPLMQGYDSIAIKSDIELGGTDQKFNVLCGRELQEREEMEPQIGLFMPILLGTDGEQKMSKSLGNYVGINEAADTMYHKIYNITDALVESWFELLTDIPKENYEALIKENILNAKKELASDIVKQYHGSAAAEAAVEKEKAIHSGDILPSDTPTVKLETGNYGILDLLVAAGAFASKGEARRMIQNNGVKINGSAVADQNMSVAVGSGEIVLQTGKRQVLQDYITTNSACNAPAFLIAWKIEIISSGETPSPFKA

SEQ ID NO: 55077 - DNA, 354 bp, Unknown
  Obtained from environmental sample
  misc_feature (1)..(354): n is a, c, g, or t
atgaagctgggctttcttatccccgtatacaggcacggcaaaaccgcttgttctctggctgaacgtcttgcggcttatgcgttgccaataatcatggtggacgacggcaacgacgcggaaaccaaagcgctccttgcggaatgcgccgccaaaacaccgggtgtttcgctggtaagcctggaaaaaaacagcggcaagggaggagccgttattgacggttttaaaaaagcggcggaacttgggttaactcatgtactccaaatagacgctgacggccagcatgatgagggaaagatccctttctttctggaagagtccgccaaataccctgacatgatcatcgcgtcgcgataa

SEQ ID NO: 55078 - protein, 117 aa, Unknown
  Obtained from environmental sample
  misc_feature (1)..(117): Xaa is any amino acid
MKLGFLIPVYRHGKTACSLAERLAAYALPIIMVDDGNDAETKALLAECAAKTPGVSLVSLEKNSGKGGAVIDGFKKAAELGLTHVLQIDADGQHDEGKIPFFLEESAKYPDMIIASR

SEQ ID NO: 55079 - DNA, 516 bp, Unknown
  Obtained from environmental sample
  misc_feature (1)..(516): n is a, c, g, or t
gtggttatccccaaaaaatggcgttatcctgaaagcctgccccttgacgcgcaaggaaagaaaaagaaagaaacgattgagtttcttttctcaggtgaaaaggaagttgcggataacgctattgttacaagcggcgcttttacaagcggcgctttaacgagcgaaggttttggcgcgctggacatggaaaaatttattgagaaaaccgaaaattccgtcagcgtggaatttgccattcccggtacaagcccgtattttgacggacattttccgggcttccccatcctcccggcggtagcccaggcggaattggttatccgtttagctgcgcgttattttggaacaggcatcagtccctctgaaataaagcgttttaaatttaccaaattaatccggcctgacgcgcctctcctgctcaaactgacaaaaaaagaaaaaacaatttcctttaatataagttctcctgaaaatgaaacagtttattcaacagggacagttattctgggggataaatga

SEQ ID NO: 55080 - protein, 171 aa, Unknown
  Obtained from environmental sample
  DOMAIN (52)...(164): FabA-like domain
  misc_feature (1)..(171): Xaa is any amino acid
MVIPKKWRYPESLPLDAQGKKKKETIEFLFSGEKEVADNAIVTSGAFTSGALTSEGFGALDMEKFIEKTENSVSVEFAIPGTSPYFDGHFPGFPILPAVAQAELVIRLAARYFGTGISPSEIKRFKFTKLIRPDAPLLLKLTKKEKTISFNISSPENETVYSTGTVILGDK

SEQ ID NO: 55081 - DNA, 1314 bp, Unknown
  Obtained from environmental sample
  misc_feature (1)..(1314): n is a, c, g, or t
gtgcgaaagatagtacagaaaaagatgccccggagtattccgctttcgacattcaaaaacgattcccggcctctttccacggttctttgttacgaaggcgcatggagcgatgctgtttaccatacctggggggattttcttgaaggcgttgcggaattgcgccggagtataaatgcggcaggcgcgcaaggcggcgaacaatggctgctccattgcgaagattgctggtactttcttctggcttttaccgccctgcttcagtgcaaaaaaaaggttctcctcagcgccaatgtaagtccggcttatattgcggaaatccgcggcggcggcggcggcgcggcggcgcacggtacggttcctttccttaccgatcagatttttcccgaaggtgaatgtccggagaacaccttccacattcctgcgattctcaaggcagtgcaaaaaacaggcaggctgataacaatccaaccggaagaaggaccggcgattaacgcggacgaaacatccatcattatgtatacatcgggaagcaccggaaagcccaaagcggtacaacagcggttgacggagtttgaagccgataaccgttttataatttcaaaatggggtgatgaattcctgaaacgtacattatgctccaccgtaagccagcatcacatttacggacttttattttctatctttttgccttttaccctgggagttccttttagaagaaaacggattgaatttcccgaagagatagaaaaactttccgatacgaagtacatgattattaccgtgccggccttcctcaagcgggcagtggaaatagaacgctcatccggccttaatttacaatcaccctggatatttacttccggcggggcgctcagttttgaaaccgctcaaaaaaccagcgaagtttttggcttctggccggtggaagtgtacggcagtacggaaacttccggcattgcctggaggcagtcggttaatggcccggaatggacagtctttgacaacgcgcagatcagtcaaaaccgggacggctgccttattatccgctcgccgtatatcaaagacccggcaggttttgaaaccgccgacatgatagaaatacgggaggacggacgttttctgctcaaggggcgtattgactcggtggttaaaatcgaggagaagcgcgtttccttttccgaaatggaaagccgtattctccagtccggccttgccgccgacgtatgcgtaatttttctggaagacaaacgccaataccttgccgccgcaatagttttttacaataaggggaaggaacattttaacggactttga

SEQ ID NO: 55082 - protein, 437 aa, Unknown
  Obtained from environmental sample
  DOMAIN (42)...(410): AMP-binding enzyme
  misc_feature (1)..(437): Xaa is any amino acid
MRKIVQKKMPRSIPLSTFKNDSRPLSTVLCYEGAWSDAVYHTWGDFLEGVAELRRSINAAGAQGGEQWLLHCEDCWYFLLAFTALLQCKKKVLLSANVSPAYIAEIRGGGGGAAAHGTVPFLTDQIFPEGECPENTFHIPAILKAVQKTGRLITIQPEEGPAINADETSIIMYTSGSTGKPKAVQQRLTEFEADNRFIISKWGDEFLKRTLCSTVSQHHIYGLLFSIFLPFTLGVPFRRKRIEFPEEIEKLSDTKYMIITVPAFLKRAVEIERSSGLNLQSPWIFTSGGALSFETAQKTSEVFGFWPVEVYGSTETSGIAWRQSVNGPEWTVFDNAQISQNRDGCLIIRSPYIKDPAGFETADMIEIREDGRFLLKGRIDSVVKIEEKRVSFSEMESRILQSGLAADVCVIFLEDKRQYLAAAIVFYNKGKEHFNGL

SEQ ID NO: 55083 - DNA, 708 bp, Unknown
  Obtained from environmental sample
  misc_feature (1)..(708): n is a, c, g, or t
atggatgaacgtggcatcccccttgcggaacttgaagcggcttccgacaaacttgccggcgaggggaaaacgccgatgtatgtcgccctaaacggcaaggccgcgggaattgtggcggtggcggatgtgcttaaaccttccagcaaggcggcgattgagcggcttcacaaaatgggaatcgaagtcgccatgatcaccggggacaacaaaatgacagctaacgccatcgccaaacaggttggcattgaccgcgttctcgcggaagttctgccgcaggataaatccgccgaagtgaagaaactgcaggagacgcctgttgaaaacaagcatggagaacagagcaaacattttgtagcaatggttggggatgggataaacgacgctccggcattagcgcaggcggacatcgggatcgctataggaagcgggacggacgtggcgatggaatccgcggacattgtgcttatgcgttccgacctgagcgacgttcccacggcgattaatctaagcaagcggacaatccgcactatcaagcaaaatctgttctgggcttttgggtataatgtgctgggcattcccattgcagccggcgtgttgtatctctttggagggcctctcctcaatccggttttcgccgccgccgccatgagtttaagttcagtatcggtgctgaccaacgcgctcagattgaaaagatttaaggcataa

SEQ ID NO: 55084 - protein, 235 aa, Unknown
  Obtained from environmental sample
  DOMAIN (1)...(144): haloacid dehalogenase-like hydrolase
  misc_feature (1)..(235): Xaa is any amino acid
MDERGIPLAELEAASDKLAGEGKTPMYVALNGKAAGIVAVADVLKPSSKAAIERLHKMGIEVAMITGDNKMTANAIAKQVGIDRVLAEVLPQDKSAEVKKLQETPVENKHGEQSKHFVAMVGDGINDAPALAQADIGIAIGSGTDVAMESADIVLMRSDLSDVPTAINLSKRTIRTIKQNLFWAFGYNVLGIPIAAGVLYLFGGPLLNPVFAAAAMSLSSVSVLTNALRLKRFKA

SEQ ID NO: 55085 - DNA, 513 bp, Unknown
  Obtained from environmental sample
  misc_feature (1)..(513): n is a, c, g, or t
ttggtcagcaccgatactgaacttaaactcatggcggcggcggcgaaaaccggattgaggagaggccctccaaagagatacaacacgccggctgcaatgggaatgcccagcacattatacccaaaagcccagaacagattttgcttgatagtgcggattgtccgcttgcttagattaatcgccgtgggaacgtcgctcaggtcggaacgcataagcacaatgtccgcggattccatcgccacgtccgtcccgcttcctatagcgatcccgatgtccgcctgcgctaatgccggagcgtcgtttatcccatccccaaccattgctacaaaatgtttgctctgttctccatgcttgttttcaacaggcgtctcctgcagtttcttcacttcggcggatttatcctgcggcagaacttccgcgagaacgcggtcaatgccaacctgtttggcgatggcgttagctgtcattttgttgtccccggtgatcatggcgacttcgattcccattttgtga

SEQ ID NO: 55086 - protein, 170 aa, Unknown
  Obtained from environmental sample
  misc_feature (1)..(170): Xaa is any amino acid
MVSTDTELKLMAAAAKTGLRRGPPKRYNTPAAMGMPSTLYPKAQNRFCLIVRIVRLLRLIAVGTSLRSERISTMSADSIATSVPLPIAIPMSACANAGASFIPSPTIATKCLLCSPCLFSTGVSCSFFTSADLSCGRTSARTRSMPTCLAMALAVILLSPVIMATSIPIL

SEQ ID NO: 55087 - DNA, 918 bp, Unknown
  Obtained from environmental sample
  misc_feature (1)..(918): n is a, c, g, or t
ttgtgtttggagggaatggaattgtataatatcgataaactttttgaagctgtcagcgcgaagggtcatgtgtgcgtaggtcttgatacagcggtggaatatgtcccctctgcggaacggaaacgggccgcctctgacgcagaagcggttctggcttttaaccttgcccttgttgatgcaacttttgacacctgtgcctgctacaaggtgcagatcgcctactacgaggaaatggggctggaggggctgggtgtttacgcgaagaccctgcggtacatacgcgaaaaaggcggcctggttatcgccgacataaaacgcggcgatatcgccgatacctgtctgcgttacgcgaaagctcatttctgtggggactttgaggccgattttgtcacgctttccccctacatgggcatggactcaatcgagccctggctttcttacgccgaacataacggcaaaggcgcctttgtgctgatgaggacgagcaacaaaggcatgagggattttgagtaccttgaaattgcgcctgacaaaaagcgcgtgtaccacgcggtgggcgataaactagcgacgcttgcagccgcgcattgcggcaaatacggctacggggcttttggcgccgttgtcggttgtaccgagcgtgatgaggccgccgaaatacgcaaaaattattccaatcttttttttcttatccccggctatggcgctcagggcggggcggcagatgacgctgcgctgcttttgcggaaggggaacggaggggtagtgaacgcctcgcgctccatactcaaggcctgggaggcggagttaaagaaatctggcggtgatgtgtcggcagcggcaaattcctttgccgcggaggccgcgcgtcgggcggcgattgagatgcgcgacgcgatacgagcggttaaaccctaa

SEQ ID NO: 55088 - protein, 305 aa, Unknown
  Obtained from environmental sample
  DOMAIN (22)...(273): Orotidine 5'-phosphate decarboxylase / HUMPS family
  misc_feature (1)..(305): Xaa is any amino acid
MCLEGMELYNIDKLFEAVSAKGHVCVGLDTAVEYVPSAERKRAASDAEAVLAFNLALVDATFDTCACYKVQIAYYEEMGLEGLGVYAKTLRYIREKGGLVIADIKRGDIADTCLRYAKAHFCGDFEADFVTLSPYMGMDSIEPWLSYAEHNGKGAFVLMRTSNKGMRDFEYLEIAPDKKRVYHAVGDKLATLAAAHCGKYGYGAFGAVVGCTERDEAAEIRKNYSNLFFLIPGYGAQGGAADDAALLLRKGNGGVVNASRSILKAWEAELKKSGGDVSAAANSFAAEAARRAAIEMRDAIRAVKP

SEQ ID NO: 55089 - DNA, 672 bp, Unknown
  Obtained from environmental sample
  misc_feature (1)..(672): n is a, c, g, or t
atggaagaaaattttgccgtgcgccgcgctatagagcttggcaaaaaagccggctgccatatccatatcgcccatgtctcgacaaaagaggcggcggggataatccgcgatgtaaaaaaagattctgttagctgtaatgattttttccttagctgcgaagctaccccacaccatatcggcgcaacagatgaagacgcgcactgcatgggagatgaaacttacggcagggtaaatcccccattgcgatcaaaggcagactgcgaggcggttatcgcggccttgagtgacggtactatcgacgctattgccacagaccacgcgccgcacagcgaaaatgacaaggccgccggaatgccgggctttaccggactggaaaccgcgtatgccgcaagtttatcaactctggtgcccggcatcaatttacagcggctttccgcgcttatgagcgcaaaccccgcgcgtatactgggccttaaagacaggggccgcgttgaaaaaggcctaagggcggatctagttatcgcggatacaggggcaaattggaaagttgagactgaaaaattcaagtcgcgggggaaatgcagcccccttgccggaaaaacattgcgggggaaaatattaatgacgtttaacgcagggaaaattgtgtttggagggaatggaattgtataa

SEQ ID NO: 55090 - protein, 223 aa, Unknown
  Obtained from environmental sample
  misc_feature (1)..(223): Xaa is any amino acid
MEENFAVRRAIELGKKAGCHIHIAHVSTKEAAGIIRDVKKDSVSCNDFFLSCEATPHHIGATDEDAHCMGDETYGRVNPPLRSKADCEAVIAALSDGTIDAIATDHAPHSENDKAAGMPGFTGLETAYAASLSTLVPGINLQRLSALMSANPARILGLKDRGRVEKGLRADLVIADTGANWKVETEKFKSRGKCSPLAGKTLRGKILMTFNAGKIVFGGNGIV

SEQ ID NO: 55091 - DNA, 1395 bp, Unknown
  Obtained from environmental sample
  misc_feature (1)..(1395): n is a, c, g, or t
atggcgaataaaggttatatcacacaaattatcggtcctgttgtggacgtgcgttttgatcaggggcaggttccccttattttgaacgcattgaaagtgaaaacaggcggcgaagggtttaaccgtgtcgtcactcttgaagtccttcaacatatcggcgacaaccgtgtgcgctgtgtcgcaatgtccgccgccgaaggactgtcccgtgcgcttgaggttgaggacacaggccgccccatcagcgtgccggttggcaaagaagtgttgggacggatgtttagcgtaacgggcgaccccattgacaacaaaggcgcattcactgcggcgcagtacgaatctattcaccgtaacgcccctgattttagcgaactgcgtccggcgaccgcgctgcttgagacgggaataaaagtaattgatttaatcgcgccttacgcgaagggcggaaaaatcggtctgtttggcggcgcgggagtagggaaaacagtcgttattatggaactaatccgcaacatagcgacagaacactcaggctattcggtgtttgccggagttggcgagcgttcaagggaaggagccgacctttggaaagaaatgactgagagcggcgttattgaaaaaacagcgcttgtcttcggtcagatgaacgaaccgcccggagcgagaatgagagtcgcgcttgccggtcttaccatggcggaacatttccgcgataaggacaaacaggacgtgcttctctttgtcgataacattttccgcttcattcaggcaggcgcggaagtttccgccctccttggacgtatccccagcgcagtcggctatcagccaacactcgccaacgaaatgggcagtcttcaggaaagaattgccagcacatcaaaaggatcgatcaccagtattcaagccgtttatgtccctgccgatgatcttaccgatcccgcgccggcgacaaccttcgcccacctggacgcaaccaccacgctttcgcgcaaaatcgtagagttgggaatttatccctctgtcgatccgcttgcttcaagttcgcgtattcttgacgcggcgatagttggcgatgagcactacaacaccgccagacgcacccagcanattttacaacgatacaaagaattacaggacataatcgccattttgggcatggacgaactttccgaggaagacaaactaacagtcgcaagggcaagaaagattcagcgattcttcagccagccattctttgtcggggaaaaatttacaggtattcccggacgctatgtgccggtcaaggagactgtacgcggcttcaaaatgatacttgacggcgaatgcgactcaattccggagcagtctttttacatggcaggaaccattgatgacgttcttgaaaaggcaaaataa

SEQ ID NO: 55092 - protein, 464 aa, Unknown
  Obtained from environmental sample
  DOMAIN (7)...(78): ATP synthase alpha/beta family, beta-barrel domain
  misc_feature (1)..(464): Xaa is any amino acid
MANKGYITQIIGPVVDVRFDQGQVPLILNALKVKTGGEGFNRVVTLEVLQHIGDNRVRCVAMSAAEGLSRALEVEDTGRPISVPVGKEVLGRMFSVTGDPIDNKGAFTAAQYESIHRNAPDFSELRPATALLETGIKVIDLIAPYAKGGKIGLFGGAGVGKTVVIMELIRNIATEHSGYSVFAGVGERSREGADLWKEMTESGVIEKTALVFGQMNEPPGARMRVALAGLTMAEHFRDKDKQDVLLFVDNIFRFIQAGAEVSALLGRIPSAVGYQPTLANEMGSLQERIASTSKGSITSIQAVYVPADDLTDPAPATTFAHLDATTTLSRKIVELGIYPSVDPLASSSRILDAAIVGDEHYNTARRTQXILQRYKELQDIIAILGMDELSEEDKLTVARARKIQRFFSQPFFVGEKFTGIPGRYVPVKETVRGFKMILDGECDSIPEQSFYMAGTIDDVLEKAK

SEQ ID NO: 55093 - DNA, 417 bp, Unknown
  Obtained from environmental sample
  misc_feature (1)..(417): n is a, c, g, or t
atgtccgctttatttaatttcgaggttcatacgcccagacggatcttttattcaggcaaggtacaggcaatcatcattggtcttgatgacggtgaaatcggaatatacgcaaaccattcacccttttccgcgcactctgttacgggcacactccgaattaaagacgaaggcggcaactggcgcatagcgtttgtctgcggcggcattctggaagtgaaagagcataaaaacgtactgatggttgaaagcgccgattggcctgaagaaattaacattgagcatgttcttgagacaaaaaagcaggccgaagaaacattgaaggaaacgaatttaagatttgagattaacaaagcgaaaaaaagacttcatcacgctgaatgcagactgaaggttttggaaacggcgaaaaaaaagtaa

SEQ ID NO: 55094 - protein, 138 aa, Unknown
  Obtained from environmental sample
  DOMAIN (4)...(89): ATP synthase, Delta/Epsilon chain, beta-sandwich domain
  misc_feature (1)..(138): Xaa is any amino acid
MSALFNFEVHTPRRIFYSGKVQAIIIGLDDGEIGIYANHSPFSAHSVTGTLRIKDEGGNWRIAFVCGGILEVKEHKNVLMVESADWPEEINIEHVLETKKQAEETLKETNLRFEINKAKKRLHHAECRLKVLETAKKK

SEQ ID NO: 55095 - DNA, 300 bp, Unknown
  Obtained from environmental sample
  misc_feature (1)..(300): n is a, c, g, or t
gtgacggacattacccgcaaaataatagagcaaatacttgctgttccgaaaggtaaggtttcctgttaccgtgatatagccctgaaagccgggcttccgaacggagcgcgccagactgtaagggttcttcattccatgtccgaaaaatacaatctgccatggtacaggataatccgttccaacggcagtattgctcttgccgaaggggagggaagggaactgcagataaaacttctgcgcagtgaaggagtggaagtttcgggtaatggaaagattgacatgggcagatacggagtttga

SEQ ID NO: 55096 - protein, 99 aa, Unknown
  Obtained from environmental sample
  DOMAIN (1)...(87): 6-O-methylguanine DNA methyltransferase, DNA binding domain
  misc_feature (1)..(99): Xaa is any amino acid
MTDITRKIIEQILAVPKGKVSCYRDIALKAGLPNGARQTVRVLHSMSEKYNLPWYRIIRSNGSIALAEGEGRELQIKLLRSEGVEVSGNGKIDMGRYGV

SEQ ID NO: 55097 - DNA, 552 bp, Unknown
  Obtained from environmental sample
  misc_feature (1)..(552): n is a, c, g, or t
gtggaagaacggcgtggcgcagagactgggccagggcaacgtcggcaccgttttcgtggcagggcaagacgtgtacatggcggggtcagtggaccacgccggagacacctccatgtggaaaaacggtacggcgcagagactgggcggccgcggctgggtccactccatttttgtgtccggcgacgatgtgtatatggcggggtgtctgtacggcaagacagacggggagccctacgtggccacgctgtggaagaacggcgagccgcagcgtttgggcgacgggaaagtcaactcttcggcaagctcggtctttgtgtcaggcaaagatgtgaaagatgtgtacgtggcggggtacgaagcggcgcaggaaggggtggcggcgatgctgtgggtcaacggcgaggccaagtgcctggccgaaggcaagaaattcggcgaggcccactatgtctccgtgtcgggcagcgacgtgtgcgtggccgggcgcgaggacaacgagcagggcaccaccgtggccacgctgtggaaaaacggtgtgccgcagcactttga

SEQ ID NO: 55098 - protein, 183 aa, Unknown
  Obtained from environmental sample
  misc_feature (1)..(183): Xaa is any amino acid
MEERRGAETGPGQRRHRFRGRARRVHGGVSGPRRRHLHVEKRYGAETGRPRLGPLHFCVRRRCVYGGVSVRQDRRGALRGHAVEERRAAAFGRRESQLFGKLGLCVRQRCERCVRGGVRSGAGRGGGDAVGQRRGQVPGRRQEIRRGPLCLRVGQRRVRGRARGQRAGHHRGHAVEKRCAAAL

SEQ ID NO: 55099 - DNA, 555 bp, Unknown
  Obtained from environmental sample
  misc_feature (1)..(555): n is a, c, g, or t
gtgtacagccgccctgacatcacgcccctggcgatgatgatcctgctgttaaccgcaatgatctgtattcccatttcggtgttgatatccaaaaaaattggtaaaaaacggacctaccagatatgtttcgtcgcgctttccaccgcttccatgatcatttttttactcggccaccgtttggggcccaactttttcctcggcatgatggtatacgccgggatcggcgtgggctttatgtatgtcgcccctttcgcaatgatacccgacgccgtggattacggcgcggcgcagaccggggaacgggacgaaggtgcctactacggcatttggacttttatttcaaaactcggaaccagtttttccgtgtttgtcagcgggttaattttgtcggcgggaggttatatcgcaaacgtcgcgcaaagcgattcggcaattttcgcgattaagctgattatcggccccattcccgccgtcattttaatcggcgccctgcttgtgattgaaaagtacccgttagacgaaaaatcgtttaacgccttacagaagacttcgtag

SEQ ID NO: 55100 - protein, 184 aa, Unknown
  Obtained from environmental sample
  misc_feature (1)..(184): Xaa is any amino acid
MYSRPDITPLAMMILLLTAMICIPISVLISKKIGKKRTYQICFVALSTASMIIFLLGHRLGPNFFLGMMVYAGIGVGFMYVAPFAMIPDAVDYGAAQTGERDEGAYYGIWTFISKLGTSFSVFVSGLILSAGGYIANVAQSDSAIFAIKLIIGPIPAVILIGALLVIEKYPLDEKSFNALQKTS

SEQ ID NO: 55101 - DNA, 963 bp, Unknown
  Obtained from environmental sample
  misc_feature (1)..(963): n is a, c, g, or t
atgaattatcttcccgtttccagcgattccctcaatcaagccgcgcaaattctgcgtaacggcgggcttgtagcgttcccaaccgagacagtttacggtcttggcgctgacgcttttaacgccgccgctgtggcgaaaatttttgaggctaaaaaccgcccttactttgatccgctgatcattcatatcgcctcgcttgactctcttgaaaaagcggcggatttatcaatattacgcgaagaagcccgccaaaaactttttacgctggcggaaaacctgtggcccggtcccctttccattattctgccgaaaaataaaaaaatacccggtatcgctaccgccgggctggaaaccgccgctatccgctttcccgaccacgaaaccgcgcgggaacttatttcgctttcaacaggagcggtagccgctccaagcgccaaccccttcggctctttaagccctacacgagccgaacatgtgcgggataagttaggtgataaaatagatatgattttggacggaggacccacccgtatcgggcttgaatctaccgtgatcgacataacgggcggctctgcttccgctcccgcaagcgtaaaaatattaagaccgggcggcacgccgaaagaggcgattgaaaaattaattggtcacgttgaggacggttctcctgttgccgatgtatcaggcggacttgtttctccgggacagctaaagagtcattacgcccctcatacgccgcttatcgctctcaatatagaagaaatcttacaaacagagtacgaaaaagacagcgcattcctcttttttgacgatcaagccaaaaacacatggatttcagcccaaaaaccgccaaaaaacgcaatttttagggttctttccgaaacagggcagattttggaagccgcctcgcgcttttttgaaacccttcatgaattggacaatggaaagtctcggccgatctga

SEQ ID NO: 55102 - protein, 320 aa, Unknown
  Obtained from environmental sample
  DOMAIN (206)...(320): SUA5 domain
  misc_feature (1)..(320): Xaa is any amino acid
MNYLPVSSDSLNQAAQILRNGGLVAFPTETVYGLGADAFNAAAVAKIFEAKNRPYFDPLIIHIASLDSLEKAADLSILREEARQKLFTLAENLWPGPLSIILPKNKKIPGIATAGLETAAIRFPDHETARELISLSTGAVAAPSANPFGSLSPTRAEHVRDKLGDKIDMILDGGPTRIGLESTVIDITGGSASAPASVKILRPGGTPKEAIEKLIGHVEDGSPVADVSGGLVSPGQLKSHYAPHTPLIALNIEEILQTEYEKDSAFLFFDDQAKNTWISAQKPPKNAIFRVLSETGQILEAASRFFETLHELDNGKSRPI

SEQ ID NO: 55103 - DNA, 435 bp, Unknown
  Obtained from environmental sample
  misc_feature (1)..(435): n is a, c, g, or t
gtgccgcccggtcttaatatttttacgcttgcgggagcggaagcagagccgcccgttatgtcgatcacggtagattcaagcccgatacgggtgggtcctccgtccaaaatcatatctattttatcacctaacttatcccgcacatgttcggctcgtgtagggcttaaagagccgaaggggttggcgcttggagcggctaccgctcctgttgaaagcgaaataagttcccgcgcggtttcgtggtcgggaaagcggatagcggcggtttccagcccggcggtagcgataccgggtatttttttatttttcggcagaataatggaaaggggaccgggccacaggttttccgccagcgtaaaaagtttttggcgggcttcttcgcgtaatattgataaatccgccgctttttcaagagagtcaagcgaggcgatatga

SEQ ID NO: 55104 - protein, 144 aa, Unknown
  Obtained from environmental sample
  misc_feature (1)..(144): Xaa is any amino acid
MPPGLNIFTLAGAEAEPPVMSITVDSSPIRVGPPSKIISILSPNLSRTCSARVGLKEPKGLALGAATAPVESEISSRAVSWSGKRIAAVSSPAVAIPGIFLFFGRIMERGPGHRFSASVKSFWRASSRNIDKSAAFSRESSEAI

SEQ ID NO: 55105 - DNA, 819 bp, Unknown
  Obtained from environmental sample
  misc_feature (1)..(819): n is a, c, g, or t
atgaaaaaaacgctttttttgctgtttttattcctctccgccgtcgtttttgcggacagtggactgcgaataaaagtggaaaataacaattccggtcttacaattactggttctacgggcagggcagattcactgtcaattcccgaaactattgacggaaaaaaagttaccgtaataagcgacggcgcttttatcggtaagggattaaaagatgttagtattcccgattctgtaaccgttatcggggacggagcgttttcttttaacaggttggaaaccgtaacaatagggaaatatgttacgaccatcggtagaggagcgtttaccggtaacaaactggctaaagtgacattgggctcaaatatcacagttatcggcaagggggcttttttcaacaatttgctggaaaccatagttttgcccgcttctttaaccttaatcgacgattacgctttctttaacaataaaattaaatctgttgaaatccccgcaaaagttacaacaataggggagggtgctttttccggcaacaaatttacatcaatagtgattggttccggcgtaacaaccataagggacggcgctttttacaataattttataacgaacgttacaattccatcgtcagttcaaactttgggaaaccgcgcttttgacacacgtccgcccgacggacgaataaggggcagtattgtatttgccgatgtcagcggaaatgttctgtatacaacggcgaataattttgacgcctactattcttccaatggaaaaaaaccaggcaaatatttgttaagcgacggaagctggaaaatgcagtaa

SEQ ID NO: 55106 - protein, 272 aa, Unknown
  Obtained from environmental sample
  SIGNAL (1)...(18)
  misc_feature (1)..(272): Xaa is any amino acid
MKKTLFLLFLFLSAVVFADSGLRIKVENNNSGLTITGSTGRADSLSIPETIDGKKVTVISDGAFIGKGLKDVSIPDSVTVIGDGAFSFNRLETVTIGKYVTTIGRGAFTGNKLAKVTLGSNITVIGKGAFFNNLLETIVLPASLTLIDDYAFFNNKIKSVEIPAKVTTIGEGAFSGNKFTSIVIGSGVTTIRDGAFYNNFITNVTIPSSVQTLGNRAFDTRPPDGRIRGSIVFADVSGNVLYTTANNFDAYYSSNGKKPGKYLLSDGSWKMQ

SEQ ID NO: 55107 - DNA, 528 bp, Unknown
  Obtained from environmental sample
  misc_feature (1)..(528): n is a, c, g, or t
atgaaaaaaactattatcctaagttctgtcgtgatactgatcgggctgctcatcgctctggggccgcagtttctgtttaaagtctgtaatctatataatatgacgtcgtcgtcatccgtaaatgcggacgactgctgcgatgaacccgcacccttaaacgccgaggatgattgctgcgctgaccccgtgcaaaacgattgctgcgctccttcggcctcggccgacggtatacctatatgcaactggtcggcgcaggctgaaataggcattggattgctaatcgccgcgttaggcgcctgcatgattgtttttaccgatcctaaaacgaatttaggttttcttattggcatttttttcgcaagcattatcgctctagccataccccattttcttattggcggctgttcaaatatgaccatgaagtgccatagggtagcttttccggctcttaccgttgaaagcattattttactggtgttttcggcgataatgattaccattagcgcaatgaggaaagaatctacctga

SEQ ID NO: 55108 - protein, 175 aa, Unknown
  Obtained from environmental sample
  SIGNAL (1)...(19)
  misc_feature (1)..(175): Xaa is any amino acid
MKKTIILSSVVILIGLLIALGPQFLFKVCNLYNMTSSSSVNADDCCDEPAPLNAEDDCCADPVQNDCCAPSASADGIPICNWSAQAEIGIGLLIAALGACMIVFTDPKTNLGFLIGIFFASIIALAIPHFLIGGCSNMTMKCHRVAFPALTVESIILLVFSAIMITISAMRKEST

SEQ ID NO: 55109 - DNA, 1125 bp, Unknown
  Obtained from environmental sample
  misc_feature (1)..(1125): n is a, c, g, or t
atgtacatggttgagaaattccccaaagtatgcaataactataccatggcggcacaaacagcggttattggggcaggcgcgtggggaacggcggttgccaaagttattgcggaaaaagggaaagatgttgtcatctggagctttgaaaaagacacctgtgacgacataaacaagcgtcatgtaaattcccgctatttaccggacgtagaactgccggagaatctgcgggcaagcaccgaccttgtggaaaccgcttccggacgcgaattccttatcttggccgtcccttcgctttttttactgaatacagcaaaacagatccttgacgcaccttcgattcgggaaggaacaaccgccatcgctgttctgactaagggttttttatcgacagacaaaggcccgcggcttatccttgaaacccttgaggattaccttccgggtttttaccggcagtctcttgtttacattgccgggccaagccacgccgaggaagtttcgcggggcaaaataaccggccttatcgccgccagcgaaaacgccaagaattccataaggttccgcgacctgctaaaaagcaaaggcctgtttgtcttttcatcatttgacgtgcgcggggttcaggtggccgccgccgccaaaaacgtcatcgccatcgcgttcgggatgctggacgcctttaagaccatgggcagcgaaggctctttcggcgattcgaatctgttcggcgacggaacagagtccctgcttttggccgcgggtctgaacgagatacaaaacctgggtatggcgatgggctctacccatccggaaactttttcttccatttccggcatcggcgatctggatgtcacctgccgatctgtctttggcagaaaccggcgtttcggaaaagagatcatcgagaaaaaaattcttgagccgttcaaaaaccttgacgatcttctggcgcgtataaacgatgtcggctatctgccggaaggcgccgcggcggcaaagcatgtcaaggttcttgccgaaaaacacaaacttaaaatgcccatcgccacgggcgtgtataatattttgaaccgcgaggttgagccggctgattttctggaaaatttcctgaacgatctggggcgctaa

SEQ ID NO: 55110 - protein, 374 aa, Unknown
  Obtained from environmental sample
  DOMAIN (201)...(368): NAD-dependent glycerol-3-phosphate dehydrogenase C-terminus
  misc_feature (1)..(374): Xaa is any amino acid
MYMVEKFPKVCNNYTMAAQTAVIGAGAWGTAVAKVIAEKGKDVVIWSFEKDTCDDINKRHVNSRYLPDVELPENLRASTDLVETASGREFLILAVPSLFLLNTAKQILDAPSIREGTTAIAVLTKGFLSTDKGPRLILETLEDYLPGFYRQSLVYIAGPSHAEEVSRGKITGLIAASENAKNSIRFRDLLKSKGLFVFSSFDVRGVQVAAAAKNVIAIAFGMLDAFKTMGSEGSFGDSNLFGDGTESLLLAAGLNEIQNLGMAMGSTHPETFSSISGIGDLDVTCRSVFGRNRRFGKEIIEKKILEPFKNLDDLLARINDVGYLPEGAAAAKHVKVLAEKHKLKMPIATGVYNILNREVEPADFLENFLNDLGR

SEQ ID NO: 55111 - DNA, 1353 bp, Unknown
  Obtained from environmental sample
  misc_feature (1)..(1353): n is a, c, g, or t
atgtttgacaagttgacgcaaaaagttaccgatgccctgcgctttgtcgcggggaaatcaaccatcagtgaaaaaaatattgaagacgccgttgacgcgattaagatggcgctcctggaagcggatgtcaacctgcgcgtggtcaggcgttttgtcaattccaccattgaagaggcaaaaggcgaaaaagtgctgcgcgccgtggatcccggacagcagtttgtaaaaatcgtccatgacaaacttgtaacgtatctgggcggcggcgatcccgatgagcgcaagctaaagctccggggcccggatgttatttccacggtgctgatgctgggcttgcagggctcgggtaaaaccaccagctccgccaagctcgccctgcgcctgaaaaaagaaggccgcaagcccctgttggtcgcctgcgacctgatacgccccgccgcaatggaacagcttgccgtgcttggcgggcaaatcggcgtaccggttcaccgcgaaaacggagcgacggacagcgccgtagtttacaggaacgcccttgcctgggcaaagcagaacctgattgacaccataattgttgataccacgggccgcctgcagatagacgaaaccatgatggcggaactctcaaggttgaaagaagccgtgcagcccgatgaaatgctcctggtcgcggactctatgacgggccagtccgccgttgacatcgcaaaaacctttgacgaaaaaatcggcctaacgggcgtggtcctgaccaagttcgattctgacacgcggggcggcgccgcgctctcccttaaaaccattaccggcaagcccctgaaatttacgggaacaggggaaaaacccgaggactttgagcctttccaccccgagcgcatggccgggcgcatcctgggcatgggcgacgttgtaagccttgtggaaaaagcccaggaggtaattgaccagaaagaggccatggaactccagaaaaaaatggagaaggaaaactttacccttgaggactggctttcccagcttcgctcggtaaagaaaatgggctcccttcagtcaatgctggaaatgatccccgggatgcaggggcagataagcgaggacgacattgacagggcgaacctgaaacgccaggaagctatcatctcatccatgacccgcaaggagcgcgccaaccatttgatcataggccccccgcgccgcagccgcatagccaaaggttccggcacctcggtggcggaagtcgcccgccttcttaaacagttcgagaagatgcgtgtcatgatgaaaaaaatggttaaaatggggaaaaaccccgcgcaattaacgcgggccacccaggggcttttcggcaggtag

SEQ ID NO: 55112 - protein, 450 aa, Unknown
  Obtained from environmental sample
  DOMAIN (1)...(87): SRP54-type protein, helical bundle domain
  misc_feature (1)..(450): Xaa is any amino acid
MFDKLTQKVTDALRFVAGKSTISEKNIEDAVDAIKMALLEADVNLRVVRRFVNSTIEEAKGEKVLRAVDPGQQFVKIVHDKLVTYLGGGDPDERKLKLRGPDVISTVLMLGLQGSGKTTSSAKLALRLKKEGRKPLLVACDLIRPAAMEQLAVLGGQIGVPVHRENGATDSAVVYRNALAWAKQNLIDTIIVDTTGRLQIDETMMAELSRLKEAVQPDEMLLVADSMTGQSAVDIAKTFDEKIGLTGVVLTKFDSDTRGGAALSLKTITGKPLKFTGTGEKPEDFEPFHPERMAGRILGMGDVVSLVEKAQEVIDQKEAMELQKKMEKENFTLEDWLSQLRSVKKMGSLQSMLEMIPGMQGQISEDDIDRANLKRQEAIISSMTRKERANHLIIGPPRRSRIAKGSGTSVAEVARLLKQFEKMRVMMKKMVKMGKNPAQLTRATQGLFGR

SEQ ID NO: 55113 - DNA, 438 bp, Unknown
  Obtained from environmental sample
  misc_feature (1)..(438): n is a, c, g, or t
atggcctctttctggtcaattacctcctgggctttttccacaaggcttacaacgtcgcccatgcccaggatgcgcccggccatgcgctcggggtggaaaggctcaaagtcctcgggtttttcccctgttcccgtaaatttcaggggcttgccggtaatggttttaagggagagcgcggcgccgccccgcgtgtcagaatcgaacttggtcaggaccacgcccgttaggccgattttttcgtcaaaggtttttgcgatgtcaacggcggactggcccgtcatagagtccgcgaccaggagcatttcatcgggctgcacggcttctttcaaccttgagagttccgccatcatggtttcgtctatctgcaggcggcccgtggtatcaacaattatggtgtcaatcaggttctgctttgcccaggcaagggcgttcctgtaa

SEQ ID NO: 55114 - protein, 145 aa, Unknown
  Obtained from environmental sample
  misc_feature (1)..(145): Xaa is any amino acid
MASFWSITSWAFSTRLTTSPMPRMRPAMRSGWKGSKSSGFSPVPVNFRGLPVMVLRESAAPPRVSESNLVRTTPVRPIFSSKVFAMSTADWPVIESATRSISSGCTASFNLESSAIMVSSICRRPVVSTIMVSIRFCFAQARAFL

SEQ ID NO: 55115 - DNA, 651 bp, Unknown
  Obtained from environmental sample
  misc_feature (1)..(651): n is a, c, g, or t
atgcgccgccagatagaggcctgctacggcatgaaagcttatgacatttacggccttacggaaattatcggccccggcgtttcctttgagtgcgaagctcaggacggcctgcatatcaatgaggatatgttctacccggaagttattaatcctgacaccggcgaacccgtgccggacggcgagaagggtgaattggtattcacgaccattaccagagagggaaccccgcttctgcgttaccgcacgcgggacatcacttaccttatccgggagccgtgtacctgcggacgcactaccgtgcggatgcacagactcttcggccgtaccgatgatatgcttataatccggggcgtaaatgttttcccaagccagatagaaaacgccctgattgagattgagggggtcgagccccagtacctgatcgtggtcagcaggggcaaggatcatctggacgaactggaactccaggtagaagttaaaatggaattatttaccgatgaggtgaaggatcttgaaaaattgagggaccgcattgagcatgtgatgaagtcaaaactgcagatatcggttaaagtaaaactggtagaaccaaaaaccattgaaaggtcaatcggcaaagccaaaagagtgattgataacaggagcatataa

SEQ ID NO: 55116 - protein, 216 aa, Unknown
  Obtained from environmental sample
  misc_feature (1)..(216): Xaa is any amino acid
MRRQIEACYGMKAYDIYGLTEIIGPGVSFECEAQDGLHINEDMFYPEVINPDTGEPVPDGEKGELVFTTITREGTPLLRYRTRDITYLIREPCTCGRTTVRMHRLFGRTDDMLIIRGVNVFPSQIENALIEIEGVEPQYLIVVSRGKDHLDELELQVEVKMELFTDEVKDLEKLRDRIEHVMKSKLQISVKVKLVEPKTIERSIGKAKRVIDNRSI

SEQ ID NO: 55117 - DNA, 417 bp, Unknown
  Obtained from environmental sample
  misc_feature (1)..(417): n is a, c, g, or t
atgggaatgaaacaaatttcggtttttattgaaaacacgacgggccgtctttgcgaggtgacaaaaacgcttgccaaagccgggatcaacctcagggcgatcaatatcgccgacacggccgagtggggcatcctcaggctttattgtgacaagacagacgaagccgccaaggtactgaacgaggcgggctttaccataaagctgaccatggtcgcggctgtggagatcgaggataaaccgggcagccttgacaaactgattctgctgatccagaagtccgggataaatattgagtatctgtacgcctcccttggaggcggcagcggtaaagcggtggtgattttcaaactggaagatcacgataagggttttgccatgcttgaaaaaagcggccttgttttagtggaaaaattataa

SEQ ID NO: 55118 - protein, 138 aa, Unknown
  Obtained from environmental sample
  DOMAIN (4)...(69): ACT domain
  misc_feature (1)..(138): Xaa is any amino acid
MGMKQISVFIENTTGRLCEVTKTLAKAGINLRAINIADTAEWGILRLYCDKTDEAAKVLNEAGFTIKLTMVAAVEIEDKPGSLDKLILLIQKSGINIEYLYASLGGGSGKAVVIFKLEDHDKGFAMLEKSGLVLVEKL

SEQ ID NO: 55119 - DNA, 564 bp, Unknown
  Obtained from environmental sample
  misc_feature (1)..(564): n is a, c, g, or t
gtgaaaatattaatggttgccagcgaggctgtcccctttgccaaaaccggcggactggcggacatggtttccgcgctttctatcagccttgccgcccttggccatgacgtccgcattgtattgccccgttactacggcatagacagggacaagctgaaactgctgcccggcgcgctgggggttcccttaggctggggcgaggaatggagcgccgtctatacgacgacattgcccaaggcggttaagaaaaacccggtgaacgtgtatctgatcgatcacgagatacattttggcaaggacggaatctacggcgttccgtcggagccggattttctggacaacttccggcgttttacttttttaagcagggcggcgttccagctttgccggaaaatcaactggtacccggacgtgatccacgcgcatgactggccggcggccctcgcgccggtgtacctgaaattcgcggaaagggttcccgccagtcttaagggttttcaaaaaaccgtatcggtgcttaccgtccacaatctcggctaccagggcgtatacgggcaaggataa

SEQ ID NO: 55120 - protein, 187 aa, Unknown
  Obtained from environmental sample
  DOMAIN (2)...(187): Starch synthase catalytic domain
  misc_feature (1)..(187): Xaa is any amino acid
MKILMVASEAVPFAKTGGLADMVSALSISLAALGHDVRIVLPRYYGIDRDKLKLLPGALGVPLGWGEEWSAVYTTTLPKAVKKNPVNVYLIDHEIHFGKDGIYGVPSEPDFLDNFRRFTFLSRAAFQLCRKINWYPDVIHAHDWPAALAPVYLKFAERVPASLKGFQKTVSVLTVHNLGYQGVYGQG

SEQ ID NO: 55121 - DNA, 900 bp, Unknown
  Obtained from environmental sample
  misc_feature (1)..(900): n is a, c, g, or t
gtgttttacaacgcgggctttgaggactggagcatgcttaatatgcttaaagccggcctgtacagcgcggacagcctgactactgtttcacctaactacgcggaagagaccaaaacccaggcccacggattccgccttgacggggtactgcgctaccgcagcgccgattattgggggattctcaacggcattgacgccaatgtgtggaatccaaagaaggacaaacttatcccccagactttctccgcgagcgacatgacgggaaaggccgtggcaaaggcggctttgcagaaacatttcgggcttcccgtaaaccccaaggtgccgcttatcggcatggttacccggcttgtagagcaaaaaggggtaggggacctgttcggccccacgtacggctccatgtggtcaatatgcagggacatgaatctgcaggttgtgcttataggcaccggcgagtcatggtgcgagcatgaaataggcagcctttcatacaggctgccgaatttcaaggcccacatcggctacagcgaggaaataagccaccttatagaagccggctccgatttcttccttatgccgagccgttatgagccatgcggccttaaccagatgtattcacttgtctatggcacgcttcccattgtaaggagaaccggcggccttgtcgatacggtagaaaactacgatgaaaagaagggaaccggcaccggctttatgtttgaccagcttaacccctcctccatttacaatacggtaggctgggcggtctgggcttggtacaataagccgggacatatcaaggcaatgcgtaccaaggccatgaagcaggacttttcctgggaaaaatccgcccaaaaatatgtggagttgtacgagaagaccctcgcgaaacaattatag

SEQ ID NO: 55122 - protein, 299 aa, Unknown
  Obtained from environmental sample
  DOMAIN (95)...(276): Glycosyl transferases group 1
  misc_feature (1)..(299): Xaa is any amino acid
MFYNAGFEDWSMLNMLKAGLYSADSLTTVSPNYAEETKTQAHGFRLDGVLRYRSADYWGILNGIDANVWNPKKDKLIPQTFSASDMTGKAVAKAALQKHFGLPVNPKVPLIGMVTRLVEQKGVGDLFGPTYGSMWSICRDMNLQVVLIGTGESWCEHEIGSLSYRLPNFKAHIGYSEEISHLIEAGSDFFLMPSRYEPCGLNQMYSLVYGTLPIVRRTGGLVDTVENYDEKKGTGTGFMFDQLNPSSIYNTVGWAVWAWYNKPGHIKAMRTKAMKQDFSWEKSAQKYVELYEKTLAKQL

SEQ ID NO: 55123 - DNA, 474 bp, Unknown
  Obtained from environmental sample
  misc_feature (1)..(474): n is a, c, g, or t
ttgacagattggccgagcgtttgcccacagtggcaagtcatcctgtacctgatggacactgcgccaaatttcggcggcggggcgtttgattcccgaggcaacggccagatgatagccgagctcgccgcgcaggaatggcctggctacgtgcagcaggtgatgatcacaatggcatggtacgcgcaggcgttcccaaagctgaaagggcgcatggaagatgcgacgactaccattcccgacgacgctttcatccgcgaggacttccgcgtcgtggggatcaaggcgggcgtcccttgcgttctggaacgctcaggcaacgcccgcgagaagcggcacggcgacggggccattgcaaagctaatggccgtctacgcggcggacgcggacgaagaaaagggctaccagcccatgacatacgaggctgtacaaactgaaaaccgctaccggcaggggagggacgattcatgggactga

SEQ ID NO: 55124 - protein, 157 aa, Unknown
  Obtained from environmental sample
  misc_feature (1)..(157): Xaa is any amino acid
MTDWPSVCPQWQVILYLMDTAPNFGGGAFDSRGNGQMIAELAAQEWPGYVQQVMITMAWYAQAFPKLKGRMEDATTTIPDDAFIREDFRVVGIKAGVPCVLERSGNAREKRHGDGAIAKLMAVYAADADEEKGYQPMTYEAVQTENRYRQGRDDSWD

SEQ ID NO: 55125 - DNA, 645 bp, Unknown
  Obtained from environmental sample
  misc_feature (1)..(645): n is a, c, g, or t
ttgatcgcgaggagcgcctttgcgcctttgcgtgataaaatgcgagtaattgctcttctttgttttatgctcattccgcgtttcgtttcggcggacgtatttaccttcaaggcgaacagtatgtccggaaccaaagccgtcggcaaggaaaccaccatccttataggcaacgcggaagtccgttccgacaacctgctgctaaaggcaaaccgcattgagatacagggcgaaaacaaccggttcatcgactgctccggcggggtatggggctttgaggaagaaaaaaacatactcttttttacagacaggctccgttatgaccgcaagttgaaaatcgcccgacttgagggcaattcaaccctggaggacagaaaaaatgaagtcgtggcgaaaggcagttttattgaatacgatgatcaagccgaggtaacggttatacagatatccgtccgcctgttcaaggatgacatggtttgccgttccgagtatgccgtttaccgccgcaacgagaaactcctggatctttccggcttcccggtggtttttaaaaaagacgatgaattcagagctgaccgcatacgcgtcgatcttgatacggacgacgtaaccatggaaggcgctgtttcagggacaattaagaattaa

SEQ ID NO: 55126 - protein, 214 aa, Unknown
  Obtained from environmental sample
  SIGNAL (1)...(31)
  misc_feature (1)..(214): Xaa is any amino acid
MIARSAFAPLRDKMRVIALLCFMLIPRFVSADVFTFKANSMSGTKAVGKETTILIGNAEVRSDNLLLKANRIEIQGENNRFIDCSGGVWGFEEEKNILFFTDRLRYDRKLKIARLEGNSTLEDRKNEVVAKGSFIEYDDQAEVTVIQISVRLFKDDMVCRSEYAVYRRNEKLLDLSGFPVVFKKDDEFRADRIRVDLDTDDVTMEGAVSGTIKN

SEQ ID NO: 55127 - DNA, 735 bp, Unknown
  Obtained from environmental sample
  misc_feature (1)..(735): n is a, c, g, or t
atggttgaaaaacatacgcttggcgtgacaaatataaccaagcgttttggcaaaaaagaagtggtccgcggggtaaattttacaatgatcaacggcgaggtcgccggcctgttagggccgaacggcgccggtaaaaccactattttctacatgattgtcgggttttaccgtccaagcggcgggtttgtccatatggatgatattgacatcaccgctaagcccatgtaccgcagggcgcggcagggcatagcatacctgcctcaggaggcttctatttttcgcaagctgacggtggagcagaacatttgggcaatacttgaaagccgccgggacattgataaagaagccaaaaaacagcggcttgaagccctgctggaagaattcgggataggcaggatacggaagcagtatggttttaccctttccggaggcgagaggcggcgtaccgagatagcccgcgccctggcgactgagcctaaattccttctactggacgagcctttcgcgggcatagaccccatcgcggtttacgagatcaaacagattatccgccgccttgccgaaaaaggcataggaatccttataaccgaccacaatgtccgcgacacattagagattaccacggaggcgtttattattgccgagggttcgattgtagctcgtggcggccgtgatgcgattttggcgaacgaaatggtccgcgaagtatacctgggttcggaattcaggatgtaa

SEQ ID NO: 55128 - protein, 244 aa, Unknown
  Obtained from environmental sample
  DOMAIN (32)...(216): ABC transporter
  misc_feature (1)..(244): Xaa is any amino acid
MVEKHTLGVTNITKRFGKKEVVRGVNFTMINGEVAGLLGPNGAGKTTIFYMIVGFYRPSGGFVHMDDIDITAKPMYRRARQGIAYLPQEASIFRKLTVEQNIWAILESRRDIDKEAKKQRLEALLEEFGIGRIRKQYGFTLSGGERRRTEIARALATEPKFLLLDEPFAGIDPIAVYEIKQIIRRLAEKGIGILITDHNVRDTLEITTEAFIIAEGSIVARGGRDAILANEMVREVYLGSEFRM

SEQ ID NO: 55129 - DNA, 1008 bp, Unknown
  Obtained from environmental sample
  misc_feature (1)..(1008): n is a, c, g, or t
atgtacacaagggaaatccagactccgagaagctcgccaattgaaaacgggaagcccctcgccggcacctggaacaaggcttttacacaggtagaccttctggacatacacaggccctacgcgctgccgcttccgcgctggctgagggactggaggatcaaagaatgggaaagcttcagtatgcaggacgagcattttttcctggaagcctatcttgcaaattttaaactgtaccagattgtccaggtttttttgtataacaaggaaaacggggaaaattatactttcagaaagctgatgccgggcaagagctggcgcctgcccagcaagctggataacgcttccgtcgaatgtcattcctccggctttttcttccgtatccatacctggctcatagccagtacggtaaaactggatatagacatcgcggcgtcaaaacagcagcccgcgtttacggcgcatctggcgtataacatgagcgtcaaagacgttacgccgcttgccgtatccttgaacttcaacgagcggcgcaatatgtacgcgttcaaggctcttaccgcggtgcggggagatatagttttgggcggacagcattacagcctggaccccgggcgctgtaccgggcttttccgcgattcaaaaggctttttcccgtaccggctgaagggagtgtattgcggcactatgggtattgatattgagggcagacgtttcgggtttcatctcgccgaaaaccaggcgaaggaaatcaggaaaaacaacgagaacgcgctgtgggtaaacgggcgcttaacgcctctgcccccggtgcgaatcactatgacgaatgatccggaatcggaatgggtcatacaggatgtggatggcatgatagaccttgtgtttaccccaaaagtaattaacaggtatgggattaactttgtggtgacaaacggcgatttttttgcccccatgggacattataacggtatgctgctcagcgccaaaggagagcagatacagatgtga

SEQ ID NO: 55130 - protein, 335 aa, Unknown
  Obtained from environmental sample
  misc_feature (1)..(335): Xaa is any amino acid
MYTREIQTPRSSPIENGKPLAGTWNKAFTQVDLLDIHRPYALPLPRWLRDWRIKEWESFSMQDEHFFLEAYLANFKLYQIVQVFLYNKENGENYTFRKLMPGKSWRLPSKLDNASVECHSSGFFFRIHTWLIASTVKLDIDIAASKQQPAFTAHLAYNMSVKDVTPLAVSLNFNERRNMYAFKALTAVRGDIVLGGQHYSLDPGRCTGLFRDSKGFFPYRLKGVYCGTMGIDIEGRRFGFHLAENQAKEIRKNNENALWVNGRLTPLPPVRITMTNDPESEWVIQDVDGMIDLVFTPKVINRYGINFVVTNGDFFAPMGHYNGMLLSAKGEQIQM

SEQ ID NO: 55131 - DNA, 378 bp, Unknown
  Obtained from environmental sample
  misc_feature (1)..(378): n is a, c, g, or t
ttgataatgatcgcggctatgggagtcggcggcggtatggtgattggtttcgcgcgcgtgctgttcagtaatatgttacccgcgggaggcatacatctttcatggattcttgcgccctgttacgccatcgcgctaatccttacaatattcgctccggaggatttttcttctatagcgtgggatgtcgccggcatagcgacaggtcctatttccgttcccatcattataactacggggcttggactcggacacgattcactgcgggcggacggcgctttcggtatcgtggctatggcgagcgtttttccgattatcgtaatactcatatcgggtattatcgataaagcaagatcaaaacgtatgttaaaaaatatgtag

SEQ ID NO: 55132 - protein, 125 aa, Unknown
  Obtained from environmental sample
  SIGNAL (1)...(23)
  DOMAIN (1)...(115): Protein of unknown function (DUF1538)
  misc_feature (1)..(125): Xaa is any amino acid
MIMIAAMGVGGGMVIGFARVLFSNMLPAGGIHLSWILAPCYAIALILTIFAPEDFSSIAWDVAGIATGPISVPIIITTGLGLGHDSLRADGAFGIVAMASVFPIIVILISGIIDKARSKRMLKNM

SEQ ID NO: 55133 - DNA, 861 bp, Unknown
  Obtained from environmental sample
  misc_feature (1)..(861): n is a, c, g, or t
atgactatgaaaacagcanagaaaccaanncagacatctataccgagattagcattacccaggatttacagaatagagaaagaaatcgcctccggaaagtatcccaattcggacggtttggcgcggcttctggaaaccagtatttccacaataagccgcgacattgaatttatgcgggaccagcttggcgcgcctatagagtatgatgccttgaaccgggggtattattttaccgaaaaaacttaccgcctgcctgccagctttacaaacgccgaggatttgctcgctctttgcatggcaagaagcattttttcgctgtataaggatacccctctttatgaggcttcccgccagcttttggaaggtatcacaacgcccattgctgcggacgggaataatgactggatggaaaaccgtatcgcggtgcctccaatcgcttcttcaaaagttaagtctgaaatttgggattttattatcaagggtttaaaagaaaaccgtattattacttttgattataaaggcacatgggatgatgaatataaaaaaagaaaagttcatccttatcagcttttatttgattggggcgtgtggtatttgcgcggtttttctgaagagcgcaaagacgcccgtattttttctctttcaaaaatgaaaaatgtacagcttacaagagatgtttttaatcttccgaaaaattataaatacacggatttttcaggcgacagctacttcggcgtttttatagggcaggaaaaacagcgttttgtcatagaaatttatgaagattcaatcccatttgtggaagaacgacagtgggcggcggatcaaaaattaccgaaaaggatgatcatatcacaatag

SEQ ID NO: 55134 - protein, 286 aa, Unknown
  Obtained from environmental sample
  misc_feature (1)..(286): Xaa is any amino acid
MTMKTAXKPXQTSIPRLALPRIYRIEKEIASGKYPNSDGLARLLETSISTISRDIEFMRDQLGAPIEYDALNRGYYFTEKTYRLPASFTNAEDLLALCMARSIFSLYKDTPLYEASRQLLEGITTPIAADGNNDWMENRIAVPPIASSKVKSEIWDFIIKGLKENRIITFDYKGTWDDEYKKRKVHPYQLLFDWGVWYLRGFSEERKDARIFSLSKMKNVQLTRDVFNLPKNYKYTDFSGDSYFGVFIGQEKQRFVIEIYEDSIPFVEERQWAADQKLPKRMIISQ

SEQ ID NO: 55135 - DNA, 330 bp, Unknown
  Obtained from environmental sample
  misc_feature (1)..(330): n is a, c, g, or t
gtgaaatgcctcacacttttgcagggcagggcagcgaaattcaaaaaagagccaaatttgaaaatcccgcaaataggttggaatcaggttaatttcacaaaagagcaccctattttcaaaggtattccaaataattcaaatttttattttgtgcattcttttgccccctctgcctgcgacacagaaacaatatacggcacaacaacttatggctcccaaacattcccctgcattataggaaatggctgtaacttaatagccactcagttccatttggaaaagagtggcgatattgggttagaagttttaagaaatttcagcagtctttaa

SEQ ID NO: 55136 - protein, 109 aa, Unknown
  Obtained from environmental sample
  misc_feature (1)..(109): Xaa is any amino acid
MKCLTLLQGRAAKFKKEPNLKIPQIGWNQVNFTKEHPIFKGIPNNSNFYFVHSFAPSACDTETIYGTTTYGSQTFPCIIGNGCNLIATQFHLEKSGDIGLEVLRNFSSL

SEQ ID NO: 55137 - DNA, 357 bp, Unknown
  Obtained from environmental sample
  misc_feature (1)..(357): n is a, c, g, or t
gtggcacttcgctttaagcagatgacccaagccgatgcagagggtttttatgcagagcacgttggcaaaggatttttcgcagagcttgccaaatttatgacctctggcccttctgttcagcttgtgcttgcaggcgaaaacgccattgcaaaagtccgagcaatcaacggtgcaacaaatccagaaaaagcagagcccggcaccatacgctacgactgggcaacctcaatgacagaaaacgctgtgcattcttccgatagcccagcaagcgcagaacgggaaatagccttctggttcaagcccgaagaaatttttgaatacggcgcaacggatcagagagcaaagtctgtactctaa

SEQ ID NO: 55138 - protein, 118 aa, Unknown
  Obtained from environmental sample
  DOMAIN (1)...(104): Nucleoside diphosphate kinase
  misc_feature (1)..(118): Xaa is any amino acid
MALRFKQMTQADAEGFYAEHVGKGFFAELAKFMTSGPSVQLVLAGENAIAKVRAINGATNPEKAEPGTIRYDWATSMTENAVHSSDSPASAEREIAFWFKPEEIFEYGATDQRAKSVL

SEQ ID NO: 55139 - DNA, 432 bp, Unknown
  Obtained from environmental sample
  misc_feature (1)..(432): n is a, c, g, or t
ttgaatacggcgcaacggatcagagagcaaagtctgtactctaaaataatcctttccccaatggaaggcgttacggatttgccgtttcgccgatttatacgagagctttccaaagacaagcagccgtttttcgtttcggaatttttatccacaggtagctctctttttttaacccctgtaaatacaagggctgttcgctttgacaaagaagaagagcctttttgtatgcagttgtttgggcatagcgcagaaaggctttccgctgccgctttgcaagcacaggagttgggagcggcttttgttgaactcaatgcaggctgcccagccccaaaaatcgcaaacaaaggttccggctcgggcttgctgagggatttgccaaatttgcaaaaaattttggaatcgataaaagcgtttgaaagttccgctttttaa

SEQ ID NO: 55140 - protein, 143 aa, Unknown
  Obtained from environmental sample
  misc_feature (1)..(143): Xaa is any amino acid
MNTAQRIREQSLYSKIILSPMEGVTDLPFRRFIRELSKDKQPFFVSEFLSTGSSLFLTPVNTRAVRFDKEEEPFCMQLFGHSAERLSAAALQAQELGAAFVELNAGCPAPKIANKGSGSGLLRDLPNLQKILESIKAFESSAF

SEQ ID NO: 55141 - DNA, 1272 bp, Unknown
  Obtained from environmental sample
  misc_feature (1)..(1272): n is a, c, g, or t
ttggggaacaggcagttcattttttatttccgcttgctcaacaattatttccgcattttccttcggcgcggctgtttccgtttttttgccggaacagccaattatacaagctgttataacaaacattccaagtattataggcaaaaccttgtgccgcttccacattgtgtttttcataggaaattcctccctttcaggatattaactctgtattttatatggtcagatcagcggaaatctattgcattctttactaattctgctgcacttcctactaattcgtacctttcatatgcgctacttgtcactttcattcgtaatttctatacttatcttatgaaccagtaccaaccgcaaatcctgtgggaaattacccgcgccgcggtgagcattgccgcgtggtgggtgctgttttaccgtttccaccggcccgaatcgttgcggcggcgcattgcacttcttatcgccatgccggcggcctacgctttctggatactcataccaatgagcattgtcgccaacgccgtttcatgggcggtcattaccgtagtctttgccttcatctgcggggacttgcgccgttccctttttaccgcttttttttacatcggcatggaggcatccatcgacaacacccgctccgccctgattgccctgctgtttaaccgttttttcccttcccactcacccagccaatatttacagtacaatctgcaatacctcgtcgtgctcgccttgtgctgttgttattatatgataatgaggcggtattcgggcaaactgccgcttaccagctggatactgattattttcccgcctttgattctgtgggcggttctgacctatttcgcccatgtcgcggatccgcttctgatggaacagggcatcaacatctacgggccggggttctgtttcggactattctgtatattgttgaatatcgggatactctatctctatatccgccaactggttattaccgacgcccaacaactgacaatagcggtttccgccgtggagccgatctggacgcttgagaatggcctgtcggataatttccgcaaacgctaccaactgactgacagggaaagagacattgttgaagaaatgatgaaaggcaagagcaacaaggaaattgccgataccctgcttatttcaatcagaaccgtaggcgcttatcttcagaatgtctacaagaaaaccggcgcgccgaaccgtttcgccctttattcgttgatcaagggggagagtaagaaaggcagtacgaattag

SEQ ID NO: 55142 - protein, 423 aa, Unknown
  Obtained from environmental sample
  DOMAIN (356)...(413): Bacterial regulatory proteins, luxR family
  misc_feature (1)..(423): Xaa is any amino acid
MGNRQFIFYFRLLNNYFRIFLRRGCFRFFAGTANYTSCYNKHSKYYRQNLVPLPHCVFHRKFLPFRILTLYFIWSDQRKSIAFFTNSAALPTNSYLSYALLVTFIRNFYTYLMNQYQPQILWEITRAAVSIAAWWVLFYRFHRPESLRRRIALLIAMPAAYAFWILIPMSIVANAVSWAVITVVFAFICGDLRRSLFTAFFYIGMEASIDNTRSALIALLFNRFFPSHSPSQYLQYNLQYLVVLALCCCYYMIMRRYSGKLPLTSWILIIFPPLILWAVLTYFAHVADPLLMEQGINIYGPGFCFGLFCILLNIGILYLYIRQLVITDAQQLTIAVSAVEPIWTLENGLSDNFRKRYQLTDRERDIVEEMMKGKSNKEIADTLLISIRTVGAYLQNVYKKTGAPNRFALYSLIKGESKKGSTN

SEQ ID NO: 55143 - DNA, 1026 bp, Unknown
  Obtained from environmental sample
  misc_feature (1)..(1026): n is a, c, g, or t
atgaaaaacacaatcggtaatcggcgcggatttttaccaatactatttggaatgtttgttataacagcttgtacaattgcctgctcgggcaaaaaaactggccaaagcgctgaaggaaaaacagaacagcgtcaggaaaatgaggaaattgcttcaatgccaaattcaggggaggctgataatacggcgccggacgaaggttttacacagttaataaacggaaaatatagagattttagtgatcatcagtcttttatagaatttaaagaaaataacattatagaaaaatggcgttctaatcgggatggaaaatatataaaattatcgccgcttcttggcaagtttacaattagtatagagcataaaataacttatataaatgttttatggaataataatactaaagaaaaatatcttatattattgccggaagattataacggagcccctaattattttttcctttataattcagatggcgaaccattttttataggcagtagatgtgatgacggttattatgacggagatcacgggcttgaagcagattttggaatgaactttataaattataatatgaaagatattattgcatcatcatcattggtggaaaatgatgtttcatatacacctgataaaataaatataaatacaggtcaggcatgggcggaaggagttgaaggagacggtattggagaatatttagtttttagttatagtgatggtaccctaagagatttatttatctcatcaggttttgtttcatattcaaaaccatatctatttacatataattcccggcctaaaaaaataaaaataacaacaaacaagggaaaatttaaaataattcaattacaagatacacctaatttccaatttgttgatataagagaactttttattgatgaagaaagtatgcttatagaaggagtaagcgagttaaaaatagaattgatcgaagtgtatcatggtacaaaatatactgatacttgtattaattcattctttgatatattttcacaatag

SEQ ID NO: 55144 - protein, 341 aa, Unknown
  Obtained from environmental sample
  SIGNAL (1)...(23)
  misc_feature (1)..(341): Xaa is any amino acid
MKNTIGNRRGFLPILFGMFVITACTIACSGKKTGQSAEGKTEQRQENEEIASMPNSGEADNTAPDEGFTQLINGKYRDFSDHQSFIEFKENNIIEKWRSNRDGKYIKLSPLLGKFTISIEHKITYINVLWNNNTKEKYLILLPEDYNGAPNYFFLYNSDGEPFFIGSRCDDGYYDGDHGLEADFGMNFINYNMKDIIASSSLVENDVSYTPDKININTGQAWAEGVEGDGIGEYLVFSYSDGTLRDLFISSGFVSYSKPYLFTYNSRPKKIKITTNKGKFKIIQLQDTPNFQFVDIRELFIDEESMLIEGVSELKIELIEVYHGTKYTDTCINSFFDIFSQ

SEQ ID NO: 55145 - DNA, 870 bp, Unknown
  Obtained from environmental sample
  misc_feature (1)..(870): n is a, c, g, or t
gtgcgtattggcgctttgcaaaatgttctgcttaaacaccatgacttttgtattccggcgggaattcgtttcagcacaattgtttcctgcgatatcggcgataattcagctattcaggaatgtgcgtatatttgcaattacataatcgggaacaactgcatactttcaagagttgatgaattgcaaacgaccaaccacgcaaagttcggcaacggcgtgataaaggacggcgaagccgaagaattgcgcgtctggatcgatgtgatgaacgaagcgggcggacgttcaattctaccgttcgataaaatgatccccgcggacgcctatctttgggcggcataccgcgatgataccgcgttaaccgctaaactggcggagattacgcaaaaacagtacggcggcttacggggcagttacggagttatcgggtcaaacgcggtgattaaaagttgtttaattataaaagatacgacggtgggggagagcgcttacattaaaggagcgaacaaactaaaaaatattacgatacagtcttccgccgaggagcctacgcagataggcgagggcgtggaaatggtgaacggcattgtcggttacgcctgcaacgctttttacggttccaaggctgtgcgttttatcatgggcagaaacagtaacttaaagtacggggcgcggttgatacactcggtactgggagacaactcaactgtgtcatgctgtgagatacttaataatttgattttccccgtgcatgaacagcaccacaacaattcatttttaatcgccagccttgtcgaggaatgtcgaacatggcggcggcggcgacaatcggcagtaaccacaacagccgagccaatgacggagagataa

SEQ ID NO: 55146 - protein, 289 aa, Unknown
  Obtained from environmental sample
  misc_feature (1)..(289): Xaa is any amino acid
MRIGALQNVLLKHHDFCIPAGIRFSTIVSCDIGDNSAIQECAYICNYIIGNNCILSRVDELQTTNHAKFGNGVIKDGEAEELRVWIDVMNEAGGRSILPFDKMIPADAYLWAAYRDDTALTAKLAEITQKQYGGLRGSYGVIGSNAVIKSCLIIKDTTVGESAYIKGANKLKNITIQSSAEEPTQIGEGVEMVNGIVGYACNAFYGSKAVRFIMGRNSNLKYGARLIHSVLGDNSTVSCCEILNNLIFPVHEQHHNNSFLIASLVEECRTWRRRRQSAVTTTAEPMTER

SEQ ID NO: 55147 - DNA, 1095 bp, Unknown
  Obtained from environmental sample
  misc_feature (1)..(1095): n is a, c, g, or t
atgtcgaacatggcggcggcggcgacaatcggcagtaaccacaacagccgagccaatgacggagagataagagccaaacgaggtttttggccgggacttgccgtcagtcttaaacactcatgcgttttcgcttcctttgtgatcatcgccaagggcgaatatccgtcggagttaaatatcccgctccccttctcgcttgtaaacaacaatgtgcataaaaaccgtcttgaagtaatgcccgcctatttttggatgcacaacctctacgctcttgaacgcaattcatggaaagcaaaaaaccgcgacaaaagaaaaataaaaattcagcgcattgaaaccgactaccttgcgcccgacacagcggaagaaatcatcgccgccctgtctctcctcgacggcttgctcggcgaagccggcttctcgccgatggacttggcgggcgaggacggacacgctgtgcgccaaattcactgccgtcactttgaacacagtaaaagagaccagatagtcataaagccgctggaagcgattgccgcataccgccagatgcttcgttattatgcggtaaaaaccgtcgcggcgtttttagattcgcgtaaagatttaaatttcagcggcttatgtaaactgctcggcaatggcgagcgaatcaaagagtgggtaaatgcgggcggacagattgttccggctttccgtgtggacgcccttcgcaaagaaatagggaacggcaaatataaaaattgggacgagattcacaaggtatacgactcttgggatgaagaatatccgctcgataaatgccgccacgcgtgggcggttcttgctatgcttcatggaacaaacgatgtccccgatgcgtctatgttaaaaaaagagtttgccgaagttttggagatacgccattggatagaaaaacaaatttttgagagcagggcgaaggactaccgtaatcattttaaaaaagccacattccgtaatcacgcggagatggaacaggtgcttggaaaaccggaagataacccctttatccggcttgtaaaagaagaaggtatcggttttaaagagatgatagaaagagcaagcgcaaagctgtaa

SEQ ID NO: 55148 - protein, 364 aa, Unknown
  Obtained from environmental sample
  SIGNAL (1)...(18)
  misc_feature (1)..(364): Xaa is any amino acid
MSNMAAAATIGSNHNSRANDGEIRAKRGFWPGLAVSLKHSCVFASFVIIAKGEYPSELNIPLPFSLVNNNVHKNRLEVMPAYFWMHNLYALERNSWKAKNRDKRKIKIQRIETDYLAPDTAEEIIAALSLLDGLLGEAGFSPMDLAGEDGHAVRQIHCRHFEHSKRDQIVIKPLEAIAAYRQMLRYYAVKTVAAFLDSRKDLNFSGLCKLLGNGERIKEWVNAGGQIVPAFRVDALRKEIGNGKYKNWDEIHKVYDSWDEEYPLDKCRHAWAVLAMLHGTNDVPDASMLKKEFAEVLEIRHWIEKQIFESRAKDYRNHFKKATFRNHAEMEQVLGKPEDNPFIRLVKEEGIGFKEMIERASAKL

SEQ ID NO: 55149 - DNA, 624 bp, Unknown
  Obtained from environmental sample
  misc_feature (1)..(624): n is a, c, g, or t
atggatattttgatgccggaaatggacggcatagaagcaaccaaattgatacgttcactgggtacggaatatgcgaacactataccgattatcgcccttacggcaataccggaaagcgagacagccgagaaagaaaaaatgtttttggacagcgggtttcaggctgttttgtacaaacccctcacccttgaaagcatagatgtctttataaaagactggaaaaatgataaaataaagaactgttctattaagaaggagaaagatatggaaacaatcgacatacccggagtagataacgaaagaataaagcaaatttacggcgacaaattcaaaatctttttgaatgttttgcgttcatatctttccgttgtacccgccgctcttgaaaaaatgagcaaggtttcccaagaaacattgccgagttatgttgtcagcgtacacggcgtgaaaagcgtcagcgacagcataggcgcagaagaagcgagaaaaagggctctagagctggagatgctgggtaaagccggagaccttaacggtatattggcaaagaacgaaacgttcattaaatatgtgaaagaacttatagtcaatgtacaaaaatatctggagaaatatcccgcataa

SEQ ID NO: 55150 - protein, 207 aa, Unknown
  Obtained from environmental sample
  misc_feature (1)..(207): Xaa is any amino acid
MDILMPEMDGIEATKLIRSLGTEYANTIPIIALTAIPESETAEKEKMFLDSGFQAVLYKPLTLESIDVFIKDWKNDKIKNCSIKKEKDMETIDIPGVDNERIKQIYGDKFKIFLNVLRSYLSVVPAALEKMSKVSQETLPSYVVSVHGVKSVSDSIGAEEARKRALELEMLGKAGDLNGILAKNETFIKYVKELIVNVQKYLEKYPA

SEQ ID NO: 55151 - DNA, 1743 bp, Unknown
  Obtained from environmental sample
  misc_feature (1)..(1743): n is a, c, g, or t
ttgctgttttctttaggctctggggggctgtggagtcgggttttcccatctgttttggctagacccgcgctgtctcttttattgtcttattatgattataacaagtgtaaaaggaggaagatcatggagtacggtcattttgatgcaaaggcgcgggagtatgttattacccggcctgatacgccagcgccctgggcaaattatctgggttcgccggcttatggggcgattatttccaataatgcgggcggttacagctttgtaaaaagcggcgcggcgggaaggattatccgttaccgctttaacgaacaggatcgccccggccgctacgtctacctgcgcgatgacgaaaccggcgattactggtcggcttcgtggcggcccgtgggcaagcctcttgatcagtacaagtccgagtgccgccacggtacgggttacacccggcttgaggcggattacagggacatccactcggaggcgctctactatgtgccgcaggactctgactacgaagtctggaaagttaaagtgacgaataacggaagctacgcgcggaaaatttcctgttttggttttgttgaatttacctgcgagagtttttacgagcaggatcaggtgaaccttcaatatacgcagtttattacccgcacttactttaagaacaattttatcctgcaaaccattaacgaaaactgcctgaacgccgttaacgaaagccgcgtcgagacgcgctttttcgccctcgccggagctaatgtcgcgagttactgcggcgaccgcgcggcgttcctgggcaaataccgcgattacggaaatcccgtctccgtggaaaacggcaaactggacggcactctcaactacaacctgaacccctgcggcgccctgcacacaacattggatctcgcgcccggcgaaacaaaagaatttgttttccttttggggcaaaaacgcgaagcccaggtaaaaaaacttgtgtcgcgttacggggacatgagtctgcctgaaaaagaaattgacaaattaaaagcctactggcacagccgccttgccaaccttacggtgaacacgcccgatgaaaacttcaacaacatgatcaacacctggaacgcctaccagtgctttattacatttatctggtcgcgggccgcctctcttacatactgcggacagcgcaacggttacggctaccgcgacacggtgcaggacatccagggcatcatccaccttgatccgcagatggctcttgaaaagatcaagttcatgatttccgcgcaggtaaaccacggcggcgctcttccgctggtgaaatacaaccacaaccccggccatgaggacaagcccgaagacgaatcctaccgcaagaacacggggcatccctcgtaccgcgccgatgacgcgctctggctattccccaccgtctggaaatacgtcgcggaaacgggcgacaccgcgttgttagacgaaaaaattccctacgcggacaagggcaaggacagcgtattcaaccacctgaaaaaagcaatcggtttttcgcttaacaatctgggaatacacggccttcccgcggggcttcacgcggactggaacgactgcctccgccttggggcaaagggcgtatccgtatttgtcgcgctccagctgtactacgcgtttgagatcatgatccgttttgcgaaattcaaaaaagattccgcgacggagcaggaaatgacgaagcaaaaaacccgtttggaaaaatcatga

SEQ ID NO: 55152 - protein, 580 aa, Unknown
  Obtained from environmental sample
  SIGNAL (1)...(20)
  DOMAIN (235)...(321): Glycosyltransferase 36 associated family
  misc_feature (1)..(580): Xaa is any amino acid
MLFSLGSGGLWSRVFPSVLARPALSLLLSYYDYNKCKRRKIMEYGHFDAKAREYVITRPDTPAPWANYLGSPAYGAIISNNAGGYSFVKSGAAGRIIRYRFNEQDRPGRYVYLRDDETGDYWSASWRPVGKPLDQYKSECRHGTGYTRLEADYRDIHSEALYYVPQDSDYEVWKVKVTNNGSYARKISCFGFVEFTCESFYEQDQVNLQYTQFITRTYFKNNFILQTINENCLNAVNESRVETRFFALAGANVASYCGDRAAFLGKYRDYGNPVSVENGKLDGTLNYNLNPCGALHTTLDLAPGETKEFVFLLGQKREAQVKKLVSRYGDMSLPEKEIDKLKAYWHSRLANLTVNTPDENFNNMINTWNAYQCFITFIWSRAASLTYCGQRNGYGYRDTVQDIQGIIHLDPQMALEKIKFMISAQVNHGGALPLVKYNHNPGHEDKPEDESYRKNTGHPSYRADDALWLFPTVWKYVAETGDTALLDEKIPYADKGKDSVFNHLKKAIGFSLNNLGIHGLPAGLHADWNDCLRLGAKGVSVFVALQLYYAFEIMIRFAKFKKDSATEQEMTKQKTRLEKS

SEQ ID NO: 55153 - DNA, 792 bp, Unknown
  Obtained from environmental sample
  misc_feature (1)..(792): n is a, c, g, or t
ttgctgcggcaaaagaagcgccgcttgtggcgccgcctgcgggcccgcaaaagagaaaaaaaagataggagaagctttatggaatatgaatttgaaggacgtaccgaaaaagaagcgattgatcgcgcggcggaagagcttggtcttgaaaaagacgattttgacgtggagattctggaaacccaacgccagggtctgttcaagaaaggccatgtgcggataaaggtgcacaccgaaaggcctgtcgcgcggaataaacaggcgaaggccggcgacgggggaagcacccggcaggaacgtccaagtcaagtctttggcgacccaatggcccagaatgatttcgagaaaaaagttatcgactttgtcgaagagcttatcagaaagatgggttacgacggaaaagtttcggtaatgtttagggatgaggccaaactcggcctcaagatcgattccgaccattcctccatactgattgggaaaaagggaaaaaaccttgacgcccttcagcttctggtgaatatctatgccggaaggcagggccgcgaggatatgcgggttattctggacagcgagaattaccgcatacgccgcgaagaatcgctggtacggcttgcctacaccgtggctgaccgcgtccgggaaagccgcagttcagtcctgcttgagccgatgaacccctttgaccgacgcctaatccatactacgttaaacgacattacagacatagaaaccaaaagcgaaggcgacggcctgtacaaacaggtaagggtctttttccgtggcgcgaagtaa

SEQ ID NO: 55154 - protein, 263 aa, Unknown
  Obtained from environmental sample
  DOMAIN (205)...(260): R3H domain
  misc_feature (1)..(263): Xaa is any amino acid
MLRQKKRRLWRRLRARKREKKDRRSFMEYEFEGRTEKEAIDRAAEELGLEKDDFDVEILETQRQGLFKKGHVRIKVHTERPVARNKQAKAGDGGSTRQERPSQVFGDPMAQNDFEKKVIDFVEELIRKMGYDGKVSVMFRDEAKLGLKIDSDHSSILIGKKGKNLDALQLLVNIYAGRQGREDMRVILDSENYRIRREESLVRLAYTVADRVRESRSSVLLEPMNPFDRRLIHTTLNDITDIETKSEGDGLYKQVRVFFRGAK

SEQ ID NO: 55155 - DNA, 1062 bp, Unknown
  Obtained from environmental sample
  misc_feature (1)..(1062): n is a, c, g, or t
atggaaggggaactaatagatttatatagcgattacctattatgcagtagtcgtcaaacgacagctaccggtctgtcgaaattaaccggaggattggttagtcatgataggataacccggcttttatctggggaaacgatggacagtaaaacattatggctaaaagtaaagaaattggttagaaggcatgagaatgatgaagcctgccttatttttgacgatacaattatagagaaacagtacatggatgagagcgatattatatgttggcattgggatcaccggaatggccggaatataaagggaataaatctgctgacagctttttatacggcagtaaccgaagagactactataagaataccaataggatatgagattatagcaaagacagaaagatattttgacgagaaagaggaacaagagaaacgcaggagtccaaagacaaagaatgagttgatgcaagagatgataaacgcgcaaataacaaaccgggtgaaattcctgtatatattggcagattcatggttttcatccaatgaaaacatgaaattcatcaacaaaaggaaaaaggtatttatttttgagctaaaagataaccggttggttgcggacagcgaacaggataaaaaggaaggtcgcttcgaacgactggatcaaaaaacactggggaaaaaaccgaggatggtatggctaaaggatttaagtataccggtaatgctttacaaacaagtctttataaacaaagacggttctagcggaacaagatatctggtgacaaatgactcagcgatgacaaaggaacaatttgagacgctctacaaaagacggtggggtgtcgaagagtatcacaaaagtttaaaacaaaacgcatcaataggaagttcgcccgctcatacggagagaacgcaaagcaaccatattttttcagcgatatatgcttatatcaagttggaaaaaataaaacttgaacggaagataaatcattttgcattaaagcttttgatttatacagaatcattgaaaacagctatggattttattccagattacgtatgctaa

SEQ ID NO: 55156 - protein, 353 aa, Unknown
  Obtained from environmental sample
  DOMAIN (111)...(317): Transposase DDE domain
  misc_feature (1)..(353): Xaa is any amino acid
MEGELIDLYSDYLLCSSRQTTATGLSKLTGGLVSHDRITRLLSGETMDSKTLWLKVKKLVRRHENDEACLIFDDTIIEKQYMDESDIICWHWDHRNGRNIKGINLLTAFYTAVTEETTIRIPIGYEIIAKTERYFDEKEEQEKRRSPKTKNELMQEMINAQITNRVKFLYILADSWFSSNENMKFINKRKKVFIFELKDNRLVADSEQDKKEGRFERLDQKTLGKKPRMVWLKDLSIPVMLYKQVFINKDGSSGTRYLVTNDSAMTKEQFETLYKRRWGVEEYHKSLKQNASIGSSPAHTERTQSNHIFSAIYAYIKLEKIKLERKINHFALKLLIYTESLKTAMDFIPDYVC

SEQ ID NO: 55157 - DNA, 789 bp, Unknown
  Obtained from environmental sample
  misc_feature (1)..(789): n is a, c, g, or t
atgcccctgggcggtgatgccggtaggaggtgccttatgggcattaacaataatatcgatgatgtacttcatcgaatacgggtcaagctatatcccaattatcttccgaatacggaaggcaggtatgtagccaggactgacagtgaagcgcttctggacattgaacgcatttgtgcggcaatgaaaaacagaggaggctttttgggaagttatgataacttaattgaaaacgttaaggctttccaaaacgagtgtgcgtatcaattagctgacggtttcgcgctgaatttgatttacttttcaattcacccgaacatctgcggtacgttcaatttgggaaaggaagcacatgatcctaaaaagaatccgataagcttcaagtttcgaacaaggcttccgttgcgtaatcttgttcagcatatctctgttgacattgcaggtgtggcagatggtaatgcgtttattgatgagtttattgatcgtgacgaagattctgtaaacggaatttttgcacccggcaacatgttttgcataaacggcaataaaattaaactggcgggaaatgatcccggctgcggcgtgttctttgtgcctgtggacgatccgtccaaagcggtcaaagtaacacgtatcggcgagaacagcggatcaacggtaaccggaattgcgcctgatacgcattatcagtacaacagaatcgaaatacggactcaatacagcgggtctactactacttttttaaaagctccccgctcaatagtcagtgatttcgtaattgaatcagcttaa

SEQ ID NO: 55158 - protein, 262 aa, Unknown
  Obtained from environmental sample
  misc_feature (1)..(262): Xaa is any amino acid
MPLGGDAGRRCLMGINNNIDDVLHRIRVKLYPNYLPNTEGRYVARTDSEALLDIERICAAMKNRGGFLGSYDNLIENVKAFQNECAYQLADGFALNLIYFSIHPNICGTFNLGKEAHDPKKNPISFKFRTRLPLRNLVQHISVDIAGVADGNAFIDEFIDRDEDSVNGIFAPGNMFCINGNKIKLAGNDPGCGVFFVPVDDPSKAVKVTRIGENSGSTVTGIAPDTHYQYNRIEIRTQYSGSTTTFLKAPRSIVSDFVIESA

SEQ ID NO: 55159 - DNA, 519 bp, Unknown
  Obtained from environmental sample
  misc_feature (1)..(519): n is a, c, g, or t
atggacgctctttgtgtcggttccgggctgtcgagagacacgcagaccgcgtctttagttagggaacttatcggtaaaacggataaacccgccgtgattgacgcggacggtcttaacgcgtttgccggttgtctgccggagtttgcgaaacacaagggggagcttgtcatcaccccgcacatgggagaatggaaaagactcttcggagacttgcccgatgaaccgcttgagcgcataaacaagctcagagactgcgcgtcacaatacaatgtaaatattttactgaaaggaaacccctctttggcggtcagccctaaaggaaccgctgtcattcttcctttcggaaattcctctctggcgaaagcccggaacgggagacgtactgggcggcatcattgtctctcttatcgcgcagggctgctcatgcttcgaggcggcaatcctcggcgcgtatctgcacggagaggcgggacggcttgcaagtttagaccttaccgagtactcggtgctggcgagtga

SEQ ID NO: 55160 - protein, 172 aa, Unknown
  Obtained from environmental sample
  misc_feature (1)..(172): Xaa is any amino acid
MDALCVGSGLSRDTQTASLVRELIGKTDKPAVIDADGLNAFAGCLPEFAKHKGELVITPHMGEWKRLFGDLPDEPLERINKLRDCASQYNVNILLKGNPSLAVSPKGTAVILPFGNSSLAKARNGRRTGRHHCLSYRAGLLMLRGGNPRRVSARRGGTACKFRPYRVLGAGE

SEQ ID NO: 55161 - DNA, 1212 bp, Unknown
  Obtained from environmental sample
  misc_feature (1)..(1212): n is a, c, g, or t
atggcgttaagcggattgcaaatacagaaactccttcccggtaccaactgcaaggagtgcggctcaagtacctgcatggcctttgccatgaaaatggcggccaaaaaggccatgctttccgagtgcccttacgcttccgaagaagccaagcaagttttgggcatggcaagcgagccgcctgtaaaaggcgttaaaattggcgcggagaccgtcagtccccttggggaagagacggtcatgtatcggcacgaaaagacctttgtcaacaaacctgtggtcgctgtaaatctggacgaaggttccgatttggcaattgcggcgaagatcaaaaattaccggcctgtgcgggtgggcgaagagctttttgtaggcgcaatcgccgttacccaaaagggcgatgccaaatcatacgccgaatactgcgcgaaggtatacgaaacaaccatgttaccgctgatccttcgcgccttggatatcgcttctctcgacaaggcttcccaggcggtagccagatcgaagagcgtcctttccggcgtgacggcggaaatggcggaagaagcggtcaaaatcgccatgcgggataaccagatactcgcggtgacagccccgaacgtggacggtatttttgaattaaccacaaagttaaaggaaggcggttttaatgacctcctaatcctatttcaaacccattccctttccgaaactttccagacgaattccatcgccaggaaggcggcgcttaaaaacaacgtaaaagccctcggctatgcttcactgcgttttatcaacaccggtaacggaatggacgacacggtggcggcggcaacggaaatcgacaagtttggcgggattgtggtgcttcccggtttcgacccggcccagctaattaccctgcttacactgcgccagaatatttacaccgacccgcaaaaaccaatccaggttgagcccaagctctacgctataggcgagcccgacaggaaatcacctgtctttgtgacgaccaacttttcactgacctacttccttgtttccggggaaattgaaaacagcggcatatccgcctggctggtaattcccgaatgtgaaggcttcagcgtgctgaccgcctgggcggcagggaaattctccggagcttccatcgccaagtttatcaaccaaatcggccttgaaagccaggtggatacccgaaaaattgtaatccccggttag

SEQ ID NO: 55162 - protein, 403 aa, Unknown
  Obtained from environmental sample
  DOMAIN (11)...(45): Putative Fe-S cluster
  misc_feature (1)..(403): Xaa is any amino acid
MALSGLQIQKLLPGTNCKECGSSTCMAFAMKMAAKKAMLSECPYASEEAKQVLGMASEPPVKGVKIGAETVSPLGEETVMYRHEKTFVNKPVVAVNLDEGSDLAIAAKIKNYRPVRVGEELFVGAIAVTQKGDAKSYAEYCAKVYETTMLPLILRALDIASLDKASQAVARSKSVLSGVTAEMAEEAVKIAMRDNQILAVTAPNVDGIFELTTKLKEGGFNDLLILFQTHSLSETFQTNSIARKAALKNNVKALGYASLRFINTGNGMDDTVAAATEIDKFGGIVVLPGFDPAQLITLLTLRQNIYTDPQKPIQVEPKLYAIGEPDRKSPVFVTTNFSLTYFLVSGEIENSGISAWLVIPECEGFSVLTAWAAGKFSGASIAKFINQIGLESQVDTRKIVIPG

SEQ ID NO: 55163 - DNA, 303 bp, Unknown
  Obtained from environmental sample
  misc_feature (1)..(303): n is a, c, g, or t
gtggaatacacctattcggtgatggagcgcatacggcttacccgactcggaggcgacaatatgctccttggcccgatgatcgtttcggtgggacaggaatgcaccaagataaaagagttcaagtcgccggaatccgccttccccgattggggcgatctcgccaggcgcgccgcttattgggaatgtgccacagccacaacgctgctatatgccggggcggacatattgatcctttataacccggaagcggtaaagacagtaaagaaaactattgcaagcctgatggatggagggggcaaataa

SEQ ID NO: 55164 - protein, 100 aa, Unknown
  Obtained from environmental sample
  misc_feature (1)..(100): Xaa is any amino acid
MEYTYSVMERIRLTRLGGDNMLLGPMIVSVGQECTKIKEFKSPESAFPDWGDLARRAAYWECATATTLLYAGADILILYNPEAVKTVKKTIASLMDGGGK

SEQ ID NO: 55165 - DNA, 900 bp, Unknown
  Obtained from environmental sample
  misc_feature (1)..(900): n is a, c, g, or t
ttggctaaaaaagaaacttctgtttcgcttccctggtcatgcgttcactcaggtgtgaatgaaaagttttttttacatgaggtagagaagtcttttaatgaaaaaactacttgtccatgtataaaaaattgtaataattgcggaatttgcgaaaattctttaaaaacagtacaaaattctatacagtttgaagaaagccttgatgatatggatcaagaaagaccagaaaacagtaaggcggaccccgatacctacaggattattttctctttttcaaaacatggcagtgctgtttttcatcctcacctgggccttttggaaattttttcaatggcatttttaagggctggtattcccgttatttatacgcggggattcaatcctctgccgagattggaaatcgcttcgccgctttcgttgggcattaaggccggctctgagatcgcatccattgatacggacgggtacttttctgctgaccaactaaaaaaaggccttaacgagttttttcctgagggtttgcgaattgttgaagcaataaatgtcttcattccgtctggcgggaaaaaacattcgctttcttcacttttgtggggctatgcttacgccggaaaagatggcgggacagattttgttgaagtgaagaacgagaagtcctaccgcgaagcaaggattggctctaccggaagcatatacaacctggaaaggctttcgcttcttgccagatcaaatggggtaaggatgaatctggcggggcttcctacttcgaggtttataggtcgctttatccagaaactggggaaaatagagagaagaaatctcacggaggcgcaaagaacacggaggaagactaaattctcatattttctttgtggcctacctccggttctgtcgctgtga

SEQ ID NO: 55166 - protein, 299 aa, Unknown
  Obtained from environmental sample
  misc_feature (1)..(299): Xaa is any amino acid
MAKKETSVSLPWSCVHSGVNEKFFLHEVEKSFNEKTTCPCIKNCNNCGICENSLKTVQNSIQFEESLDDMDQERPENSKADPDTYRIIFSFSKHGSAVFHPHLGLLEIFSMAFLRAGIPVIYTRGFNPLPRLEIASPLSLGIKAGSEIASIDTDGYFSADQLKKGLNEFFPEGLRIVEAINVFIPSGGKKHSLSSLLWGYAYAGKDGGTDFVEVKNEKSYREARIGSTGSIYNLERLSLLARSNGVRMNLAGLPTSRFIGRFIQKLGKIERRNLTEAQRTRRKTKFSYFLCGLPPVLSL

SEQ ID NO: 55167 - DNA, 912 bp, Unknown
  Obtained from environmental sample
  misc_feature (1)..(912): n is a, c, g, or t
atggacaagcgggaaggggagagctgtcagggctgtggacggcgcttttccagccgatctggcaatcaggcggtttttccggtacccagcatgaaggtcgttcatcatcatggcacggttgaaattatgcggggctgcccaaacggctgccgcttttgccacgcaggttattggtacaggccggcccgccagaaaagcgctcgtttgatcgacgatgaagtcgacttattaatcaagagtggcggctacagggaaataaccctttcttccctttcgtccggtgattataaatacctcgaagacttaatagattatttgaacaaaaaatacagcccccatcatatatcttttcagttgccttctctaagagtatcaacattttcgctcaatttgcttgaaaaaatctctttggtaagaaaaagcgggcttacctttgctgtagaaactccatcggatttttggcaaatggctataaataagcaggtggctggagaagacgttgtttccatactccgggaggcaaagaagcgtgggtggaagggagcaaagttttatttcatgattggcctgcctcttgatgaatcatctgttaaagaagaagttgaaatagccgccttcgttgaacgtgtagcccagcaaactagaatgcactttaatataaacgtaggaacgtttgttccaaaggcccatacgccttttcaatgggccgctcagatcagcgttaaagaggcgattggaaagctgtcctatatacgaaacaggttaaagtcccaggggcacaaggtcggcatacaggatccttttatctcggtgattgaaggtattgcaagcagaggggacgaaagggcaggggccatttttgaggaagcttcaaagagggatgcaggcttgattcctggactgagtacctaa

SEQ ID NO: 55168 - protein, 303 aa, Unknown
  Obtained from environmental sample
  DOMAIN (40)...(204): Radical SAM superfamily
  misc_feature (1)..(303): Xaa is any amino acid
MDKREGESCQGCGRRFSSRSGNQAVFPVPSMKVVHHHGTVEIMRGCPNGCRFCHAGYWYRPARQKSARLIDDEVDLLIKSGGYREITLSSLSSGDYKYLEDLIDYLNKKYSPHHISFQLPSLRVSTFSLNLLEKISLVRKSGLTFAVETPSDFWQMAINKQVAGEDVVSILREAKKRGWKGAKFYFMIGLPLDESSVKEEVEIAAFVERVAQQTRMHFNINVGTFVPKAHTPFQWAAQISVKEAIGKLSYIRNRLKSQGHKVGIQDPFISVIEGIASRGDERAGAIFEEASKRDAGLIPGLST

SEQ ID NO: 55169 - DNA, 1371 bp, Unknown
  Obtained from environmental sample
  misc_feature (1)..(1371): n is a, c, g, or t
atgaatgaagttctcctcagcgtaggcattgatctgggaaccacaaccacccaacttgtattcagccatcttgaaattgaaaatgaagccacagttttttcggtaccccgtattaaaatagtggataagaaagtaatctacaggggggacatctactttaccccgcttctaaaccgcgcgaccatagacattttgaaagtgaaaacaatcattgaagaagaatataaaaaagccggagtttccaccgaaaacgtcagtataggcgcggtgattatcactggtgaaacagccagaaaagagaacagcgaatccgccatcaataccctcagcggctttgccggagattttgtggtagccaccgccggaagcgaccttgagtcgatacttgcgggcaggggcgcggggacagccgatatgtcgcgtaacgtctgggacaaggctctggtcaacctggatattggaggaggtaccaccaacattggggttttcaggcttggcgcgcctgttgacacaagctgcctggacattggcggcaggcagatcattatagatcctaaaacggaaattctgtcttatgtcgccgataaggtgaagatactaatcaagcgcatgggccttggccttgttgaaggccggcgcgcagcgcgcggtgacatagaaaaactctgcgtaaggctcgcggagatccttgccgaatcaatagggcttgccccggcctcgcaggatttggagctttttaccaccgcccatcccctgcgctcgcaatggcaattcggcgggcttacctattcgggcggtgtggcggactttatctacaatgaatatgatccgggaaacccctatccctacggggatataggcgccgtcctgggaaaccagatccgcgcctgccctgtcctgaaccggatagaaaggctggttccgaaagaaactatccgggcaacagtggtgggggcgggctccaatgccgttgatatttccggttccaccattgcgtggagcgacaaatcgatacttcccatccaaaacatcccgatagttaaaatgacggctgaagacgagggggattcctacaggcttttcgccggcaggcttgcggagaagcttacctggttcagggatgaatccggaaagtaccagcttgcggcggttggttttgcgggcatgcataacccttccttcgagcttatcaaagatttaagtggaaaaataattcagggtatgggggattacctgaaaacaaacaacccggttatcctgattattgaaaatgacatggctaaatccctgggctatgccctgatgaacaggctgccggaaaaaaaattcatgtgcggacagcataaaggtggacaccctcggccgatctga

SEQ ID NO: 55170 - protein, 456 aa, Unknown
  Obtained from environmental sample
  DOMAIN (1)...(453): Ethanolamine utilisation protein EutA
  misc_feature (1)..(456): Xaa is any amino acid
MNEVLLSVGIDLGTTTTQLVFSHLEIENEATVFSVPRIKIVDKKVIYRGDIYFTPLLNRATIDILKVKTIIEEEYKKAGVSTENVSIGAVIITGETARKENSESAINTLSGFAGDFVVATAGSDLESILAGRGAGTADMSRNVWDKALVNLDIGGGTTNIGVFRLGAPVDTSCLDIGGRQIIIDPKTEILSYVADKVKILIKRMGLGLVEGRRAARGDIEKLCVRLAEILAESIGLAPASQDLELFTTAHPLRSQWQFGGLTYSGGVADFIYNEYDPGNPYPYGDIGAVLGNQIRACPVLNRIERLVPKETIRATVVGAGSNAVDISGSTIAWSDKSILPIQNIPIVKMTAEDEGDSYRLFAGRLAEKLTWFRDESGKYQLAAVGFAGMHNPSFELIKDLSGKIIQGMGDYLKTNNPVILIIENDMAKSLGYALMNRLPEKKFMCGQHKGGHPRPI

SEQ ID NO: 55171 - DNA, 555 bp, Unknown
  Obtained from environmental sample
  misc_feature (1)..(555): n is a, c, g, or t
atgacccatctttacgggaaccagcttacggaaaaagataatccggttatcgtgtttcgcggcaaactggacagtctctgcgccatgattctagaagcccagattttgggcgaagaaaaacaaaaccgcggctttgtaaatgatctgcaggagatactggaattcgtccgttcgctgcttagcgtcgaatataaatgcgtcccgctgggcgaattccgtatttggggatacagttcaaaagagatacgggaaaaatcccataatcctgaaaaatattttagctacaagcaccttntgatgcatcattccatgggagcgctgtccttgcgcctgaacctcctgcgcgccgctgccagagagaccgagcttgcggcagccgttatcctgcgagatccgataatctataatcccgcggcttgcgagtcgcaggatactgccagacgctgccgcaaggatattgtggaagcgttgaacaggctttcaagtttgttctatatattaatttataaatacctgccaaaagactattcaccggccggcgactccggtatttag

SEQ ID NO: 55172 - protein, 184 aa, Unknown
  Obtained from environmental sample
  DOMAIN (1)...(173): Cobalamin adenosyltransferase
  misc_feature (1)..(184): Xaa is any amino acid
MTHLYGNQLTEKDNPVIVFRGKLDSLCAMILEAQILGEEKQNRGFVNDLQEILEFVRSLLSVEYKCVPLGEFRIWGYSSKEIREKSHNPEKYFSYKHLXMHHSMGALSLRLNLLRAAARETELAAAVILRDPIIYNPAACESQDTARRCRKDIVEALNRLSSLFYILIYKYLPKDYSPAGDSGI

SEQ ID NO: 55173 - DNA, 1116 bp, Unknown
  Obtained from environmental sample
  misc_feature (1)..(1116): n is a, c, g, or t
atgggtattaatgatattattttgtacatcatgctgggctttatggcgctgggcggtatcgactatttcatcggtaaaaagttcggcttgggcgttaagtacgaggaaggattcatggcaatgggggcattgaccatgaatatggccggcgccgtctgtatcgcgccggtgttgggcgtgtggctccgacccgtgcttgctccggttttcgaggtcttcggtgcaagcccggctatgtttgcaacgtcagttctcgcctgcgacatgggaggttttccgttggctatggctttggcgggcggggatactaatgccggaaatttcgcgggaatgatcctgggatccatgatgggaccgacaatcgtattctccatccccgttggtttggggattatccaaatgtcggatcggcctttccttgggaaaggcatccttatcggcctttgtactattcctctgggctgtctggcaggcggagcggtagcgggttatcctttcttgtggatgcttcagaaccttattccggttattatctttgccgcgattatcgccgtcggcctgatcttcttccagaaagccatgatcactatattcctctggtttggtcgttttgtagtggcttttctgactataagcctggttattgcggggattgaatactttggcggcgtaacgattatcagcgccaaagatttaagcggtgaaatagtaaaaatggataacatcgaatccgcgttcatcgttgtggggcagattgcggtagttctcgccggcgccttcgtcctggtaaaactcctgatcaaattcttaggcaagccgctggagaaaataggcggactgatgggggtgaacaaagacgccgcggccggcctcgtggcaacccttgccaacaacatcgccatgttccagatcatgaaagacatggatgaccggggcaaggtcattaacgtagcgttcgcggtaagcgcggccttcgtgttcggcgatcacctcgggttctgcggagggaacgcgccaaccatgatatcggcaatggtggtaggaaaactggtaggcggcattaccgcggtaattcttgccctggtgttgcttcctaaaaagagtgccgcggtataa

SEQ ID NO: 55174 - protein, 371 aa, Unknown
  Obtained from environmental sample
  DOMAIN (16)...(371): Ethanolamine utilisation protein, EutH
  misc_feature (1)..(371): Xaa is any amino acid
MGINDIILYIMLGFMALGGIDYFIGKKFGLGVKYEEGFMAMGALTMNMAGAVCIAPVLGVWLRPVLAPVFEVFGASPAMFATSVLACDMGGFPLAMALAGGDTNAGNFAGMILGSMMGPTIVFSIPVGLGIIQMSDRPFLGKGILIGLCTIPLGCLAGGAVAGYPFLWMLQNLIPVIIFAAIIAVGLIFFQKAMITIFLWFGRFVVAFLTISLVIAGIEYFGGVTIISAKDLSGEIVKMDNIESAFIVVGQIAVVLAGAFVLVKLLIKFLGKPLEKIGGLMGVNKDAAAGLVATLANNIAMFQIMKDMDDRGKVINVAFAVSAAFVFGDHLGFCGGNAPTMISAMVVGKLVGGITAVILALVLLPKKSAAV

SEQ ID NO: 55175 - DNA, 381 bp, Unknown
  Obtained from environmental sample
  misc_feature (1)..(381): n is a, c, g, or t
gtggaaacaggcagcgaaaagaaaacggtcattgtgattgatgatgatgagcctatccgcgtcatgacgcagggaatgctgagcgctgcttacgatgttacaacggtcggttcagggaaggaagcattaggcctgtttttcaagggttatgttcccaatttagtgttattggacttgtccatgcctgaaatgggcgggtgggatacctttatcagaattcgggacatcagcaaacttcacaaaaccccgatagcgattttcacatcttcaaacgatccgagagacagggttaaagcgcaggaacttggtgcggttgattacatacaaaagccgatcaaaaaagaggagatgcttaacagggtggcaaaattggtaaggtaa

SEQ ID NO: 55176 - protein, 126 aa, Unknown
  Obtained from environmental sample
  DOMAIN (8)...(122): Response regulator receiver domain
  misc_feature (1)..(126): Xaa is any amino acid
METGSEKKTVIVIDDDEPIRVMTQGMLSAAYDVTTVGSGKEALGLFFKGYVPNLVLLDLSMPEMGGWDTFIRIRDISKLHKTPIAIFTSSNDPRDRVKAQELGAVDYIQKPIKKEEMLNRVAKLVR

SEQ ID NO: 55177 - DNA, 504 bp, Unknown
  Obtained from environmental sample
  misc_feature (1)..(504): n is a, c, g, or t
atgatacacatttataccggagacggaaaaggaaaaaccaccgccgctatgggcctcgcgatccgagccgccgggcgcggcaaaaaagttgtgattgtccagtttctaaaggggactgacaccggggagctttattccttgagccttattcccaatattacagtgatccgaaacagtgaagccaaaggcttttttcacactgtctctccggaaattcgcctgaaaataataaaagaaaacaacgataatattaaaaaagctttagccctgcctaatgatctaattgtgcttgatgaagtcttcgcggcctatgatcttgaagctgttgaccggaaggcggtggacgatctgatatgcggcttcagggcggagaaagaacttgtcctgacaggcagaaatccccctcagcatttctgtgacgcggcggattacatttcagagatacacaaggtaaagcatccctttgatcggggcgttcaggcaagagaagggattgaatactga

SEQ ID NO: 55178 - protein, 167 aa, Unknown
  Obtained from environmental sample
  DOMAIN (1)...(167): ATP:corrinoid adenosyltransferase BtuR/CobO/CobP
  misc_feature (1)..(167): Xaa is any amino acid
MIHIYTGDGKGKTTAAMGLAIRAAGRGKKVVIVQFLKGTDTGELYSLSLIPNITVIRNSEAKGFFHTVSPEIRLKIIKENNDNIKKALALPNDLIVLDEVFAAYDLEAVDRKAVDDLICGFRAEKELVLTGRNPPQHFCDAADYISEIHKVKHPFDRGVQAREGIEY

SEQ ID NO: 55179 - DNA, 852 bp, Unknown
  Obtained from environmental sample
  misc_feature (1)..(852): n is a, c, g, or t
ttgacaatacccccaaaaacaaaaagggcggtctccccccgcgtcaggcgcgccccaacttttttcaccgcccgccccgcccatgatatatattacaagtacccaaaccgaggagaccctatgcaggtaaagaagaaagccgcgaaaaagacctataagtcgtcggccaagaaaaagaccgttccgagcctcaaaaagatgtcagtcgaggagttacttgccgtcatggccgaaaaccacgccaaaaccgaggcctcgattgataggctatccgccgtccaagccaaaaccgaggcctcccttttggaactacatgccgaagtcagggaaacctctgccgaagtcagggaaacctctgccaaagtcagggaaacctcggaatccgtccggcaactgaacgacacgctcggcgggatgggcggacacctcggcgaagtgatagagtttatcgtcgtacccaagatacgccccgcggtaaacgctttgggggatcactcgtttaaagagatcacggcacggaaaatcgtcgagaccgttatcaacgatagaaagagaaagcttaccgaggtagacgtgctgctgtacggcgacaccgaggttatggccgtcgagataaagacctgtttgcagacaagcgacgtcgataaacatttggaccgtctgcaaaaactgcgcgaccacgaagtagacgccgaggtcaacggcaagacgcttttcggcgcggtggtaggcgcaatcgtgcacgatccgatccgcgcctacgccctgaaaaatggtctatacgtcatagagatcagagaggaagaaaataaactcgacatagacaaaccagacacctgccggacgtggtaa

SEQ ID NO: 55180 - protein, 283 aa, Unknown
  Obtained from environmental sample
  misc_feature (1)..(283): Xaa is any amino acid
MTIPPKTKRAVSPRVRRAPTFFTARPAHDIYYKYPNRGDPMQVKKKAAKKTYKSSAKKKTVPSLKKMSVEELLAVMAENHAKTEASIDRLSAVQAKTEASLLELHAEVRETSAEVRETSAKVRETSESVRQLNDTLGGMGGHLGEVIEFIVVPKIRPAVNALGDHSFKEITARKIVETVINDRKRKLTEVDVLLYGDTEVMAVEIKTCLQTSDVDKHLDRLQKLRDHEVDAEVNGKTLFGAVVGAIVHDPIRAYALKNGLYVIEIREEENKLDIDKPDTCRTW

SEQ ID NO: 55181 - DNA, 384 bp, Unknown
  Obtained from environmental sample
  misc_feature (1)..(384): n is a, c, g, or t
gtggacgccgccaagggaatcgagatgatgaacggcgacgcgaaaatttacctgcggatactgggcgtcttccacaaaggcgggcgggataaaatcaacgagataaacagcgcgctcgaagcctccgacatacgcctatacaccacctacgtccacggcctgaaaagcgccctcgcgagcatcggcgcgaccgaactctcggcggcggcgcttgccttggagatggccggcagaggggacaaccgcgaatacatagacgaacacacgccgaagttcataagcggcttggagtcgctgcttgccggtatcggggagttcttcgggacggcggggacgggggacagcgtacccaccggaaagatgggtacgcggaagagggattga

SEQ ID NO: 55182 - protein, 127 aa, Unknown
  Obtained from environmental sample
  DOMAIN (19)...(106): Hpt domain
  misc_feature (1)..(127): Xaa is any amino acid
MDAAKGIEMMNGDAKIYLRILGVFHKGGRDKINEINSALEASDIRLYTTYVHGLKSALASIGATELSAAALALEMAGRGDNREYIDEHTPKFISGLESLLAGIGEFFGTAGTGDSVPTGKMGTRKRD

SEQ ID NO: 55183 - DNA, 717 bp, Unknown
  Obtained from environmental sample
  misc_feature (1)..(717): n is a, c, g, or t
atggaatatgaatttgaaggacgtaccgaaaaagaggcgattgatcgcgctgcggaagagcttggtcttgaaaaagacgattttgacgtggagattctggaaacccaacgccaggggctgttcaagaaaggccatgtgcggataaaggttcataccgacaggcctgttgcgcgtaacaaacagactcangcggtcgacgggggaaacgcgcggcaggaacgttcccgtcagccggttttcggcgatccaatggcccagaatgaattcgagaaaaaaattatcgactttgtcgaggaacttatcaaacggatgggttacgatggaaaagtttcagttatgttccgggatgaattcaaactcggcctcaagatcgattccgatcattcttccatactgattgggaaaaaaggaaaaaatcttgacgctcttcagcttttggtgaatatctatgccggaaggcagggacatgaggatatacgggttattctggacagcgaaaattaccgcatacgccgcgaagaatcgctggtacggctggcctacactgtagccgaccgcgttcgggaaagccgcagttctatcctgctcgaaccgatgaacccctttgatcgccgccttatccatacaacgctaaacgacattaccgacattgaaaccaaaagcgaaggagatggtttatataaacaggtaagggtctttttccgtggcgcaaaataa

SEQ ID NO: 55184 - protein, 238 aa, Unknown
  Obtained from environmental sample
  DOMAIN (180)...(235): R3H domain
  misc_feature (1)..(238): Xaa is any amino acid
MEYEFEGRTEKEAIDRAAEELGLEKDDFDVEILETQRQGLFKKGHVRIKVHTDRPVARNKQTXAVDGGNARQERSRQPVFGDPMAQNEFEKKIIDFVEELIKRMGYDGKVSVMFRDEFKLGLKIDSDHSSILIGKKGKNLDALQLLVNIYAGRQGHEDIRVILDSENYRIRREESLVRLAYTVADRVRESRSSILLEPMNPFDRRLIHTTLNDITDIETKSEGDGLYKQVRVFFRGAK

SEQ ID NO: 55185 - DNA, 462 bp, Unknown
  Obtained from environmental sample
  misc_feature (1)..(462): n is a, c, g, or t
atgctgctgcagatccccattttctttgcgatgtataatctttttaacagtcattttgatctgcgcggggcaatgtttatacctcactggataccggatctgtcggtgccagaatctatttgggatttcccgtccggcgccagactgccccttctcggctggaccgcgctgcgccttttgccgtttatatatgtcggctctcagctgctttacggcaaggtaacccaaacccccgatcagaagggcaatacgcagatgaaaatgatgttatacgtcatgccgattgttttctttttcattctatatgacgtgccgtcaggcctcctgatatactggattttttcaaacctgctgacacttgtccagcagcttgtgataaacaagtatttcatcccgagaaagaagcaagcggagccagaagaagcgccgccggcgtttacgcaaaagaggaagagaagataa

SEQ ID NO: 55186 - protein, 153 aa, Unknown
  Obtained from environmental sample
  DOMAIN (1)...(131): 60Kd inner membrane protein
  misc_feature (1)..(153): Xaa is any amino acid
MLLQIPIFFAMYNLFNSHFDLRGAMFIPHWIPDLSVPESIWDFPSGARLPLLGWTALRLLPFIYVGSQLLYGKVTQTPDQKGNTQMKMMLYVMPIVFFFILYDVPSGLLIYWIFSNLLTLVQQLVINKYFIPRKKQAEPEEAPPAFTQKRKRR

SEQ ID NO: 55187 - DNA, 1092 bp, Unknown
  Obtained from environmental sample
  misc_feature (1)..(1092): n is a, c, g, or t
gtgcctcaggaagaatggagttctttgcctaatttacggaagttaaaacccgattatataattcacggagacgactggaaaagcggtccctcccaaaaagagcgcgaggaagtatttgcggcaatgaaagaactcggcggcgaagttattgagattccctataccggaggggttaattcatcttcaataaatgaggcgatacgttccattggaacaacaccggacatacgcctaaaaacactacgccgccttcttgagttaaagaagcttgtaaggattatggaggcgcattccggcctgtccggtttaataatagagaggttagaaattgaaaaagaagacggtctgcatagttttgacggaatgtgggcgtcaagtttaactgactcaacaagcaagggaaaacctgatacagaagcagtcgatcttactacacgcctgcatgacttgattaatattctggaatgtactacaaagccgataatttttgacggagacacaggcggtcaacattttgcctttaccgtaaaaactcttgagagaaatggaatatctgcggtcatcatagaagacaaggccggtcttaaaagaaattcgcttttcggcactgaagtaaatcaggaattatgccctatccctgatttttgtgaaaaaataaaagccggaaaacaagcgcaggttactaaagaatttatgattatcgcgcgcctggaaagtttgattgcgggatttccagtccctcacgcgcttgaaagggcgcgcacttttgtcgatgcgggggctgacggcgttatgatacatagtaaagaaaaaacaggcgatgacattaaagaattttgttcgcttttccgcgccgaatatcctcatataccgcttgtacttgttccgacaacatataatcagtttacggaaaaagaactagcctcatggggtgcgaatattattatctatgcgaatcatatgctccgttccgcttatcccgcgatgatgaataccgcaaaaatgattttacaaaacgaacgttcactggaagctgattcagtttgtatgccaataaaacaaatacttgaattaatcccaggcggaaaataa

SEQ ID NO: 55188 - protein, 363 aa, Unknown
  Obtained from environmental sample
  misc_feature (1)..(363): Xaa is any amino acid
MPQEEWSSLPNLRKLKPDYIIHGDDWKSGPSQKEREEVFAAMKELGGEVIEIPYTGGVNSSSINEAIRSIGTTPDIRLKTLRRLLELKKLVRIMEAHSGLSGLIIERLEIEKEDGLHSFDGMWASSLTDSTSKGKPDTEAVDLTTRLHDLINILECTTKPIIFDGDTGGQHFAFTVKTLERNGISAVIIEDKAGLKRNSLFGTEVNQELCPIPDFCEKIKAGKQAQVTKEFMIIARLESLIAGFPVPHALERARTFVDAGADGVMIHSKEKTGDDIKEFCSLFRAEYPHIPLVLVPTTYNQFTEKELASWGANIIIYANHMLRSAYPAMMNTAKMILQNERSLEADSVCMPIKQILELIPGGK

SEQ ID NO: 55189 - DNA, 690 bp, Unknown
  Obtained from environmental sample
  misc_feature (1)..(690): n is a, c, g, or t
atgaaagtcaaaaaaataaaaggagtgtttattatgaaaaacgtatttaaaattttaacaattatcgctctcgcggcggtaatcgtgttcacaacaacagcgtgttccggtaaaagcggcggtaagtccggcggcgcacaggggacttcggattcatccgacggcggcaagaccgttgtcaagaccggcggtaaaagcaaatccgaagatttcggctattggcggaacaaggaaaataccggcgtcatgattgtctactatacgggaaccggtacggatattgttattcctgatagtttcgaaaagctgccggtggttgacatatatgaaaatttatttaagggagatgcggaaataacgtccgtctcaatacccggcacggtaaaggaaattccggaaggcgcgttccagggatgcacaagacttgcaagcgtaaaacttaccaatgggttaacaagcataggcgccggcgcgtttaggggatgcacctcccttacatcaattaaaataccggaaggaataaccgtcattgacaatggtactttttacggctgtaccgcccttaccgacgtgcagttgccggagagtttgacaaccatgaacgggagagctttttccggctgcataaatctggtaaagctgaacgtccccgccgcgctgaccaaattttataaatttaaaagcnggtga

SEQ ID NO: 55190 - protein, 229 aa, Unknown
  Obtained from environmental sample
  SIGNAL (1)...(29)
  misc_feature (1)..(229): Xaa is any amino acid
MKVKKIKGVFIMKNVFKILTIIALAAVIVFTTTACSGKSGGKSGGAQGTSDSSDGGKTVVKTGGKSKSEDFGYWRNKENTGVMIVYYTGTGTDIVIPDSFEKLPVVDIYENLFKGDAEITSVSIPGTVKEIPEGAFQGCTRLASVKLTNGLTSIGAGAFRGCTSLTSIKIPEGITVIDNGTFYGCTALTDVQLPESLTTMNGRAFSGCINLVKLNVPAALTKFYKFKSX

SEQ ID NO: 55191 - DNA, 498 bp, Unknown
  Obtained from environmental sample
  misc_feature (1)..(498): n is a, c, g, or t
ttggaggggaaaatgaaacaaaagcattcatgggatattacagataagttctgggctatagcggagcctttaattcctaaaaaaacaagagaccctgataaaacataccagcgaaaacaagggggaggccgcccgccaatggaacctcgaaaagcccttgaagccattttttatgtattgcgtaccggtatccagtggaaggctttgcctgtttcctttggctcttccagcgccgtccaccgctatttcatgttttggtccgagactggcttctttaaggccatgtgggcttgcggattacgaaagtatgacgaagtaaaaggcataaactggacatggctaagcggggacggctgcatgaccaaggctccattggcccaggaaacagtcggcgcgaatccaaccgaccgtgggaaaaaaagggagcaagcggcatatgctcgtagacggcatcggggtacctattgccatggtagtaaccggagcaaacaggcatga

SEQ ID NO: 55192 - protein, 165 aa, Unknown
  Obtained from environmental sample
  misc_feature (1)..(165): Xaa is any amino acid
MEGKMKQKHSWDITDKFWAIAEPLIPKKTRDPDKTYQRKQGGGRPPMEPRKALEAIFYVLRTGIQWKALPVSFGSSSAVHRYFMFWSETGFFKAMWACGLRKYDEVKGINWTWLSGDGCMTKAPLAQETVGANPTDRGKKREQAAYARRRHRGTYCHGSNRSKQA

SEQ ID NO: 55193 - DNA, 438 bp, Unknown
  Obtained from environmental sample
  misc_feature (1)..(438): n is a, c, g, or t
gtgggaaaaaaagggagcaagcggcatatgctcgtagacggcatcggggtacctattgccatggtagtaaccggagcaaacaggcatgatgtttcccagcttgaaacgcttttggattctatcgtcatagaaaggcctgacccattcgagcatcctcaaaatctctgccttgacaaagggttttccggcgagccggctttggaaacggttgtattaaagggttttataccgcatataaaaagtcgaggagaggaaaaaagcagcaaagaacaaaatccggcatacaaagcccgccgatgggtagttgaagttacccactcgtggatgaatagattccgaaaacttctggttcgatatgagaaattagacaagacatataaagggctgcttatgctatcgtgtgcttttatcgctcttcgtaaggcagaggttatttag

SEQ ID NO: 55194 - protein, 145 aa, Unknown
  Obtained from environmental sample
  DOMAIN (2)...(136): Transposase DDE domain
  misc_feature (1)..(145): Xaa is any amino acid
MGKKGSKRHMLVDGIGVPIAMVVTGANRHDVSQLETLLDSIVIERPDPFEHPQNLCLDKGFSGEPALETVVLKGFIPHIKSRGEEKSSKEQNPAYKARRWVVEVTHSWMNRFRKLLVRYEKLDKTYKGLLMLSCAFIALRKAEVI

SEQ ID NO: 55195 - DNA, 360 bp, Unknown
  Obtained from environmental sample
  misc_feature (1)..(360): n is a, c, g, or t
ttgataaaagttcttattccttacgcgcttaggtcatttaccgagcgcaacgcggaggtggaagtaaacggcggcactgcgggcgacgcgattaacgcgcttgcgaacgcctaccccgctcttaaaacccaccttttcacggaagacggtcagcttcgtgattttatcaacttgtttgtaggcggcgcanacatcaacagcttgcagggacttaacactcccattgcggataacggcgaattgatgattgttcctgccattgcgggcggcagtgacgcggagcttaccaacgaagaaatagggcgatacagccgccatttgcttttgccggaatcggagttgagggtcaaaaaaaattaa

SEQ ID NO: 55196 - protein, 119 aa, Unknown
  Obtained from environmental sample
  DOMAIN (4)...(90): ThiS family
  misc_feature (1)..(119): Xaa is any amino acid
MIKVLIPYALRSFTERNAEVEVNGGTAGDAINALANAYPALKTHLFTEDGQLRDFINLFVGGAXINSLQGLNTPIADNGELMIVPAIAGGSDAELTNEEIGRYSRHLLLPESELRVKKN

SEQ ID NO: 55197 - DNA, 801 bp, Unknown
  Obtained from environmental sample
  misc_feature (1)..(801): n is a, c, g, or t
ttgtatcttgcggctgccggcgtgggaacaatcgggctggcggatttcgacgtggtagacgaatcaaaccttcagcggcaaattattcacagcacgcgcgacgtgggcaggcccaaagtggcctccgcaaaggacaggatcaaggggattaacccgctggtgaatgtggtgacgcataacgaaatgctcacaagcaggaacgcgctggagcttttcgccgattacgacattatcgccgacggaacggataattttcaaacacgttaccttgtaaacgacgcttgcgtttttttgggcaaacttaacgcctacggttccgtgtttcaattcgacggacaggcgactgttttcggcgcaaaagacggtccgtgctaccgctgcctgtacccttcaccgccgccccccggacttgttccttcctgcgcggagggcggagttatgggcgtactgcccggcattatcggaaccattcaggcagcggaaacgattaagctcattgtaggcggcgcaaagccgctcatcgggcggctgcttttgtttgacgcgtggcgcatgtcgttccgcgaattaaaacttgaaaaaaatcccgactgtcccgtatgcgggaaaaatcccaccattcacgaattaattgattatgaacaattttgcggtttgaaaaagaacaccgacagcaaaccaatagataccataaccgctcttgaattaaaaaaacgccttgataacggagataaaattcaatttatagatatacgcgagccgcatgaacgcgccattgtaaaatccccaatgccatggtaa

SEQ ID NO: 55198 - protein, 266 aa, Unknown
  Obtained from environmental sample
  DOMAIN (1)...(117): ThiF family
  misc_feature (1)..(266): Xaa is any amino acid
MYLAAAGVGTIGLADFDVVDESNLQRQIIHSTRDVGRPKVASAKDRIKGINPLVNVVTHNEMLTSRNALELFADYDIIADGTDNFQTRYLVNDACVFLGKLNAYGSVFQFDGQATVFGAKDGPCYRCLYPSPPPPGLVPSCAEGGVMGVLPGIIGTIQAAETIKLIVGGAKPLIGRLLLFDAWRMSFRELKLEKNPDCPVCGKNPTIHELIDYEQFCGLKKNTDSKPIDTITALELKKRLDNGDKIQFIDIREPHERAIVKSPMPW

SEQ ID NO: 55199 - DNA, 918 bp, Unknown
  Obtained from environmental sample
  misc_feature (1)..(918): n is a, c, g, or t
ttgtcgcttggaatttcacccgaccggatgtcttacgggaatacgattaaaaaggcgaaagacgtagagtacttttatcaaaaaggcgtgcgtatgttcgcgaccgacagcgaaggcgatctgaagaacatagcttcgtacgctccgggttcccgtgtctatgtgcgtatcgtaatgggcgattccagcaccgccgactggccgctttcgcgtaaattcggatgtcaccctgatatggcgtacggccttcttattatggcgcgttcgcttggtttaacaccctacggtatatcttttcacgtgggaagccaacagagggatattggccagtgggacgaggcgatcgcgaaaacaaagtatcttttttcttccctggaaaaagatgaaaatatacgcctgtcgatgatcaatatgggcggcgggtttcccgcgtcttatgttcagccctccaatgatttaaccgaatacgcttcggaaatacacaaatatctgacggatgattttggttctgacataccttttatcgcgcttgaaccgggacgctctctggtaggcgacaacggcattctgatagcggaagtcgttttaatttcaagaaaaacccatacggctcttaaccgctgggtgtatcttgataccggaaaatttaacgggcttattgaaacattaaatgaatcaataaaatatcctatcgttatagaaaatgaggacgatgaggcggaggaagaagaagtaatcatcgccgggcctacctgcgacagccaggatattctgtacgaagatcacaaataccagcttccggtagacctaaaaataggcgacaaactctattttctttcagcgggggcgtataccgcaagttatgcttctgtttgttttaacggcttcccgccgattaagacttatattatggagtag

SEQ ID NO: 55200 - protein, 305 aa, Unknown
  Obtained from environmental sample
  DOMAIN (1)...(186): Pyridoxal-dependent decarboxylase, pyridoxal binding domain
  misc_feature (1)..(305): Xaa is any amino acid
MSLGISPDRMSYGNTIKKAKDVEYFYQKGVRMFATDSEGDLKNIASYAPGSRVYVRIVMGDSSTADWPLSRKFGCHPDMAYGLLIMARSLGLTPYGISFHVGSQQRDIGQWDEAIAKTKYLFSSLEKDENIRLSMINMGGGFPASYVQPSNDLTEYASEIHKYLTDDFGSDIPFIALEPGRSLVGDNGILIAEVVLISRKTHTALNRWVYLDTGKFNGLIETLNESIKYPIVIENEDDEAEEEEVIIAGPTCDSQDILYEDHKYQLPVDLKIGDKLYFLSAGAYTASYASVCFNGFPPIKTYIME

SEQ ID NO: 55201 - DNA, 561 bp, Unknown
  Obtained from environmental sample
  misc_feature (1)..(561): n is a, c, g, or t
atgctggaaagatttcgggataagttaaaaaaatccggtaagcagcaattacaggaaaatatacatattcataaaggggatatgtcaacttttaatcttgatcaaaagtttgaatatataataataccgtggcgggcattacagtggctgcccataaaagaaaaaaccatagaatgcttaaattgcgtatataggcatcttacagataatggtatttttatttttgatatattcaaaccaagaacctatgatgaaaaatggcttggtaaagaagatatatcctatgatattattgacggggacaaacgcattattcgctcaacaataaaccatcacgcagataccgaaaaaaaatatattcaatataaaaataaaatacgtatattggaaaatggcgctgaaagagtaaaagaagatttgttgacaataaaatattatgaatataatgatattgttactgtattaaaagagttaaaatttaaaataaaagaagaatatgggtattatgataaaagggcaataaaagacggcgaagaaatgatatttgtatgtacaaaataa

SEQ ID NO: 55202 - protein, 186 aa, Unknown
  Obtained from environmental sample
  misc_feature (1)..(186): Xaa is any amino acid
MLERFRDKLKKSGKQQLQENIHIHKGDMSTFNLDQKFEYIIIPWRALQWLPIKEKTIECLNCVYRHLTDNGIFIFDIFKPRTYDEKWLGKEDISYDIIDGDKRIIRSTINHHADTEKKYIQYKNKIRILENGAERVKEDLLTIKYYEYNDIVTVLKELKFKIKEEYGYYDKRAIKDGEEMIFVCTK

SEQ ID NO: 55203 - DNA, 747 bp, Unknown
  Obtained from environmental sample
  misc_feature (1)..(747): n is a, c, g, or t
atgttggagaacaacagcctgacagcggcgggctttaaagcccttgaaccgtaccgcgtcagaagggcggtctttattgccgccggtttcggttcccgccttgttcctattacacttaacacccccaagccgctggttcgcgttaagggcgtgcgcattatcgacacattacttgacgctgtaagcgccgccggcattgacgaaattgtcattgtccggggttatctgggcgagcagtttgaccagctaaaatataagtacccgaagattcaatttttggaaaatccattgtacaatgaatcgaataatatatcttcagctatgtgcgtccgctatatgctgcaaaacgcttatgttttggaatccgatcttctgcttataaatcccacccttatccgaaagtatcaatatgcaagtaattatctcggtgttccggttgagcgtaccgatgactggtgctttgagaccaacaacggaattatcacgcggataagggtcggagggcagaactgtcatcaaatgtttggtatttcctactggacccaaaccgacggggccaggttggcggatcacatcaaacaggtgtatgagatgccgggcggtaaagaacgctattgggatcaggtggcgttggagtattttatcagggaatactctgttgaggtgagggaatgtacctttgacgatgttatagaaattgacactttcaatgaattaaaaaaacttgatgagacttaccgagtgtag

SEQ ID NO: 55204 - protein, 248 aa, Unknown
  Obtained from environmental sample
  DOMAIN (22)...(240): Nucleotidyl transferase
  misc_feature (1)..(248): Xaa is any amino acid
MLENNSLTAAGFKALEPYRVRRAVFIAAGFGSRLVPITLNTPKPLVRVKGVRIIDTLLDAVSAAGIDEIVIVRGYLGEQFDQLKYKYPKIQFLENPLYNESNNISSAMCVRYMLQNAYVLESDLLLINPTLIRKYQYASNYLGVPVERTDDWCFETNNGIITRIRVGGQNCHQMFGISYWTQTDGARLADHIKQVYEMPGGKERYWDQVALEYFIREYSVEVRECTFDDVIEIDTFNELKKLDETYRV

SEQ ID NO: 55205 - DNA, 1650 bp, Unknown
  Obtained from environmental sample
  misc_feature (1)..(1650): n is a, c, g, or t
atgtccttgatgcgtaaagaaaagctgcgtggaaaagcgatcaaatatgtacccgcatctttattgactaaagagttttactcggaagcttttactttgaatgtcgatgtgattgaaaacatccccaaagaatttatcaccgcaaagatgtgtgaagaggcgattcagaaaaatagacataacattgcgtacattcccttcgaataccgcacggaaaaaattataaccgaggcaataaaaaacaacggccttgcgctaagtgaaattgacgatacccaaaaaacagaacagctttgcctgttggcaataagaaatcacggcggtgctcttcaatatgtcccctatcaactacgaacgccggaaatatgccttgaggcggttaaaaattttaatggcgctttaaactatgttcctgaacatataagaactgcggatttccatactgaatacttaatagaagatgactggattgatgaattattagcaggatatgatgaaagattgcttaaggctgtcagaaaagacgcaaggaatctcgccgccatacccgaagaacagagaacctatgaactatgcgttgaagctctgctaaacaataatgacagtgattcagtacttaaatacgtcccggatgaattcaagacccctgagttctaccgtaactgtgtccgcattaataacaagcattttaaagacattcctgattcaatgaaatcctacgagctttgttttgaggcggtaaccaatagcccttacgcgctggaatatgttccgcagcgtcttttgaccaaagaaattatccttgccgccctcagccaaaaaagtatggctgtccttgactatgtgccgcctgagtttatgacagaggaagtatatacaacagcttttaagaatgacattttcggtgatatagcttacatatttcccgaagaataccgcacaaaagagaattatcttgccatgctgggtaacccctattcggtttgttcaacgattataaaaaccatgccggattatcttaaaaccgatgactttttggttgccgccgccaagttgagggatgaaatgcttgaatatgtgccagaataccttcttactcaagagctttgctatgaattagttaaagccaacgggtacgcccttagaataacgccgccgcaattcataacggaagccctctgccgcaccgccgtagaaagcgatcccagggcgctttgttacgttccggaagaatttagaactcatgaaatctgcgatttggccttacaaaaggatatgggacttattaaatatgcgcccgctgattttgctatcacagccgatttatgccgccgggcggtggaagctgacgccgacgcgataaatcaaattcctgaacaattccgcaccgaagagctctggcgcatagctgtttccgaatacggccgtttgctggaagatttacccgcttcattgatgtcggaagaattctgccgccttgcggttgccaacgacggtagggcacttgagtttgtacctgacaaaaataaaacaaaagatgtgtgttttgaggcggtacggaatagcggccacgcgcttaaatttgttgatgtcagcaagctaaccaaagaggaatattctaaattatgcaggctcgcgtttgagagataa

SEQ ID NO: 55206 - protein, 549 aa, Unknown
  Obtained from environmental sample
  misc_feature (1)..(549): Xaa is any amino acid
MSLMRKEKLRGKAIKYVPASLLTKEFYSEAFTLNVDVIENIPKEFITAKMCEEAIQKNRHNIAYIPFEYRTEKIITEAIKNNGLALSEIDDTQKTEQLCLLAIRNHGGALQYVPYQLRTPEICLEAVKNFNGALNYVPEHIRTADFHTEYLIEDDWIDELLAGYDERLLKAVRKDARNLAAIPEEQRTYELCVEALLNNNDSDSVLKYVPDEFKTPEFYRNCVRINNKHFKDIPDSMKSYELCFEAVTNSPYALEYVPQRLLTKEIILAALSQKSMAVLDYVPPEFMTEEVYTTAFKNDIFGDIAYIFPEEYRTKENYLAMLGNPYSVCSTIIKTMPDYLKTDDFLVAAAKLRDEMLEYVPEYLLTQELCYELVKANGYALRITPPQFITEALCRTAVESDPRALCYVPEEFRTHEICDLALQKDMGLIKYAPADFAITADLCRRAVEADADAINQIPEQFRTEELWRIAVSEYGRLLEDLPASLMSEEFCRLAVANDGRALEFVPDKNKTKDVCFEAVRNSGHALKFVDVSKLTKEEYSKLCRLAFER

SEQ ID NO: 55207 - DNA, 924 bp, Unknown
  Obtained from environmental sample
  misc_feature (1)..(924): n is a, c, g, or t
atggcacataataagaagttttggatcatcttaaatcctacggcaggtaagggtaaggcggccaagcagcaccctaaaattgagcgttttctgcgggaaagcggatgtaactatgaaattattttaacaaaaggaatcggcgacgcgcttaatatggcgcgtgacttgcctgcgaacgcggacgatgtaacggtagccgcgggcggggacggaacctgcaacgaagtcataaacggattattattgcgtaaagccgccgctccccctgttttcggaatcctccccatagggcgcggcaatgatttttccgctaccccaaaaattcctcaggatgtcgaaaaagccctgcagttaatgattaacggaaacgccaagccgctcgacgccggttttgttaaaggcggctttttccccgacggccgctattttgtcaacggaatcggcataggctttgacaccaaggtcggctttgaggcggcaaaattaaaaataaagagcggcatttcctacgtcgtcggcgcttttatcatgcttatccgttatgagccttcgcctattttgcatattagttatgacggcaaggaaataactctccccgcggttcttgtttcggttgtaaacggaagacgcatgggcggaagtttctacatgggcccgaacgccctgcttgacgacgggcttttggacatctgttatgtgcagcatcaaaaatcgcgtttaagcctgcttaaaataatgtcccattatacaaaaggaacccaaggcgaatgtaagggcgtaactttcgacagaggctcgcattttgttcttaaggcgcttgagggaggaatggcggcgcactgcgacggggaaacagtctgttacgatggcaaggaattggagataacctgtatcccgaacgccctgcggcttatagaggcgtaa

SEQ ID NO: 55208 - protein, 307 aa, Unknown
  Obtained from environmental sample
  DOMAIN (6)...(135): Diacylglycerol kinase catalytic domain (presumed)
  misc_feature (1)..(307): Xaa is any amino acid
MAHNKKFWIILNPTAGKGKAAKQHPKIERFLRESGCNYEIILTKGIGDALNMARDLPANADDVTVAAGGDGTCNEVINGLLLRKAAAPPVFGILPIGRGNDFSATPKIPQDVEKALQLMINGNAKPLDAGFVKGGFFPDGRYFVNGIGIGFDTKVGFEAAKLKIKSGISYVVGAFIMLIRYEPSPILHISYDGKEITLPAVLVSVVNGRRMGGSFYMGPNALLDDGLLDICYVQHQKSRLSLLKIMSHYTKGTQGECKGVTFDRGSHFVLKALEGGMAAHCDGETVCYDGKELEITCIPNALRLIEA

SEQ ID NO: 55209 - DNA, 810 bp, Unknown
  Obtained from environmental sample
  misc_feature (1)..(810): n is a, c, g, or t
atggtaatctccgatatccacaaaaaaaagatatttccggcattggttttttgtatattaatactgatatcctgtaacaatagatattacaatgattatgattcaagattcgcctggtatgatgatgtcagatttcccgctcttagtcctccgctgggagatagttattcgtttattgtgatgagcgatacacatataagaaatgattatttcgcggaacaattttccggaataaaggcaaagttaaataatgatgaccggtttatcgttattacgggggacatcaccgaagacggttccaaagaacaattacagctttttttggacgcttctgccgtaattggaataccgtgttatcctgttatcggaaatcatgatatctatacagacagaggcaaatactggaaagaattaatcgggtcctccgtttaccgcattgattcatcagatacaaccctgtttttccttgataacgcaaacggaacttttggatacgaacagcttgaatggtttgaaagagaactcaaaaccgccggaaaaaatacttttgtctttgctcatgaaaatttttttatagataccgctcctcccgatcatggacagctcactgatattcgggaacgcgccagggtaatggctttggtaaaaaaccgctgcactgctgtattcatggggcatctccataaacgcattattaaaaaatttgacggagtaacatacattatgctggaagaatttgcatataaattgactttatgcagggtatatgtatcgaactccgggttttactgggaaattatagatgaataa

SEQ ID NO: 55210 - protein, 269 aa, Unknown
  Obtained from environmental sample
  DOMAIN (56)...(230): Calcineurin-like phosphoesterase
  misc_feature (1)..(269): Xaa is any amino acid
MVISDIHKKKIFPALVFCILILISCNNRYYNDYDSRFAWYDDVRFPALSPPLGDSYSFIVMSDTHIRNDYFAEQFSGIKAKLNNDDRFIVITGDITEDGSKEQLQLFLDASAVIGIPCYPVIGNHDIYTDRGKYWKELIGSSVYRIDSSDTTLFFLDNANGTFGYEQLEWFERELKTAGKNTFVFAHENFFIDTAPPDHGQLTDIRERARVMALVKNRCTAVFMGHLHKRIIKKFDGVTYIMLEEFAYKLTLCRVYVSNSGFYWEIIDE

SEQ ID NO: 55211 - DNA, 1302 bp, Unknown
  Obtained from environmental sample
  misc_feature (1)..(1302): n is a, c, g, or t
gtgaatacggctactcttacacgttttggccgccgctgggtgaaaaacctctctaaaaacctgcaaaccatccgggatatgccgggcatagcccgcttggaaggcctgttacacaccacggaatttccggtgttccttgccgccggcggacccagcctggacaggacttcttcttttataaaggaaatctacaatcggtgcgttgtagtggcggtggacaccagcctccgctttatcctttccaggggaatagagccggattttgtggtttctgtggatccccagtattggaatttccggcacctggaccgctcttatgccccgaacacctgcctcatcgccgaatccgcggtgtacccgccctgtttgcgactttccttcaagcagacattcctcggcggttccctttttcctctgggccgttttatcgaagaccggcttgatcccaaaggcgaacttggggccggaggctctgtggcaaccgcggcctgggactttgcccgaagcctcggggcttctcgtatttggattgccggactggatctctcttttccggggctaaagacccatttccggggcgccctttttgaggatcgcgcccttggggcatccttccgtttttcacccgctgaaacctggtctgtcagagccctgagagacggcggccctttcctggccaaaaacgccttgggcgagcccgttcttacggatcagaggctttccctttatgcctcgtggtttgaaaaccgtttcagtatgttcccggaaatcaagaatctcagtctttccggggaaggactaaagatacggggcatggatgttgcggaagaaaaggcgcttttggcccttcccccgcgcagggatgagataaatgccctattgaaaaacgcctttacaaaggcagccaatgactttagctccctggaagccgaacgggctgtcaaatacgaggaagcgctaaaaacactgcttcaaggacttggggacattacgcgtattgctgaggaagccgcagatcttacggcaaccttttgcgggcgctttcggaagggccatacaaaagccggagacgagggaaaaatcctaaaaaaactcgattccgccaaccaatttatcaataccagcctagttcgtgaaatcgcgggctttctctttcctgatactgcggaatgggaaaaggaacttaacacaaatgaaccacaccccttgctccggcatctggaattttccacacgcttttaccgggccctggcagaagccgcagggtataatctgaaagtcttggaactcagtaacgcttaa

SEQ ID NO: 55212 - protein, 433 aa, Unknown
  Obtained from environmental sample
  DOMAIN (16)...(182): Protein of unknown function DUF115
  misc_feature (1)..(433): Xaa is any amino acid
MNTATLTRFGRRWVKNLSKNLQTIRDMPGIARLEGLLHTTEFPVFLAAGGPSLDRTSSFIKEIYNRCVVVAVDTSLRFILSRGIEPDFVVSVDPQYWNFRHLDRSYAPNTCLIAESAVYPPCLRLSFKQTFLGGSLFPLGRFIEDRLDPKGELGAGGSVATAAWDFARSLGASRIWIAGLDLSFPGLKTHFRGALFEDRALGASFRFSPAETWSVRALRDGGPFLAKNALGEPVLTDQRLSLYASWFENRFSMFPEIKNLSLSGEGLKIRGMDVAEEKALLALPPRRDEINALLKNAFTKAANDFSSLEAERAVKYEEALKTLLQGLGDITRIAEEAADLTATFCGRFRKGHTKAGDEGKILKKLDSANQFINTSLVREIAGFLFPDTAEWEKELNTNEPHPLLRHLEFSTRFYRALAEAAGYNLKVLELSNA

SEQ ID NO: 55213 - DNA, 678 bp, Unknown
  Obtained from environmental sample
  misc_feature (1)..(678): n is a, c, g, or t
ttgacctttctattgtcctttatcaccctgatttttatttgggcaatcgcctttcctgtggggatttattcggcggtaaaaaagtattccgttggggattactgttttacttttttcggcttcatcggccttgccataccgaattttctctttgccctgaccctcatgtacattgccttttcaagatttggcctcagcgtaggcgggcttttctcatcccgtttccgggaggcgccctggagctgggcaaagtttgtcaacctgatgcagcatatctggatccccatgatcgtcctcgggctctcgggaaccgcgagcctcatcagaactatgcgggcaaacctgatggacgagctgaaaaagccctacgtggaaaccgcccgggcaaagggattaaccgaacgaaggcttcttgtaaagtacccggtgcgggtggcgcttaaccccttcatcagcactgtgggctggatccttcccactttggtgtcgggttctacggtagtttcaattgtactcaatttacctactaccgggccgctcctcttgcgctcccttcagtcccaggacatgtacttggcgggaagtttcattttgttattgagtaccctcacggttatcggaaccctgctttcggacatactcctcgccctggcggatccccggatacggttcagttaa

SEQ ID NO: 55214 - protein, 225 aa, Unknown
  Obtained from environmental sample
  SIGNAL (1)...(24)
  DOMAIN (2)...(224): Binding-protein-dependent transport system inner membrane component
  misc_feature (1)..(225): Xaa is any amino acid
MTFLLSFITLIFIWAIAFPVGIYSAVKKYSVGDYCFTFFGFIGLAIPNFLFALTLMYIAFSRFGLSVGGLFSSRFREAPWSWAKFVNLMQHIWIPMIVLGLSGTASLIRTMRANLMDELKKPYVETARAKGLTERRLLVKYPVRVALNPFISTVGWILPTLVSGSTVVSIVLNLPTTGPLLLRSLQSQDMYLAGSFILLLSTLTVIGTLLSDILLALADPRIRFS

SEQ ID NO: 55215 - DNA, 612 bp, Unknown
  Obtained from environmental sample
  misc_feature (1)..(612): n is a, c, g, or t
ttggcgcgcagaagggaagtcagaaacagggaaattcttgaacgaatggttgaattcagtatgattgctccggacgggcgggaatcagcctgggaagagcttttaaccatagccggaggaaaatccgcgtcttacagaggatcgggcaattcgctcggacgccctcattttgcggcgttattgattaaactgaaaatcgttaaaaacgcgaatcaggcgtttgcccgctatcttggggttgggaaaccattgtatgtgccgaaagacggtttgatttttgaagaagccgccgccctgatacgcgaatccggcggcatacctatccttgcacaccccatctcgctttttgtagcgtggggacgccttcccgatttaataaaaacattaaaagatatgggactgatgggtcttgaagcatggcatcccacagccaaacccggttcctgccgccggcttgaagcccttgcgaactctttaagtctctatgtcaccgaaggcagcgactatcacggctcaatccgccctgacagaaaactgggctattcctcccgcggcagaaaaattgatgattctcttttggacgcaattcccgaactgcggcaattcaagtag

SEQ ID NO: 55216 - protein, 203 aa, Unknown
  Obtained from environmental sample
  misc_feature (1)..(203): Xaa is any amino acid
MARRREVRNREILERMVEFSMIAPDGRESAWEELLTIAGGKSASYRGSGNSLGRPHFAALLIKLKIVKNANQAFARYLGVGKPLYVPKDGLIFEEAAALIRESGGIPILAHPISLFVAWGRLPDLIKTLKDMGLMGLEAWHPTAKPGSCRRLEALANSLSLYVTEGSDYHGSIRPDRKLGYSSRGRKIDDSLLDAIPELRQFK

SEQ ID NO: 55217 - DNA, 378 bp, Unknown
  Obtained from environmental sample
  misc_feature (1)..(378): n is a, c, g, or t
atggtcgattttcacactcattcaaatgtttcagacggcgagctttctccggtcatgcttgtaaaagaggcggttaaacagggtcttaccgcccttgccctgacagatcatgacacgatcaacggcttggaaagcgcgaaaaccgccgccaaagaggaaaatttttgctttatccccggaatcgaggtaaatattaactggacaaggggacaatccgggcaaaatatccccggacttggtcccgggggcgagtttcacctgctaggtttgggtataaattcgccaacccccgcttttattccgcgattgaaggcttggcgcgcagaagggaagtcagaaacagggaaattcttgaacgaatggttgaattcagtatga

SEQ ID NO: 55218 - protein, 125 aa, Unknown
  Obtained from environmental sample
  DOMAIN (2)...(119): PHP domain
  misc_feature (1)..(125): Xaa is any amino acid
MVDFHTHSNVSDGELSPVMLVKEAVKQGLTALALTDHDTINGLESAKTAAKEENFCFIPGIEVNINWTRGQSGQNIPGLGPGGEFHLLGLGINSPTPAFIPRLKAWRAEGKSETGKFLNEWLNSV

SEQ ID NO: 55219 - DNA, 822 bp, Unknown
  Obtained from environmental sample
  misc_feature (1)..(822): n is a, c, g, or t
gtgggcctttccggctgtaccaacgttttgaggctgaaccccataatttctttgccgaccccaactattacaagacaaccttggcaaacgagggtgatatcgcgaaaagagtgcacgcgncttttacaaaagtacttcgccgccacagatcccaaagaccgcagcgtattcaggccgcagattatttcagcatactgggaattcctgcgaagcgtagcgacaaaatccaccggaaaattacccgaggcaaaaaaattcctgcttcgttttggcatactgcaccctaaacttttgaatgcggaagccaaagcgtttttctcaaaactggtaacggaaaacgagttgggccagcctatatactacgttgatgaatggctaagagctgtaggaaccggctcggtaagtccctcgacaaccgatgaagttcaggtcgcaaacagcaacaaacaggtaaagctgcgccagcttctggaaaaagcgcatggcaaacttgacggaacaagaacgatgcttaaggcaaaaagccaggagcgcatcgagttggagaaagctctgaagagtcaagtggaatttataatggaacacgagttcctggacgattgtgaaggcgctttgttgtgttattcggatcaacaaaaacggggttttacagacgcccaggaaataatcaggagcctgcttaaaaccgatcgtgaactcaatacgctaataagggacttccgccaggctgaagaagacgtagaagtcctgcgcgacaggcagggcgaagatgacggcgaggggaaaggtcatggatcttcaggccttaaataccgaatttga

SEQ ID NO: 55220 - protein, 273 aa, Unknown
  Obtained from environmental sample
  misc_feature (1)..(273): Xaa is any amino acid
MGLSGCTNVLRLNPIISLPTPTITRQPWQTRVISRKECTRLLQKYFAATDPKDRSVFRPQIISAYWEFLRSVATKSTGKLPEAKKFLLRFGILHPKLLNAEAKAFFSKLVTENELGQPIYYVDEWLRAVGTGSVSPSTTDEVQVANSNKQVKLRQLLEKAHGKLDGTRTMLKAKSQERIELEKALKSQVEFIMEHEFLDDCEGALLCYSDQQKRGFTDAQEIIRSLLKTDRELNTLIRDFRQAEEDVEVLRDRQGEDDGEGKGHGSSGLKYRI

SEQ ID NO: 55221 - DNA, 711 bp, Unknown
  Obtained from environmental sample
  misc_feature (1)..(711): n is a, c, g, or t
atgacggcgaggggaaaggtcatggatcttcaggccttaaataccgaatttgacaccgtgcggcaatcggtaaaaatgaccgtcggcaggcagggtaaccacttccctattctgacaagcgaatatttccgctgcggacctaataatgtcgctttccgggaaaacgtcataactatgttggccaagattgaaagcatagacaaggaggcgttctgccgggtatataaaaacaagcttaaccgcatagtcccctatgtggtgctgctcccctgttacggcgatacgggaatttgctgggagccttttaataaacacaacagggcgaccagccgggggcgtatttttatccccatgtacccccaaaatctttatatagcgcttctaagcgccgtcgcggatctccgctggcaagtagcgaaagaaaaagcttctttttactggatggaagagggtcttacgggcaactactaccagtggttcgtggcgcagaagctgaaaggggatgtaaaggatttttttatacaggattacattctctggatgacaaaagaagccgaaggcatacaaaaactcgaaaaagaaattcgcgggacattctggcggcacatgcccttctcccaggaagtaaaagaaaaacttaaaacccgtagttttgtttatcaggaactgtaccaacgggatcttaaccgcgcaatgtctgatggttattaa

SEQ ID NO: 55222 - protein, 236 aa, Unknown
  Obtained from environmental sample
  misc_feature (1)..(236): Xaa is any amino acid
MTARGKVMDLQALNTEFDTVRQSVKMTVGRQGNHFPILTSEYFRCGPNNVAFRENVITMLAKIESIDKEAFCRVYKNKLNRIVPYVVLLPCYGDTGICWEPFNKHNRATSRGRIFIPMYPQNLYIALLSAVADLRWQVAKEKASFYWMEEGLTGNYYQWFVAQKLKGDVKDFFIQDYILWMTKEAEGIQKLEKEIRGTFWRHMPFSQEVKEKLKTRSFVYQELYQRDLNRAMSDGY

SEQ ID NO: 55223 - DNA, 1194 bp, Unknown
  Obtained from environmental sample
  misc_feature (1)..(1194): n is a, c, g, or t
gtgctggcgataaacaggcaggcggggattgcgccggtgaaagtccgcgccgatctaatcctggtgcttgaaaccgcgctgcgttacgccgaattaagcggcggcgcttttgatcccactatagggccgctggtaaaactctgggacattggcactgagtcgcagcgaatcccgtccaacgaagaaattgccgccgcgctggaacttgttaactatcgtgatttgataattgaccgcaatgccggaaccgcgtttttgcggagaacgggcatggagattgatcttggagcgattgccaaaggctacgcggcggacgaggcggcgcgtattgccagagagggcagggtaaaacgcggcataatcgatctgggcggaaacatttttgcgctgggctggcgcaatgaaagaggatcggtaccatggcgcatcggcgttcaaaatccctttagcgacaggggcgaatctcttggcgcgcttgcggttcatgacacaagcgtcgtaacaagcggcgtttacgagcgtttttttgaaagcggcgggaaacgctaccaccacattctttctacagttgacggttacccggcggacaacggcctgttatctgtaactattgtaacggagcgttcaatggaagccgacgcgctttccaccgccgtttttgctatgggctacgagaagggcaaaaccctgatagattcaatccccggcgcgcaggctgtctttgtgttcgcggacaggagcgtgaaaatcaccgaaggcctctccggcatttcacgctcaccgacgatgaatttacattgtattaaaaatcggcgccacgccgccgttgtaatggccgttgatgtaatcctttaccttctggctgagaagggcttttttcagagcggcaatacggggatcgttctcttttcctttcagcaccaccacgatgttaacatagggggaatccgcgccctcaatgataagggagtccttgagggggttaaggccggcttccagggcgtagttgccgttaatggtggcggcgtcaacgtcccgcagggagcggggaagctgggcggcctcgagcggctcgaacttgaaattccgcggattgccgacgacatcgcggggggtagcgttcaggccggccccttccttgagggtaataagcccttttgcctggagcaggagcagggcccggcccccgtttga

SEQ ID NO: 55224 - protein, 397 aa, Unknown
  Obtained from environmental sample
  DOMAIN (1)...(252): ApbE family
  misc_feature (1)..(397): Xaa is any amino acid
MLAINRQAGIAPVKVRADLILVLETALRYAELSGGAFDPTIGPLVKLWDIGTESQRIPSNEEIAAALELVNYRDLIIDRNAGTAFLRRTGMEIDLGAIAKGYAADEAARIAREGRVKRGIIDLGGNIFALGWRNERGSVPWRIGVQNPFSDRGESLGALAVHDTSVVTSGVYERFFESGGKRYHHILSTVDGYPADNGLLSVTIVTERSMEADALSTAVFAMGYEKGKTLIDSIPGAQAVFVFADRSVKITEGLSGISRSPTMNLHCIKNRRHAAVVMAVDVILYLLAEKGFFQSGNTGIVLFSFQHHHDVNIGGIRALNDKGVLEGVKAGFQGVVAVNGGGVNVPQGAGKLGGLERLELEIPRIADDIAGGSVQAGPFLEGNKPFCLEQEQGPAPV

SEQ ID NO: 55225 - DNA, 399 bp, Unknown
  Obtained from environmental sample
  misc_feature (1)..(399): n is a, c, g, or t
gtgccccgaaaagcgttctttttacaccaggactgctttcgcatggaagaccgtaaaaggaaaaaggatcnccacttctgcccgaccagccctggcgcaatacgccttatcggcgaagaagcggaaaaattgttccgggcggcggaaactgtaaaggtctttcacctttggcntgataaaggggcggaaaccgcgtggtgctcgtgtcccactgacagggcctttaccacacaggaacagtgccgcatgggcgttaacgctgccgcagatgtccttgtagcattaaaacctgacgccttgataactttctatgaaaaacccggcgaagacggcaaaatccccatgaggaaaaatacatttaaaatggagaaaccgcctgagtcaggaattaccgattaa

SEQ ID NO: 55226 - protein, 132 aa, Unknown
  Obtained from environmental sample
  misc_feature (1)..(132): Xaa is any amino acid
MPRKAFFLHQDCFRMEDRKRKKDXHFCPTSPGAIRLIGEEAEKLFRAAETVKVFHLWXDKGAETAWCSCPTDRAFTTQEQCRMGVNAAADVLVALKPDALITFYEKPGEDGKIPMRKNTFKMEKPPESGITD

SEQ ID NO: 55227 - DNA, 1008 bp, Unknown
  Obtained from environmental sample
  misc_feature (1)..(1008): n is a, c, g, or t
atggaatcagataaaaaagcattgaccaaatccccttaccaaaacctacttaataaaatatcccaacgctatattgaaggacagacatatgctgtcttatctgtaaacgaaagcatcatcaatacaaactggaatattggcaaatatattgtcgagtatgaacaaggtggaaagcaaaaagcgcaatatggcgcaaagcttttagaaaatctgtcaaaagacctgactttacggcatggcaggggattcagccgatcaaatcttaactatatgcgtcttttttatctgctatttccaatttgtgagacactgtctcacaaattgtcctggtctcattattgcgaattagtaaaaatcgatgatgaattagaaaggtcgttttattaccaacaaaacctattagaaaattggggcgttagagagttgagacgccaaaaagattccgctttatttctacgtcttgcttctgccaaagataagaacaaggtactggccttggcaaaaaaggggcaaattattgaaactccaggagatttaataaaggatgtgtatgtctttgaatttctcaaaatacccgaaccttatattatctctgagaaagaacttgaaacaaggttaatcgataaccttcaaaactttcttcttgaacttggtaaaggctttacctttgtcgggcggcaataccggataatccttgacaatagcgtatatcgggttgacttggtattttatcacaggatactgcgttgttttgtccttatagacctcaagatcaacgaagtaaaacacggcgatatagggcagatgaatatgtacatgggctattttgacaaggaagaaaacaccgaaggagataacccgcccatagggataatactttcaaaagaaaaagacgaactccttgtcgaatatgccacctatgggatgaatagccagctatttatttcaaaatatcagctatatttgcccaataaagaagaactgcgtcaattgttgaataaccaataa

SEQ ID NO: 55228 - protein, 335 aa, Unknown
  Obtained from environmental sample
  DOMAIN (16)...(335): Protein of unknown function (DUF1016)
  misc_feature (1)..(335): Xaa is any amino acid
MESDKKALTKSPYQNLLNKISQRYIEGQTYAVLSVNESIINTNWNIGKYIVEYEQGGKQKAQYGAKLLENLSKDLTLRHGRGFSRSNLNYMRLFYLLFPICETLSHKLSWSHYCELVKIDDELERSFYYQQNLLENWGVRELRRQKDSALFLRLASAKDKNKVLALAKKGQIIETPGDLIKDVYVFEFLKIPEPYIISEKELETRLIDNLQNFLLELGKGFTFVGRQYRIILDNSVYRVDLVFYHRILRCFVLIDLKINEVKHGDIGQMNMYMGYFDKEENTEGDNPPIGIILSKEKDELLVEYATYGMNSQLFISKYQLYLPNKEELRQLLNNQ

SEQ ID NO: 55229 - DNA, 1116 bp, Unknown
  Obtained from environmental sample
  misc_feature (1)..(1116): n is a, c, g, or t
ttgtattcaggagtgaatttttacaaaaataatatttatattcttttatgtatatttataatgtacaataagaaaaggaattggaaaaatagtatgttgaaacgaataattttaaaaccgggcgaggaggagcgcattcttcttaggtctccctgggtatatggtaatgaaattgacagcgtactggaaggcaaagaaaaggcgcagcttattcccggcgaatgcgccgatgtcgaaagcagccgcaaaaaatatttaggcagggctatcgtcaacccccaatcaaaaattatcgcgcgaatttacagcccttccaaagaaggaatcgacaagggcttttttaagcgccgcatccgtgaagcggcgctcagacgcgcttcattccgcgatctttcccgcgaatcggcgcggctggtttttgccgaagctgattttctgcccggccttatcatcgaccgttttgtcggctggccgttagctgaaattgaagcctccatcgccgagcgccccctttcctttgcgtccgcccagtcggcgcttggccctccccgctcatggcttaccgtgcagctgcttgcgtggggaatggactgccgctgcgaaatgatagtcgaagcgctggaagaggtaatggccgcgatctgcggttcccccgatggcatttttgaaaaatccggcgcaagtgtccgcgcattggaaggccttcccctgcgggaaggtttgattacaggaacattcccctcaggcggcatcgtgattttcgagaatgacctgccctttatcgtggatttaccggaaggccagaagaccggattttttctggatcagcgggacaatcgtctgctggcgggcaaatacgccgccatactcagcaaagaaaccgccggtgaaactgaaccgcgttttcttgatgcctgttcctacaccggcgcttttgccattcacgcgctgcgcgcggcggaaaatgcggcagttaccatactggacacttctgcggcggcgttggaaggcgcgcgcaaaaatgccgctcttaacggcgttaccggccgcgtcaccgctattgaagctgatatttttgattcactgcgcgatctgaacggcgcaaagaacatttga

SEQ ID NO: 55230 - protein, 371 aa, Unknown
  Obtained from environmental sample
  misc_feature (1)..(371): Xaa is any amino acid
MYSGVNFYKNNIYILLCIFIMYNKKRNWKNSMLKRIILKPGEEERILLRSPWVYGNEIDSVLEGKEKAQLIPGECADVESSRKKYLGRAIVNPQSKIIARIYSPSKEGIDKGFFKRRIREAALRRASFRDLSRESARLVFAEADFLPGLIIDRFVGWPLAEIEASIAERPLSFASAQSALGPPRSWLTVQLLAWGMDCRCEMIVEALEEVMAAICGSPDGIFEKSGASVRALEGLPLREGLITGTFPSGGIVIFENDLPFIVDLPEGQKTGFFLDQRDNRLLAGKYAAILSKETAGETEPRFLDACSYTGAFAIHALRAAENAAVTILDTSAAALEGARKNAALNGVTGRVTAIEADIFDSLRDLNGAKNI

SEQ ID NO: 55231 - DNA, 1368 bp, Unknown
  Obtained from environmental sample
  misc_feature (1)..(1368): n is a, c, g, or t
atgcgagttatccagttccgacccccgccacagtatttcaggagcgcggagtttaaccttggcgcaggtgccgatatttcaaaatggccggaacatatcggccttgccgccgcgtttgatcctgaattggttgaggacttcggtaaaatcgcggcaaaggaataccgtgccatgggtatcgccaccgccttgtccccccaggttgaccttgccacagatccgcgctggaaccgtttcaacggtacctttggcccggggagcaagctggcagtggatttgggcagggcgtactgcgacggtttccagaattccgaaggaaagcaggagatccacgggggctggggttatgacagcgtgaacgccatggtaaaacactggcccggaggcggcacaggcgaaggggggcgggacgcgcatttcgggtacggcaaatactccgtattccccgggaataaccttgccgaacacatgaaaccctttaccgaaggggccttcaaactgaagagtaaaaccggccaagcctccgcagtcatgccctattacaccatttcctataatgtggataagaaaaacaacgagaacgtgggcaattcgtacagcaaatatctcatcagcgacctgctccgcacccaatacggctacgacggcgtggtctgcacggattggaatattacccatgacgcggttgattttgagagtttcgtgtccggcaaatgctggggcgtagaagaaatgcccctggttgaccggcactacaagatcctcatggcaggggtcgatcagttcggcggcaacagcgacgcaaaacccatcatagccgcttacaaaaaaggcgtggccaagatcggtgaagattctatgcgccagcgtatggaacaatcggccgcgagaattctcaaaaacatcttccgtgtcgggctctttgaaaacccatatgttgatgttgaacagagcgtaaaaatagtcggctgcgaagattttcttaaaaaaggttacaaagcccagcagcgtagtgttgtaatggtgaaaaacaagaatagcgtcctacccattaagaacagggcgaaagtatatatccccatgcgccacaccaacgcagggctcaactggtttggcctcgcgtttgaaccaaaagatgaaatacctactgaccttgaggcagtgaaaaagtatttcgatgtggtggatacaccggaacaggcggattgcgcgttcgcgttcataatttcaccttccaacaaaggctactcaaagaaagaaggctttttgccaatcagtcttcaatataggccttataaggcagaagaagcacgcgaaacaagtattgcgccttccgatgtaaccgttcatacaagggaaaggctgtaa

SEQ ID NO: 55232 - protein, 455 aa, Unknown
  Obtained from environmental sample
  DOMAIN (6)...(234): Glycosyl hydrolase family 3 N terminal domain
  misc_feature (1)..(455): Xaa is any amino acid
MRVIQFRPPPQYFRSAEFNLGAGADISKWPEHIGLAAAFDPELVEDFGKIAAKEYRAMGIATALSPQVDLATDPRWNRFNGTFGPGSKLAVDLGRAYCDGFQNSEGKQEIHGGWGYDSVNAMVKHWPGGGTGEGGRDAHFGYGKYSVFPGNNLAEHMKPFTEGAFKLKSKTGQASAVMPYYTISYNVDKKNNENVGNSYSKYLISDLLRTQYGYDGVVCTDWNITHDAVDFESFVSGKCWGVEEMPLVDRHYKILMAGVDQFGGNSDAKPIIAAYKKGVAKIGEDSMRQRMEQSAARILKNIFRVGLFENPYVDVEQSVKIVGCEDFLKKGYKAQQRSVVMVKNKNSVLPIKNRAKVYIPMRHTNAGLNWFGLAFEPKDEIPTDLEAVKKYFDVVDTPEQADCAFAFIISPSNKGYSKKEGFLPISLQYRPYKAEEARETSIAPSDVTVHTRERL

SEQ ID NO: 55233 - DNA, 483 bp, Unknown
  Obtained from environmental sample
  misc_feature (1)..(483): n is a, c, g, or t
ttgaactcgacgcaaataaaatgtatacttaaccaagggagggaaatcactgaaatgggagaaatactgcgccggggaattgacgcctaccggcaaaccatgaacctgtccggcaaagcgccggaagatgaaaagaaagccgcgcctcctgaaaaaactgctgaaaaacttccggtaaacaacaacgcggacggtcttataaaggtatccccggcgccctcaaaaccagagtccaaaacacggagggttgccaaatttctaattctgattggcagcgagcaggcgtcgaaaatccttggcgagctggacagcaagcaggtcgaggaaatatcaaaagaaatcgcttccattaaaggtgttgacagggaagaggccgagtcggtaattgccgaattcaaatctctgctaagcggttcctataaataccttgggccgtccttcggcggagttgagacggcaaggcgtatgctgcacgcggcttag

SEQ ID NO: 55234 - protein, 160 aa, Unknown
  Obtained from environmental sample
  misc_feature (1)..(160): Xaa is any amino acid
MNSTQIKCILNQGREITEMGEILRRGIDAYRQTMNLSGKAPEDEKKAAPPEKTAEKLPVNNNADGLIKVSPAPSKPESKTRRVAKFLILIGSEQASKILGELDSKQVEEISKEIASIKGVDREEAESVIAEFKSLLSGSYKYLGPSFGGVETARRMLHAA

SEQ ID NO: 55235 - DNA, 1494 bp, Unknown
  Obtained from environmental sample
  misc_feature (1)..(1494): n is a, c, g, or t
atgggcggagacataacagtggaaagcgaatacggcaagggcagtacctttacggcgactatcccccagactattgaatcggaagcgcccattgccatggttgaagaaccggaaaagaaaaatgtgttggtctatgaaggccggactatttacgctcaagcggtgtgctggtccctgaataacatgaagattcctcataccatggtgacgaattttgacgatttcaaagaagccttatatcaaaaagaatggttttatatattttccggctacggcctccatgataagatcaagcctctgttagaacaggttaatacggccttccgcggggggaaaatacctccccttgccctgatggtagaatggggaaccgaagcctatttacacggcgtgcggtttgtgtccataccggtacagtctctgtcaattgccaatattctcaatggcaaggcggacagtaagggctacaatgaaagctccggaataatccggtacgcgttcccgtccgcgcggctgcttgtggtagacgacatcgccaccaatcttaaagtagccgaaggactccttgcgccttaccggacaacggtagatacctgcctcagcggattgcaggccatcgaaatggtacagcagaataattacgatattgtttttatggatcacatgatgccggatatggacggcatggaaacgacggccgtcatccgcctctgggaaaaggaactgcagaaaaaatcagaaataaacagaaagcaaattcccattattgcgctgacagctaatgccgtcgtgggaatgagggaaatgtttatcgaaaacggcttcaatgattttctctccaaacccatagacgtttccaaactggatgaaatgcttgacagatggataccgaaagaaagaagggaccagggaccagataacagtgaacaattaacaattaacaatgagcaattagcaattagcaatgaaggacaagatactcatcccccagtccccggtccccagtccctgatcccgattcccggccttgacgtgcaaaagggcatttacatgaccggcgggactgtggacgtttatacgcaggtgttgtcgctgttttgcatagacgcgcgggacaggctgccgcttctgcagaaggcgccggagataaccgccctgagcgcgttcattacccaggttcacgccctgaaaagcgcgttggcttcaattggcgctgccggaatatcgactatagcggcgggacttgaagccgccggcaaagccgccgacatggcctttatccgcgaacacttgcccgccttcgcgcagcagcttgaggaactgataaaaaatattctggatgtgctggaattagataaacctgagaaacaggatattccccaagactccgagccccactcccccactccctactccctactccctattatttcaagaacttgccgaagccctgaaatcccaaaacgcctccaaaatagcccatattctgtatga

SEQ ID NO: 55236 - protein, 497 aa, Unknown
  Obtained from environmental sample
  DOMAIN (361)...(448): Hpt domain
  misc_feature (1)..(497): Xaa is any amino acid
MGGDITVESEYGKGSTFTATIPQTIESEAPIAMVEEPEKKNVLVYEGRTIYAQAVCWSLNNMKIPHTMVTNFDDFKEALYQKEWFYIFSGYGLHDKIKPLLEQVNTAFRGGKIPPLALMVEWGTEAYLHGVRFVSIPVQSLSIANILNGKADSKGYNESSGIIRYAFPSARLLVVDDIATNLKVAEGLLAPYRTTVDTCLSGLQAIEMVQQNNYDIVFMDHMMPDMDGMETTAVIRLWEKELQKKSEINRKQIPIIALTANAVVGMREMFIENGFNDFLSKPIDVSKLDEMLDRWIPKERRDQGPDNSEQLTINNEQLAISNEGQDTHPPVPGPQSLIPIPGLDVQKGIYMTGGTVDVYTQVLSLFCIDARDRLPLLQKAPEITALSAFITQVHALKSALASIGAAGISTIAAGLEAAGKAADMAFIREHLPAFAQQLEELIKNILDVLELDKPEKQDIPQDSEPHSPTPYSLLPIISRTCRSPEIPKRLQNSPYSV

SEQ ID NO: 55237 - DNA, 843 bp, Unknown
  Obtained from environmental sample
  misc_feature (1)..(843): n is a, c, g, or t
atgcttacttccaacgaaactccggctaaggaatataaagccgccaaagaacttggcgctgtgattaatctggacgattacacccacattgagtttttggaaaaaactgccaccatgtatacatggcgcggcttaccgggattaatttcattccgctacaaccccggccccctcaaggaaggcaacgccataatcggcaagcctgaggaggcaaagtacggctttacgcgagaacagttaattaaaggttattctacctgcaaggaaaagggcgttaagcgctttgccctgcatactatggtagcttccaacgagctttccattccctatcacattgaaaccgccagaatgctctttgaactcgccgttgaaataaaagaaaaagccggagtgcgccttgagtttgtcaatcttggaggaggcgtgggaattccctacaaacccgatcaggaagcggtagattatcgtgttttggcggccggtatacaaaaagcgtatgacgagattatcaaaccggcaggtcttgatccattgaatattcgcactgagtggggcagggtaataaccggtccctacggctggcttgtggcgcgcgcggttcacaaaaaagagatttaccgcaattacattggtttggacgcctgcatggccgacttaatgcgccccgccttatacggcgcgtatcatcacataacaattcccggcaaggaaaacgctccattatctganacttacgatgtggttggcagtctgtgtgaaaacaacgacaaattcgccgttcaaagaaactcccaaaatagacgtagccgccgatggcgtgngagactttgtggtgatccatga

SEQ ID NO: 55238 - protein, 280 aa, Unknown
  Obtained from environmental sample
  DOMAIN (1)...(191): Pyridoxal-dependent decarboxylase, pyridoxal binding domain
  misc_feature (1)..(280): Xaa is any amino acid
MLTSNETPAKEYKAAKELGAVINLDDYTHIEFLEKTATMYTWRGLPGLISFRYNPGPLKEGNAIIGKPEEAKYGFTREQLIKGYSTCKEKGVKRFALHTMVASNELSIPYHIETARMLFELAVEIKEKAGVRLEFVNLGGGVGIPYKPDQEAVDYRVLAAGIQKAYDEIIKPAGLDPLNIRTEWGRVITGPYGWLVARAVHKKEIYRNYIGLDACMADLMRPALYGAYHHITIPGKENAPLSXTYDVVGSLCENNDKFAVQRNSQNRRSRRWRXRLCGDP

SEQ ID NO: 55239 - DNA, 1188 bp, Unknown
  Obtained from environmental sample
  misc_feature (1)..(1188): n is a, c, g, or t
atgatacagcgtaacccttgcattgcgaaccttaaagccggatacctctttcccgaagtcgccaagaggcgccgggaatacgcggcggcccatcccgaagccaaaatcatcagccttggtgtggggaacacgaccgagccggtcctgccccatattaacaagggccttacggagggagccgcgcggcttgggacgcttgaaggatattcaggttatcaggacgaggggcttcttgtcctacgcgagaaaatttccgctgttttttacaatggtaaatttaccgcgaatgaaatttttatttccgacggcgcgaagtgcgacataggcaggctgcagctgctttttggcaggtcaacgcaggtagcggttcaggacccttcttaccccgtgtatgtggacggttccgttctgatcggggccgcgggccgctttgggggtgccggttacgacgggattgtctatcttccctgtacaaaagctaacggttttttccctgatctttcccggcttccgtcaaaaagccttttgtatttttgctcgccgaataatcccaccggcgcggtggcgaacagggagcagcttggcgtccttgtgaaaacctgcctggaaaagggcgcccttgttgtctttgacgcggcctacagtgaatacgtccgcgacccgaaacttcccaaaagcatttacgagattgaaggctccaggcaatgcgccattgaagtgaattcattttccaaatcggcgggttttaccggcgtgcgcctcggctggagcgtggttccgtccgaactcaaatatgaaggcggcgagagcgtcaacgcggactggagccgcgtctgctccacgatattcaacggggcttccaatatagcgcaggcaggagggcttgccgcgttagacgacgagggcttgaaagaaatcaagggccttaccgatttttatctcggcaacgcgcgtctgatacgcgatgccctgcaaagcctgggtattgagtctgttggcggggacaattccccgtacatttgggcttatttcccgaacagggacagttgggaagttttctcgcagatacttgaaaaatgccaggtagtgacaacccccggagcgggattcggcccggcggggaacggctatatccgcttttccgccttcggccaccgtgccgacgtgcaagaggcgtgccggagataa

SEQ ID NO: 55240 - protein, 395 aa, Unknown
  Obtained from environmental sample
  DOMAIN (34)...(395): Aminotransferase class I and II
  misc_feature (1)..(395): Xaa is any amino acid
MIQRNPCIANLKAGYLFPEVAKRRREYAAAHPEAKIISLGVGNTTEPVLPHINKGLTEGAARLGTLEGYSGYQDEGLLVLREKISAVFYNGKFTANEIFISDGAKCDIGRLQLLFGRSTQVAVQDPSYPVYVDGSVLIGAAGRFGGAGYDGIVYLPCTKANGFFPDLSRLPSKSLLYFCSPNNPTGAVANREQLGVLVKTCLEKGALVVFDAAYSEYVRDPKLPKSIYEIEGSRQCAIEVNSFSKSAGFTGVRLGWSVVPSELKYEGGESVNADWSRVCSTIFNGASNIAQAGGLAALDDEGLKEIKGLTDFYLGNARLIRDALQSLGIESVGGDNSPYIWAYFPNRDSWEVFSQILEKCQVVTTPGAGFGPAGNGYIRFSAFGHRADVQEACRR

SEQ ID NO: 55241 - DNA, 765 bp, Unknown
  Obtained from environmental sample
  misc_feature (1)..(765): n is a, c, g, or t
ttgccgccgggggcggaaagccattcttttgaaccttcgccaaaggatattatcacggttcagaacagcgccgtatttatctatgtcggcggcgaaagcgacacatggattgacaggattcttgaaaccatggacacgtcaaaaatgataattatcaaaatgctggacacagttgacgccgttgaggaagaaattgttgagggcatggaggcggaagatgaagaaggagaagaaatagcctacgatgagcatatctggacatctcctcaaaacgcgattctgattgtaaaggcgataaatacggcgctttgcgaagccgatccagccaacgccgatttttacaggaaaaataccgccgcctacatagaagacctggcgcagcttgacgcggcgtttaagggagtaatcgcgggggcaaaacgaaaaacaatcattttcgccgaccgtttccccttccgctactttgccgacgcctacgggttaaaatactttgccgcatttcccggctgttcaacagaaaccgaaccgagcgtcgccaccgtcgcctttttaatagacaaggtcaaggcggaaaaaatccctgtcgtgtttcacattgagctttccaatgagcgtatggctaatacaatttgcggcgaaacaggggcaaaaaaactgctgtttcatgcctgtcataatatctccaaaaaggattttgacgccgggcttggctatcttgaccttatgcgcgtaaatgtcgaaaatctgaaagaggcgttacgataa

SEQ ID NO: 55242 - protein, 254 aa, Unknown
  Obtained from environmental sample
  DOMAIN (1)...(254): Periplasmic solute binding protein family
  misc_feature (1)..(254): Xaa is any amino acid
MPPGAESHSFEPSPKDIITVQNSAVFIYVGGESDTWIDRILETMDTSKMIIIKMLDTVDAVEEEIVEGMEAEDEEGEEIAYDEHIWTSPQNAILIVKAINTALCEADPANADFYRKNTAAYIEDLAQLDAAFKGVIAGAKRKTIIFADRFPFRYFADAYGLKYFAAFPGCSTETEPSVATVAFLIDKVKAEKIPVVFHIELSNERMANTICGETGAKKLLFHACHNISKKDFDAGLGYLDLMRVNVENLKEALR

SEQ ID NO: 55243 - DNA, 696 bp, Unknown
  Obtained from environmental sample
  misc_feature (1)..(696): n is a, c, g, or t
atgctgataaactgtcaaaacctttctttcgggtatgacggacatattgttgtttccggtctgaatttttcagtccaggccggggattttcttctggttgccggtgaaaacggctcaggaaaatctacgcttgtaaaaggtttactgcgtatactgcaaccaatggaagggacaatcaattttagttccgattacaagcagtctgaaacaggctacctttcccaacagaccgcggcaaaacaggattttccggccggagtatttgagattgtattgtcgggaaatttgggaaagaaagggttttggccgttatacaccggcgcggaaaaacgaaaagcggaagaaaaaatgcgtctgcttgacatcgaggatttaaaagaaaactgttttcgggagctttcgggcggacagcaaaggcgcgttctgcttgcgcgttccctttgcgccgcggaaaaactgcttgtgttagacgaacctttcgccggacttgatccgttgataagcatgcagttgtaccgtctgcttgaaagaatcaaccgtgaaacaggtataacgataataatggtttcccatgaaattgaagccgccgactgcgcgaaaaatgttttgcacttgcagaaacagcaggttttttcaggcagtatggaagaatacagaaaaagcgaaacaggcagaaaatttttaggagagctttga

SEQ ID NO: 55244 - protein, 231 aa, Unknown
  Obtained from environmental sample
  DOMAIN (28)...(208): ABC transporter
  misc_feature (1)..(231): Xaa is any amino acid
MLINCQNLSFGYDGHIVVSGLNFSVQAGDFLLVAGENGSGKSTLVKGLLRILQPMEGTINFSSDYKQSETGYLSQQTAAKQDFPAGVFEIVLSGNLGKKGFWPLYTGAEKRKAEEKMRLLDIEDLKENCFRELSGGQQRRVLLARSLCAAEKLLVLDEPFAGLDPLISMQLYRLLERINRETGITIIMVSHEIEAADCAKNVLHLQKQQVFSGSMEEYRKSETGRKFLGEL

SEQ ID NO: 55245 - DNA, 852 bp, Unknown
  Obtained from environmental sample
  misc_feature (1)..(852): n is a, c, g, or t
ttgatgattgctattttgattaagatgttcagttactcgtttctgatcaaggcatttaccgtcggcgcccttgtttcaatctgcgcggccctcctgggcgtaagccttgtgttaaaacgttactccatgataggagacggcctttcccatgtgggctttggtgcccttgcccttgcaaccgccttccacacagcccccctttacttttccatccctatagtcgtagcggcggctttcctgcttctgcgcttaagcgaaaacagcaagataaagggggacgctgctatcgcgctgatttccaccagctccttggcaatcggggttgtaatcatttcccaaacaaccgggatgaatacagatgtctgcaactatatgtttggaagtatccttgcgatgagtaagagcgatgtataccttagcgtcgtcctttcaataacggttcttgtcctttttgtctttttttaccacaaaatatttgcgataacttttgatgaaagctttgcgaaagcgggcggcgtaaaaaccggaacctacaatatgctcatcgcccttttaaccgcccttaccattgtgctgggtatgcgaatgatgggggccatgcttatttcgagcctcattatttttccggcactttcggccatgagggtttttaaacgctttaaaactgtaactgtttgttccgccgtcattgcggtaacgtgtttttttatcggcattgtaatttcttatttgtatgccactccggccggggcaagcgtagttttgatgaacatcattacctttttgattttttggaccataagctgtatactacaaaggaaacccagggtagcggaaatcgtgcccaggtag

SEQ ID NO: 55246 - protein, 283 aa, Unknown
  Obtained from environmental sample
  DOMAIN (11)...(268): ABC 3 transport family
  misc_feature (1)..(283): Xaa is any amino acid
MMIAILIKMFSYSFLIKAFTVGALVSICAALLGVSLVLKRYSMIGDGLSHVGFGALALATAFHTAPLYFSIPIVVAAAFLLLRLSENSKIKGDAAIALISTSSLAIGVVIISQTTGMNTDVCNYMFGSILAMSKSDVYLSVVLSITVLVLFVFFYHKIFAITFDESFAKAGGVKTGTYNMLIALLTALTIVLGMRMMGAMLISSLIIFPALSAMRVFKRFKTVTVCSAVIAVTCFFIGIVISYLYATPAGASVVLMNIITFLIFWTISCILQRKPRVAEIVPR

SEQ ID NO: 55247 - DNA, 447 bp, Unknown
  Obtained from environmental sample
  misc_feature (1)..(447): n is a, c, g, or t
gtggcggatattgttaatggtctttccgatgaacttatcaaaattattgatgatctcaaagacgacaaaaattcttttgaaaaactgggcattacatacgaagaaaagattttttacgatattttggttaaagtccgtgacgatcacggttttgaatattctgaagataaatgtattgttctagccggagaaataaaaaaactggtcgatgataaatcaaaatatatagattgggctgcccgtgaagatataaagaacgagctaaacatggatttgaccaaacttctgtataaaaacgggtatccgccagaatgggacgatgaagtttttgagcaggttttagaacaatcagaaaattataaaaaatattccgttgtggtggaatatgaatacccaagcgcacaaaatagtttcggttataaaatggcggctgaaaacccccaataa

SEQ ID NO: 55248 - protein, 148 aa, Unknown
  Obtained from environmental sample
  misc_feature (1)..(148): Xaa is any amino acid
MADIVNGLSDELIKIIDDLKDDKNSFEKLGITYEEKIFYDILVKVRDDHGFEYSEDKCIVLAGEIKKLVDDKSKYIDWAAREDIKNELNMDLTKLLYKNGYPPEWDDEVFEQVLEQSENYKKYSVVVEYEYPSAQNSFGYKMAAENPQ

SEQ ID NO: 55249 - DNA, 378 bp, Unknown
  Obtained from environmental sample
  misc_feature (1)..(378): n is a, c, g, or t
ttgagcattcatgaatcggcggaaatgtacctggagacaattcatgttttaagcctcaaagggaaccgggtccgttccattgatattgtcaacgagcttgaatactcaaagcccagcgtaagcgtcgccatgaaaaacctgaaagcgcagggctatatcgcaatagacgacgaaggttttatcaccctgacaagcaaggggcgcaaaatcgccgagacgatgtatgaaaggcatgtcgctatttccgactggctgatttttttgggagtcgataaaaaaactgcggtaaacgacgcctgtaaaatggaacacgccatgagcgaaaaaagcttcaccgctattaaaaaacacattgagaactggaagaaagataactga

SEQ ID NO: 55250 - protein, 125 aa, Unknown
  Obtained from environmental sample
  DOMAIN (64)...(125): Iron dependent repressor, metal binding and dimerisation domain
  misc_feature (1)..(125): Xaa is any amino acid
MSIHESAEMYLETIHVLSLKGNRVRSIDIVNELEYSKPSVSVAMKNLKAQGYIAIDDEGFITLTSKGRKIAETMYERHVAISDWLIFLGVDKKTAVNDACKMEHAMSEKSFTAIKKHIENWKKDN

SEQ ID NO: 55251 - DNA, 675 bp, Unknown
  Obtained from environmental sample
  misc_feature (1)..(675): n is a, c, g, or t
atgaataccgcgccattgaccgtcgctattcccatagtagtagccgccgcttttcttcttttgcgccttagcgaaaacagtaaaatcaagggggatgccgcaatcgcgcttatttccacaggtgctcttgccgtcggcgtaattgtaatatcgcagacaacaggcatgaataccgacgtatgcaattaccttttcggcagtatccttgcaatgtcaaaaacggacgtaattttaagtattattctttcatctatcgtactggttttatttatcctgttttacaacaagttattcgtcataacctttgacgaaacattcgccaaagccgccggaatcaagacagggttttacaatatgcttatagccattttaacagctcttacaattgtgcttggaatgcgcataatgggagccatgcttatttccagtctgataatttttccggcgttaagttcaatgcgtattttcaaaaaattcaagagcgttaccgtttgctcgtccgtcatttcgatattttgtttttttacaggcatagtcatttcttatatttacgcaacgcctacaggcgcaagcgttgtaatgatcaatatagtggtttttttgatattttggttagctgaaaccatgcgtaattcaaccgtattaaacaaatacaggaggagaaattatgcgtaa

SEQ ID NO: 55252 - protein, 224 aa, Unknown
  Obtained from environmental sample
  SIGNAL (1)...(15)
  DOMAIN (1)...(206): ABC 3 transport family
  misc_feature (1)..(224): Xaa is any amino acid
MNTAPLTVAIPIVVAAAFLLLRLSENSKIKGDAAIALISTGALAVGVIVISQTTGMNTDVCNYLFGSILAMSKTDVILSIILSSIVLVLFILFYNKLFVITFDETFAKAAGIKTGFYNMLIAILTALTIVLGMRIMGAMLISSLIIFPALSSMRIFKKFKSVTVCSSVISIFCFFTGIVISYIYATPTGASVVMINIVVFLIFWLAETMRNSTVLNKYRRRNYA

SEQ ID NO: 55253 - DNA, 492 bp, Unknown
  Obtained from environmental sample
  misc_feature (1)..(492): n is a, c, g, or t
ttggccgagctgcgatctaacgctgaccgcgaggcgattgtcgccgccctttgtgacggtactgtcgacgccattgccacagaccacgcgccgcacagcgacagtgacaaagccgccggaatgccaggttttaccgggctggaaacggcctttgcggttagtttgtcatttttgcctgacattggattgcagcggctttccgcgcttatgagcgctaacccggcgcggatactcggccttggaggcaggggccgcgtcgaaaaagggttaagggcggatcttgttatcgcggatacaggggcaaaatggaaagttgagcctgagaaattcaagtcgcgggggaagtgtagtcccttcgctggaagaatattgcgcgggaaaattttaatgacgcttaacgcgggaaaaattgtttttggaggatgcggcgtctccaaaggagtcggcgcctccaaaggagtcggcgtctccaaaggagtcggaaatgtataa

SEQ ID NO: 55254 - protein, 163 aa, Unknown
  Obtained from environmental sample
  misc_feature (1)..(163): Xaa is any amino acid
MAELRSNADREAIVAALCDGTVDAIATDHAPHSDSDKAAGMPGFTGLETAFAVSLSFLPDIGLQRLSALMSANPARILGLGGRGRVEKGLRADLVIADTGAKWKVEPEKFKSRGKCSPFAGRILRGKILMTLNAGKIVFGGCGVSKGVGASKGVGVSKGVGNV

SEQ ID NO: 55255 - DNA, 972 bp, Unknown
  Obtained from environmental sample
  misc_feature (1)..(972): n is a, c, g, or t
ttgtttttggaggatgcggcgtctccaaaggagtcggcgcctccaaaggagtcggcgtctccaaaggagtcggaaatgtataatatcgacaaactatttgaatcggtcagcgcgaagggccatgtgtgcgtgggccttgatacctcggcggaatatgtcccacccgcggaacggaagtgggccgcatcagatgccgaagcggtactggcttttaacaaggcacttgttgattcaacatttgacgcctgcgcctgttataaggtacagatcgcctattacgaggaaatggggcttgaggggctgggttgttacgcgaaaaccctgcggtacatacgcgaaaaaggcggcctggttatcgccgacattaaacgcggcgatattgccgataccgccctgcgttacgcgaaagcccatttcgcaggggactttgaggccgattttgtcacgctttccccctacatgggcatggactcaattgagccctggctttcttacgctacacatagcggcaaaggcgcctttgtcctgatgaggacgagcaacaagggcatgcgcgattttgagtatcttgaaatatctcctggcaaaaagcgcctgtaccacgcggtgggcgacaaactcgccggccttgcagccgcgcattgtggcaaatgcggctatggggcattcggcgccgttgtcggttgtaccgagcgtgatgaggccgccgaaatccgcaaaaattattccagcctttttttccttattcccggctacggcgcgcaaggcggggcggcggatgatgccgcgctgcttttgcgcgatgggaacggcggagtagtgaacgcctcgcggtcaatactgaaggcctgggagacagaactgaaaaaatcaggcggggatgtgtcggtggtgacaaattcctttgctgcggaagccgcgcgcagggccgctattgaaatgcgcgacgcgataagggccgctaaaccctaa

SEQ ID NO: 55256 - protein, 323 aa, Unknown
  Obtained from environmental sample
  DOMAIN (40)...(291): Orotidine 5'-phosphate decarboxylase / HUMPS family
  misc_feature (1)..(323): Xaa is any amino acid
MFLEDAASPKESAPPKESASPKESEMYNIDKLFESVSAKGHVCVGLDTSAEYVPPAERKWAASDAEAVLAFNKALVDSTFDACACYKVQIAYYEEMGLEGLGCYAKTLRYIREKGGLVIADIKRGDIADTALRYAKAHFAGDFEADFVTLSPYMGMDSIEPWLSYATHSGKGAFVLMRTSNKGMRDFEYLEISPGKKRLYHAVGDKLAGLAAAHCGKCGYGAFGAVVGCTERDEAAEIRKNYSSLFFLIPGYGAQGGAADDAALLLRDGNGGVVNASRSILKAWETELKKSGGDVSVVTNSFAAEAARRAAIEMRDAIRAAKP

SEQ ID NO: 55257 - DNA, 387 bp, Unknown
  Obtained from environmental sample
  misc_feature (1)..(387): n is a, c, g, or t
atgggccgttatctgctggacacacacacggcgatttggtatttcaacggcgacaaagcactttccaaagctgccagagaaataatccttgagctttccaatcagatacatctgagcataacttctgcgtgggaactcgcaataaaagtcaatttggggaaactggaatttaaaggccaagtcacccgtttcgttcatcttgcagaaacctatggttttaccattttccccataaaaaccagccatctttccgtccttgaagaactgcccttgcttcaccgcgacccttttgaccgtctgcttatcgcaaccgccatttcagaacagatgacctttatcagtgccgacaggaatatcgcgcaatacgatgtccccctgatgtggtag

SEQ ID NO: 55258 - protein, 128 aa, Unknown
  Obtained from environmental sample
  DOMAIN (4)...(124): PIN domain
  misc_feature (1)..(128): Xaa is any amino acid
MGRYLLDTHTAIWYFNGDKALSKAAREIILELSNQIHLSITSAWELAIKVNLGKLEFKGQVTRFVHLAETYGFTIFPIKTSHLSVLEELPLLHRDPFDRLLIATAISEQMTFISADRNIAQYDVPLMW

SEQ ID NO: 55259 - DNA, 1023 bp, Unknown
  Obtained from environmental sample
  misc_feature (1)..(1023): n is a, c, g, or t
atgtatttaaacgctaaattgtctattatgaagaaaatatcacttaccggaataaaaccaaccggtgatttacatatcggaaattattttggcgcaataaaacctgctctggaactcgccgatgaatatgacgcccgttattttatcgccgactatcacgctcttaacacaatgaaaaatcctgaagaattaaattccacaatcaggcatgttgccgcaggctggcttgcttcaggtcttgatccggaaaaagttatattttaccgtcaaagctcaatccccgaagtttttgaacttactacaatgctcatggcgtttacctccaaaggactgatgaaccgcgctcatgcgtataaagacgctgttcaaaaaaacaataaaaaaggcgatgatacagacgccggaattaacatgggtttatttacctaccctgtattaatggcggcggatattattatttttgattctgacgtagtgccggtaggcgaggatcaggtacagcacattgagatggcacaggatatagcacagtcgataaacgcgaattacggtaagcaggtgttaaaaataccacaggctgccgttcaggagaatgtcgcggtagtgcccggacttgatgggcgcaagatgagcaaaagctacggtaatgttatccctctttttgcgcctgaaaaaacacttaagaaaacaattatgcgtatagttaccaattcccaatctgtagaagagccgaaagaccctcaagtctgccaaatttttcaactttacaaactttttacaaatacggaagaacaaaacgctcttgcaggacgataccgcgcaggaggaatgggctggggcgaagcaaaggaagagctgttccgtgtggtaaaccgctgccttgcaccgatgagggaacgttatgacgcaataacggcggacattccgtcgctggataaaattctggcgcagggagcggaaaaagcgcgtcccatcgccgccgctaccgttaagcgtttaagaaaagcggcaggagtagattga

SEQ ID NO: 55260 - protein, 340 aa, Unknown
  Obtained from environmental sample
  DOMAIN (11)...(295): tRNA synthetases class I (W and Y)
  misc_feature (1)..(340): Xaa is any amino acid
MYLNAKLSIMKKISLTGIKPTGDLHIGNYFGAIKPALELADEYDARYFIADYHALNTMKNPEELNSTIRHVAAGWLASGLDPEKVIFYRQSSIPEVFELTTMLMAFTSKGLMNRAHAYKDAVQKNNKKGDDTDAGINMGLFTYPVLMAADIIIFDSDVVPVGEDQVQHIEMAQDIAQSINANYGKQVLKIPQAAVQENVAVVPGLDGRKMSKSYGNVIPLFAPEKTLKKTIMRIVTNSQSVEEPKDPQVCQIFQLYKLFTNTEEQNALAGRYRAGGMGWGEAKEELFRVVNRCLAPMRERYDAITADIPSLDKILAQGAEKARPIAAATVKRLRKAAGVD

SEQ ID NO: 55261 - DNA, 903 bp, Unknown
  Obtained from environmental sample
  misc_feature (1)..(903): n is a, c, g, or t
gtggactggaacattgtaggcgttcctggcctgatcttcgcaagccttatcggtgtgccaatcgcggcgtgtctgggctggcttgcgggacagatcctgaaccgtgcgcgtggccgggaaatggttaccggctatgtcctgggttttttcatggacggcttctatcagttcattgtgctttacctgatgggccggcctacaatttgggctgccgaaactgcgggaaaatgggccgccctcattcccattcattctgccagaatcgtattgagccggggttacggtataagaaacactgttaatttggaatcagtacgaatgtctcttgaccgttttattcctttgagaattgctggagtcaatattcctgttgccaattacctggtaataggcgttttgtgcctgtttataatctggttcagaaaaacaaaacttggacaggacatgagggccgtggggcagaatcagacggtagcccacgcctcgggtattcctgttgatcgtaccagaatcattgcgatagtaatttccacagtgctggcaagcctgggtcagataatatttttacagaacatgggaaacatggcgacttacaacgcccataggcagacaggtttctttgcggctgcggcgatcctggttggcggcgcttccatttctaaagccagcatcaccaacgtatttatcggaacgatactgttgcacctgatgtacatagttgttccacgggcaggcacaaacctcttcggttccgcgcagatcggcgagtatttccgtgacgcctttagctacgcgattatcgcccttgcgcttgtgattcacgcctggcgtaaacgcgcaaatgccgaagccgccagaagcattcttcgcggtgcagcgacaaccaaagaggataagttatga

SEQ ID NO: 55262 - protein, 300 aa, Unknown
  Obtained from environmental sample
  DOMAIN (7)...(271): Branched-chain amino acid transport system / permease component
  misc_feature (1)..(300): Xaa is any amino acid
MDWNIVGVPGLIFASLIGVPIAACLGWLAGQILNRARGREMVTGYVLGFFMDGFYQFIVLYLMGRPTIWAAETAGKWAALIPIHSARIVLSRGYGIRNTVNLESVRMSLDRFIPLRIAGVNIPVANYLVIGVLCLFIIWFRKTKLGQDMRAVGQNQTVAHASGIPVDRTRIIAIVISTVLASLGQIIFLQNMGNMATYNAHRQTGFFAAAAILVGGASISKASITNVFIGTILLHLMYIVVPRAGTNLFGSAQIGEYFRDAFSYAIIALALVIHAWRKRANAEAARSILRGAATTKEDKL

SEQ ID NO: 55263 - DNA, 573 bp, Unknown
  Obtained from environmental sample
  misc_feature (1)..(573): n is a, c, g, or t
atgaagcaaattggcggcgtaaataaaagcttatttaaacctagcgtccttgccgataacgcggtggtgctgatcttcgttgtcattactctgatagcgattccgatttcaaaaattcctattcccgaaataatacaggagatactttcccgcataggacgaaactgctttttggttttcagccttctgctcccaattatggcaggaatggggatcaacttcggcatggtgctgggggccatggcggggcaaatcgggctgatctttcgcggtggactggaacattgtaggcgttcctggcctgatcttcgcaagccttatcggtgtgccaatcgcggcgtgtctgggctggcttgcgggacagatcctgaaccgtgcgcgtggccgggaaatggttaccggctatgtcctgggttttttcatggacggcttctatcagttcattgtgctttacctgatgggccggcctacaatttgggctgccgaaactgcgggaaaatgggccgccctcattcccattcattctgccagaatcgtattgagccggggttacggtataagaaacactgttaa

SEQ ID NO: 55264 - protein, 190 aa, Unknown
  Obtained from environmental sample
  misc_feature (1)..(190): Xaa is any amino acid
MKQIGGVNKSLFKPSVLADNAVVLIFVVITLIAIPISKIPIPEIIQEILSRIGRNCFLVFSLLLPIMAGMGINFGMVLGAMAGQIGLIFRGGLEHCRRSWPDLRKPYRCANRGVSGLACGTDPEPCAWPGNGYRLCPGFFHGRLLSVHCALPDGPAYNLGCRNCGKMGRPHSHSFCQNRIEPGLRYKKHC

SEQ ID NO: 55265 - DNA, 1089 bp, Unknown
  Obtained from environmental sample
  misc_feature (1)..(1089): n is a, c, g, or t
atggcatttagcaagattcaaagcgacggctttcaggacaaaataaaggcgtttataaaaacgtctatcgaagattttggctggccccgcctgatcattttcttttttgttgtcgcgctttttatcgtcgccccctttgtgggcattaatattgacagctctttcaaggatgtgctggtacgtttcggtcaaaacgggatcatggtgctggcccttgttcccatgatgcaatccggttccgggctgaacttcggcctgcccgtcggcattgtcgcgggcctcctgggttcgaccctggcaatgcagttcgagtttacaggcggctttggcttcctcatggcaattctgctcagcctgccttttgcctttgtgtttggctggctctacggcatactccttaacaaagtcaagggcgaggaaatgactatcgccatgtatgtcggttttttcattgtcacctttatggcgatcatgtggctcttgctgcctttctcaaccgacatggtttggggctacacgggccgaggcttgcgtactaccataaccctggacggctactgggcgcggattctcaataattttcttgtggtaaaagtagccggaagtttttttgaattccccaccggcgcgattttgttttttatattgatggccattatcatgtggctctttatgcacagccgtaccggaaccgcccttaccgcagtgggttccaatccggactttgcacgggccagcggcgtttcggtggatcgatgccggatcatcggggtaatcatttcttcgatttatggcgcgataggcatactcacttatcagcagagttttggatttattcaactgtataacgcgccgctctacatggcctttcccgctgtggcggccgtgctcttgggcggcgcatcggtgaacaaagcttctattctaaatgtggtggtcggaaccttcctctttcaaagcatactcaccatgaccccttcggttatcaacaatatacttcagactgatatgtccgaggtaatcaggattttaatttcaaacgggatgatcatttacgctctgacccgaaagacgaaggttacaaaatga

SEQ ID NO: 55266 - protein, 362 aa, Unknown
  Obtained from environmental sample
  DOMAIN (54)...(353): Branched-chain amino acid transport system / permease component
  misc_feature (1)..(362): Xaa is any amino acid
MAFSKIQSDGFQDKIKAFIKTSIEDFGWPRLIIFFFVVALFIVAPFVGINIDSSFKDVLVRFGQNGIMVLALVPMMQSGSGLNFGLPVGIVAGLLGSTLAMQFEFTGGFGFLMAILLSLPFAFVFGWLYGILLNKVKGEEMTIAMYVGFFIVTFMAIMWLLLPFSTDMVWGYTGRGLRTTITLDGYWARILNNFLVVKVAGSFFEFPTGAILFFILMAIIMWLFMHSRTGTALTAVGSNPDFARASGVSVDRCRIIGVIISSIYGAIGILTYQQSFGFIQLYNAPLYMAFPAVAAVLLGGASVNKASILNVVVGTFLFQSILTMTPSVINNILQTDMSEVIRILISNGMIIYALTRKTKVTK

SEQ ID NO: 55267 - DNA, 525 bp, Unknown
  Obtained from environmental sample
  misc_feature (1)..(525): n is a, c, g, or t
atgggcggagaaatctggcttgattcaaagccgggcgttggatcgattttctcctttaccgtcctgcttaaacgcggcaaaacggaagagaacgccgaaacccatccccataaggcggattcggggcagccggtatcattcaagggccgccgcctccttttggccgaggatgttgaaatcaaccgggaaattgtacaggccctgctggaaccaaccgggatcgagatcgactgcgcggtaaacggcaaagaggccgtactgatgttcagccgcaaacccaaaggctacgatttaatttttatggacatgcaaatgccggagatggacgggctggaagccacccaccagatacggtccattgagggacacaaaaatatcgtaccgataattgccatgacagccaatgtttttaaggaagatatagagaaatgcctcgcggtcggcatgaacgatcatatcggaaagccgcttgatttcaacgaggtaatggaaaagttaaaattttatttacaaccttctccctaa

SEQ ID NO: 55268 - protein, 174 aa, Unknown
  Obtained from environmental sample
  DOMAIN (50)...(167): Response regulator receiver domain
  misc_feature (1)..(174): Xaa is any amino acid
MGGEIWLDSKPGVGSIFSFTVLLKRGKTEENAETHPHKADSGQPVSFKGRRLLLAEDVEINREIVQALLEPTGIEIDCAVNGKEAVLMFSRKPKGYDLIFMDMQMPEMDGLEATHQIRSIEGHKNIVPIIAMTANVFKEDIEKCLAVGMNDHIGKPLDFNEVMEKLKFYLQPSP

SEQ ID NO: 55269 - DNA, 1491 bp, Unknown
  Obtained from environmental sample
  misc_feature (1)..(1491): n is a, c, g, or t
atgaaacagttcatggacgataattttctgctttccaatagaacggccgaaaaactctaccacgaggccgcggcaggtgagccgattttcgactaccattgccatcttatatcaaaagaaattgccgaaaaccgccgtttcccggatctggccgccgtatggctcaatggcgatcactataaatggaggcagatgagggccaacgggatcaacgagcggtttatcaccggcgacgcggaaccttacgataaattcctcgcatgggcggaaacggttccgcggcttatcggaaaccccctgtaccactggacgcatcttgagttacggcggtatttcgacattaacgagattctgaatccgaaaagcgccccggaaatatggaaagccgcaaatgaaaaacttgcaaatgatccgtcgctttcggtatatggcatcttcaaaaaattcaatgtttttgccgtgggaacaaccgatgatccggctgacagtctggaatggcatgagaaagcgaaaggcgcaccctgtgggtgcgacgcgacagaaactctggtgctgccctcattcaggcccgaccgcgccgtcaacatagaaaaacccggttttgccgaatataccgcaaaactgggaacggctgcagggaggaaaataaactgccttgacgacttgttaggcgcaatccgtgaccgtattgatctctttcacaaaacaggctgccgcatttccgatcacggcctggaattcatgccgtttgccaccgcgtcatgcgacccctgtcttgcccgtcccgccgaaataaatttttcccaatgggaaaaagaagtaaaggacattttcgcgcaggcccttgccgggaaaaagccggacgcaagggaagcggaatcatggaaaaccttttgccttaatttctttggcgaagaatacgcaaaccggggatgggcaatgcagatacacgtatcggcgattcgcggcgccaacagcgccatgcttgcctcggtgggccccgacacgggtttcgatgccgtggcggattaccccgtcgcggaaaagctcgcccgttttttggacatactggcctcgcggggcaagctgcccaagactatcctctacagccttaacttcaaggacctgtacccaatggcgacgatcatgggcagcttccagggcgagacggacccggcaaaaaccgccttgcccggcaagattcagcttggctccggctggtggttcctggatcacatagacggcatggaagcgcagatgaagctgctggggaatacgggcttgttgtcccgttttgtgggaatgttaaccgattcgcgcagttttctctcctatccgcggcatgagtatttccgccgcatactctgcaatatcctgggaacctgggccgaaaacggcgaagtcccaaatgactttgaactgctgggaggcatggtaagggacatttcattcagaaacgcgaaacgttattttgacgttgaatcgcgttag

SEQ ID NO: 55270 - protein, 496 aa, Unknown
  Obtained from environmental sample
  DOMAIN (1)...(496): Glucuronate isomerase
  misc_feature (1)..(496): Xaa is any amino acid
MKQFMDDNFLLSNRTAEKLYHEAAAGEPIFDYHCHLISKEIAENRRFPDLAAVWLNGDHYKWRQMRANGINERFITGDAEPYDKFLAWAETVPRLIGNPLYHWTHLELRRYFDINEILNPKSAPEIWKAANEKLANDPSLSVYGIFKKFNVFAVGTTDDPADSLEWHEKAKGAPCGCDATETLVLPSFRPDRAVNIEKPGFAEYTAKLGTAAGRKINCLDDLLGAIRDRIDLFHKTGCRISDHGLEFMPFATASCDPCLARPAEINFSQWEKEVKDIFAQALAGKKPDAREAESWKTFCLNFFGEEYANRGWAMQIHVSAIRGANSAMLASVGPDTGFDAVADYPVAEKLARFLDILASRGKLPKTILYSLNFKDLYPMATIMGSFQGETDPAKTALPGKIQLGSGWWFLDHIDGMEAQMKLLGNTGLLSRFVGMLTDSRSFLSYPRHEYFRRILCNILGTWAENGEVPNDFELLGGMVRDISFRNAKRYFDVESR

SEQ ID NO: 55271 - DNA, 306 bp, Unknown
  Obtained from environmental sample
  misc_feature (1)..(306): n is a, c, g, or t
atgaccatagacactgaaaaaaatgaccagtcaacggcagtgctgactcttaacggacgacttgatacagcaaacgcccctctgttggaacggaaaatcagacaatggggaaatgaaatcacggagttgattcttgatttttcgggcctggaatatatttccagtatgggactgcgtgttttgctgcaagccaaaaagacattaaaagcggaaaaccgcaatatgaccataaaaaacatgggtgattccatccgggaaatttttgaaatgaccggctttctcaatctgatggaacaggacgaatga

SEQ ID NO: 55272 - protein, 101 aa, Unknown
  Obtained from environmental sample
  DOMAIN (2)...(101): STAS domain
  misc_feature (1)..(101): Xaa is any amino acid
MTIDTEKNDQSTAVLTLNGRLDTANAPLLERKIRQWGNEITELILDFSGLEYISSMGLRVLLQAKKTLKAENRNMTIKNMGDSIREIFEMTGFLNLMEQDE

SEQ ID NO: 55273 - DNA, 528 bp, Unknown
  Obtained from environmental sample
  misc_feature (1)..(528): n is a, c, g, or t
atgaaagaattcatggacgataattttttgctttccaacaggatcgcggaaaaactataccatgaggcggcggctggcgagcctattttcgattaccactgccatcttatgccgaaagaaatagctgagaaccgccgttttccggatctggcttccgtatggcttggcggcgaccattataaatggaggcagatgagagccaacgggataaatgagcggcttatcaccggagacgcagctccttacgataaattcctcgcctgggcggatacggttccgcggcttgtcgggaaccccctgtaccactggacgcatctggaactgcggcgttgtttcggcatcaatgaaccgctaacgaaaaaagcgctcctgcgatctgggaaaaagcgaacgctctgcttcaaaaacccgagttgtccgttaagggcatttttgaaaagttcagggtttacgcggtgggcaccacggacgatcctgtggattcccttgaataccaccgcgccattgccgacggcacggccccaatag

SEQ ID NO: 55274 - protein, 175 aa, Unknown
  Obtained from environmental sample
  DOMAIN (1)...(164): Glucuronate isomerase
  misc_feature (1)..(175): Xaa is any amino acid
MKEFMDDNFLLSNRIAEKLYHEAAAGEPIFDYHCHLMPKEIAENRRFPDLASVWLGGDHYKWRQMRANGINERLITGDAAPYDKFLAWADTVPRLVGNPLYHWTHLELRRCFGINEPLTKKALLRSGKKRTLCFKNPSCPLRAFLKSSGFTRWAPRTILWIPLNTTAPLPTARPQ

SEQ ID NO: 55275 - DNA, 306 bp, Unknown
  Obtained from environmental sample
  misc_feature (1)..(306): n is a, c, g, or t
gtgacaatgaatataaaacaggagaggattggcaagtcatcagtgactatgacgcttcatggacgccttgacacggtaaacgcccccctgcttgagagcaaaataaaagagcagaaagacataacggaactgacgcttgattttaagggaattgattatatttccagtatgggccttagggtgctgctccaggcgaaaaagacgatgaaagcggatggcgtcaggctgacaattattaatatgcaggattccgtacgggagatttttgagatgaccggttttttaaatcttatgacgaaggaataa

SEQ ID NO: 55276 - protein, 101 aa, Unknown
  Obtained from environmental sample
  DOMAIN (1)...(98): STAS domain
  misc_feature (1)..(101): Xaa is any amino acid
MTMNIKQERIGKSSVTMTLHGRLDTVNAPLLESKIKEQKDITELTLDFKGIDYISSMGLRVLLQAKKTMKADGVRLTIINMQDSVREIFEMTGFLNLMTKE

SEQ ID NO: 55277 - DNA, 750 bp, Unknown
  Obtained from environmental sample
  misc_feature (1)..(750): n is a, c, g, or t
atgcggatccaaatgagcatgctgcccgccgccttcccccccctccggggcggaaaaaacgaatttgacctttttgcgcgggtgtatcccgcaaaggaagtcggcggcgatttttatgatttattttttattgatgatgatcattttgccatggttatcgccgatgtttcaggcaagggggtgcccgccgccctgttcatggcgatcgcgaaaaccattatcaagaaccgcctgcaaagcggggaggatcctgaacacgccatggagattattaaccgcgatctttgcgacaacaacatcatggatatgttcgttaccgcctggatctgcgttcttgaaatttcttccgggcttcttgtgtttgtcaacgcgggccataacccgcctcttgttatgcgacatgggaatgattttcgttttctcgtttcgcctccggaccttgtgcttgccggcatggacgatacgcgctaccacagccgccagttccggttaaagccgggcgatattctgttcctctacacggacggcataacggaggcggcaactgccgaggcaactgccgaaacaggctccggggatgaattttatggcaaagaccggttgaaggctttccttgacgcgaatgccggcagacccctccgggagatgatcgatttgttccgtgatgatatagcggcctttgccaacggcgcggaacagtcggacgacatcaccatgcttgtcntgagggtcggagggacgggggtctag

SEQ ID NO: 55278 - protein, 249 aa, Unknown
  Obtained from environmental sample
  DOMAIN (45)...(245): Stage II sporulation protein E (SpoIIE)
  misc_feature (1)..(249): Xaa is any amino acid
MRIQMSMLPAAFPPLRGGKNEFDLFARVYPAKEVGGDFYDLFFIDDDHFAMVIADVSGKGVPAALFMAIAKTIIKNRLQSGEDPEHAMEIINRDLCDNNIMDMFVTAWICVLEISSGLLVFVNAGHNPPLVMRHGNDFRFLVSPPDLVLAGMDDTRYHSRQFRLKPGDILFLYTDGITEAATAEATAETGSGDEFYGKDRLKAFLDANAGRPLREMIDLFRDDIAAFANGAEQSDDITMLVXRVGGTGV

SEQ ID NO: 55279 - DNA, 354 bp, Unknown
  Obtained from environmental sample
  misc_feature (1)..(354): n is a, c, g, or t
gtgcgcatgcaccggctctttggccgcaccgatgatatgcttattatccggggggtaaatgttttcccaagccagattgaacatgctctgattgagatagagggagtcgagccccagtacctgatcgtggtcagtaggggcgaggatcatctggacgaactggaactgcaggtagaagttaaaatggaattattcaccgacgaggttaaaaaccttgagaaattgcggagccgcattgagcatgtgatgaaatcaaaactgcagatatcggttaaagtaaaattggtagaaccaaaaaccattgaaaggtcaattggcaaagccaaaagagttattgataagaggagtatataa

SEQ ID NO: 55280 - protein, 117 aa, Unknown
  Obtained from environmental sample
  misc_feature (1)..(117): Xaa is any amino acid
MRMHRLFGRTDDMLIIRGVNVFPSQIEHALIEIEGVEPQYLIVVSRGEDHLDELELQVEVKMELFTDEVKNLEKLRSRIEHVMKSKLQISVKVKLVEPKTIERSIGKAKRVIDKRSI

SEQ ID NO: 55281 - DNA, 417 bp, Unknown
  Obtained from environmental sample
  misc_feature (1)..(417): n is a, c, g, or t
atgggaatgaaacaaatttctgtttttcttgaaaacacaacgggtcgtctttgcgaggtcacgcggacacttgccaaagcgggaataaacctgagggcgattaacattgcggataccgcggagtttgggatactgaggcttatcgttgacaagaccgacgaggcggaaaaggccctgagcgctgcgggctttaccataaggatgaccatggtcgcggccgtggagatcgatgataaaccgggcagccttgacaagctgattgtgatgatccagaagttcggaataaatatcgagtatctgtacgcctcacttgggggcaacagcggcaaagcggtggtgatttttaaactggaagatcacgaaaaaggttttgcccagttggagaagagcggcctggttttggcggaaaggttataa

SEQ ID NO: 55282 - protein, 138 aa, Unknown
  Obtained from environmental sample
  DOMAIN (4)...(74): ACT domain
  misc_feature (1)..(138): Xaa is any amino acid
MGMKQISVFLENTTGRLCEVTRTLAKAGINLRAINIADTAEFGILRLIVDKTDEAEKALSAAGFTIRMTMVAAVEIDDKPGSLDKLIVMIQKFGINIEYLYASLGGNSGKAVVIFKLEDHEKGFAQLEKSGLVLAERL

SEQ ID NO: 55283 - DNA, 732 bp, Unknown
  Obtained from environmental sample
  misc_feature (1)..(732): n is a, c, g, or t
gtgaaaatattaatggttgccagcgaggccgtcccctttgccaaaaccggcggtctcgcggacatggtctccgcgctttctatcagccttgccgcccttgggcatgacgtccgtattgtattgccccgttattatagcatagacaggggcaaacttaaaatgctgcccggcgcgatgggggttcctttgggctggggcgaggaatggagcgccgtctatacaaccacattgcccaaggcggtaaagaaaaatccggtgaatgtgtatctaatcgatcacgagatacattttggcaaggacggaatttacggcgttccgtcggaaccggattttctggacaacttccggcgttttacttttttatgcaaggcggcgttccagctctgccggaaaatcggatggtacccggatgtgatccacgcgcatgactggccggcggcccttgcgcccgtgtacctgaaattcgcggaaagggttcccgccagccgtaagggttttgaaaaaaccgtatcggtgcttaccgtccacaaccttggctaccagggcgtatacggcaaggataactataactatgccggcctcggctgggacgtgttttacaacgcgggctttgaggactggagcatgattaacatgcttaaagccggcctgtacagcgcggacagcctgactactggtttcaccttactatgcggaagagaacaaaacccaggcccacgggttccgtcttga

SEQ ID NO: 55284 - protein, 243 aa, Unknown
  Obtained from environmental sample
  DOMAIN (2)...(231): Starch synthase catalytic domain
  misc_feature (1)..(243): Xaa is any amino acid
MKILMVASEAVPFAKTGGLADMVSALSISLAALGHDVRIVLPRYYSIDRGKLKMLPGAMGVPLGWGEEWSAVYTTTLPKAVKKNPVNVYLIDHEIHFGKDGIYGVPSEPDFLDNFRRFTFLCKAAFQLCRKIGWYPDVIHAHDWPAALAPVYLKFAERVPASRKGFEKTVSVLTVHNLGYQGVYGKDNYNYAGLGWDVFYNAGFEDWSMINMLKAGLYSADSLTTGFTLLCGREQNPGPRVPS

SEQ ID NO: 55285 - DNA, 1656 bp, Unknown
  Obtained from environmental sample
  misc_feature (1)..(1656): n is a, c, g, or t
ttggagataaaaccgacagtggtcgttcccggcgaattatggaaggaatcgggccgttgggactctatgggcgaatcaatgcttagggtaaaaaacaggcttgataacgactttgtcgtctctcccacagccgaagaagtttttaccgccaccgtacgggacgagctttcaagctaccgccagcttccgctcgcgctttaccagatcaataccaaattccgggacgaaatacgcccgcgttacggtgtaatgagagggcgcgagtttataatgaaagacgcttattcatggcacgcggacgataaaagcctcgatgaaacatatcagacaatggggcgtgcgtaccgtaaaattttcaaacgctgcgggctttcggtaattcccgtaaaagccgattcgggcgcaatgggcggctcaggctcggaagaatttatggtggaaagcgaaatcggagacaacacacttgtcctctgcaagaaatgcggttacgccgccaatgtggaaaaagcttcctgcaaacctgattttacggctcaagtctctgcggaagccgcaaaagccgcttcctctaatattccgcctatcgaaaaaatagacactcccaacgtaaaaaccatagacgaactttgcgcctttctgaaaacatcgccgcaaagttttattaagacgctgatttaccgcgctcttaatgttgagttggacctctcctccgctcccggctgttccaatcttgagcgaaagaagccgtcgcctgacgcgcccgccgtgtatccgcaagtcttcttcgccgtggcaatacgcggcgaccttgacgtgaacgaggtaaaactcgcctcagttctcaaagcaagcgaagtaggccttgcctctgataccgatgttacgcgccttacaaacgctcctgtcggttttgcaggccctgtcggtttaaaaactctgccggtcattatcgatcatacggttacggggatgaatgacgcggtaacaggcgcgcttgagaaagacctgcactacaaacacgccgcatacgggcgcgattttgaaggctggataattgacgggcaaatatccgttgatgtgcgtaccgtaaaagccggagactcttgctcacaatgcggcggcgaattgtatacaaaaatgggcaatgagcttggacacatttttaaacttggttacaaatatacccgttcaatgaacgtaacctatcttgatgaaaacggaaaaacccaaatgcccgtaatgggctgttacggcatcggagttgaccgcactcttgcttccgtaatcgaggaacaccacgatgacgcgggaatcatctggcccgtctctgtagctccttatcatgttatcattgttccgattaagtacgacggagaagtgaaaaatgccgccgacaaactcgcggaagaacttacacaggccggcatcgaagttttgctggacgaccgcaatgagcgccccggcgtaaaatttaacgacgctgaccttatcggcattccctggcgcgtggtaataggcgataaaggacttgcccaatcgcccgcgaaagtggaaattaaaaagcgaaacgagaaagacagccgaatgacggatttaatcgacgcggcggcggaacttacggagaaaatcagcaaagagcttgtaagttacctgtaa

SEQ ID NO: 55286 - protein, 551 aa, Unknown
  Obtained from environmental sample
  DOMAIN (189)...(347): YbaK / prolyl-tRNA synthetases associated domain
  misc_feature (1)..(551): Xaa is any amino acid
MEIKPTVVVPGELWKESGRWDSMGESMLRVKNRLDNDFVVSPTAEEVFTATVRDELSSYRQLPLALYQINTKFRDEIRPRYGVMRGREFIMKDAYSWHADDKSLDETYQTMGRAYRKIFKRCGLSVIPVKADSGAMGGSGSEEFMVESEIGDNTLVLCKKCGYAANVEKASCKPDFTAQVSAEAAKAASSNIPPIEKIDTPNVKTIDELCAFLKTSPQSFIKTLIYRALNVELDLSSAPGCSNLERKKPSPDAPAVYPQVFFAVAIRGDLDVNEVKLASVLKASEVGLASDTDVTRLTNAPVGFAGPVGLKTLPVIIDHTVTGMNDAVTGALEKDLHYKHAAYGRDFEGWIIDGQISVDVRTVKAGDSCSQCGGELYTKMGNELGHIFKLGYKYTRSMNVTYLDENGKTQMPVMGCYGIGVDRTLASVIEEHHDDAGIIWPVSVAPYHVIIVPIKYDGEVKNAADKLAEELTQAGIEVLLDDRNERPGVKFNDADLIGIPWRVVIGDKGLAQSPAKVEIKKRNEKDSRMTDLIDAAAELTEKISKELVSYL

SEQ ID NO: 55287 - DNA, 714 bp, Unknown
  Obtained from environmental sample
  misc_feature (1)..(714): n is a, c, g, or t
atgatatttctttccaaagtttttacatatttaattcttccccctggatgttttatttttatccttttcctcgtttttatatttataccgaaaaaaaagaaaatatttccgctgctctcgcttttgattttatatcttttgtctatacagcctgtttccgatctgcttttgaacctcttgaaaacgcgtatccgcccttgtcgtccgaatttaaaaaagactggccgcaggcctgttgtaattttaggcggcggaggaatcattggctcgcctgaggcgggaacagggaaggataccctttctgcggatgcgatgaaaagagtagtatacgcgttttcgcttcgtgatacgtttaatgttccgtttgtgttttcgggcgggaaggtttttgaatacggtcaggagccggaagcgtttgcggcgagcagattgcttgtttctttggggtttccttttaatcggcttattttggaatcaagaagccgtaatacatgggagaacgcgaaagagacggcaatatacggatttgatcaccctgtcttggttacatcggcttatcatgttaaacgcagtgtctattgttttaaccggcagggcatatctgtaattgccgctcctaccgattataaatgcgatcgcgggtacaaatatgactttttcagttttatgcctacgattatcagtttaaaaaattcatggtcagcccatgcatga

SEQ ID NO: 55288 - protein, 237 aa, Unknown
  Obtained from environmental sample
  DOMAIN (75)...(222): DUF218 domain
  misc_feature (1)..(237): Xaa is any amino acid
MIFLSKVFTYLILPPGCFIFILFLVFIFIPKKKKIFPLLSLLILYLLSIQPVSDLLLNLLKTRIRPCRPNLKKTGRRPVVILGGGGIIGSPEAGTGKDTLSADAMKRVVYAFSLRDTFNVPFVFSGGKVFEYGQEPEAFAASRLLVSLGFPFNRLILESRSRNTWENAKETAIYGFDHPVLVTSAYHVKRSVYCFNRQGISVIAAPTDYKCDRGYKYDFFSFMPTIISLKNSWSAHA

SEQ ID NO: 55289 - DNA, 630 bp, Unknown
  Obtained from environmental sample
  misc_feature (1)..(630): n is a, c, g, or t
atgaatttgatttttttaggccctccgggcgcaggtaagggaactttagccgtcaaagccgtagagatacttggcgtgcctcagataagcaccggctcaattttcaggacggcaatagcggacaagactccgctgggtcttaaagttaaggccatcattgacgccggaaaacttgtggacgacgaaaccacaatcgcccttgtaaaagagcgccttacaaaagacgacgttaagaaaggatacattttagacggtttcccgcgaacaattccccaggcggaagcgcttgccggtttttccaaagtagacaaggttatcaattttgatattcccgattcaggcgtgcttgaacggcttggggggcgcagggtctgcagaaaatgcggattcaattttcacgctgtttttaacaagactaaacaagaaggcgtctgcgatcattgcggcggagaagtgtatatacgcgacgacgacaagcctgaagccgttcagaaacgccttgaagtgtaccgcgcccagacagctccgttaattgattattaccgcgggaaaggcttgctcctggatatagacgcgaaaccgatggttgatcaaattgtagtcaattttaagaaggcaatgggaatatag

SEQ ID NO: 55290 - protein, 209 aa, Unknown
  Obtained from environmental sample
  DOMAIN (122)...(157): Adenylate kinase, active site lid
  misc_feature (1)..(209): Xaa is any amino acid
MNLIFLGPPGAGKGTLAVKAVEILGVPQISTGSIFRTAIADKTPLGLKVKAIIDAGKLVDDETTIALVKERLTKDDVKKGYILDGFPRTIPQAEALAGFSKVDKVINFDIPDSGVLERLGGRRVCRKCGFNFHAVFNKTKQEGVCDHCGGEVYIRDDDKPEAVQKRLEVYRAQTAPLIDYYRGKGLLLDIDAKPMVDQIVVNFKKAMGI

SEQ ID NO: 55291 - DNA, 921 bp, Unknown
  Obtained from environmental sample
  misc_feature (1)..(921): n is a, c, g, or t
atgaaaggtccgattttggttttactcgcggcgggtattggcagccgttacggcggcctcaagcagatggacaggcttggggaaaacggcgaggtactgcttgattactcggtatacgacgcgatcaaagcgggatttgaaaaaattgttttcattattcggcatgacattgaaaaggattttcgggaccttgtcgctcccatggggacaaaagtccgttgggaattggcgtttcaggagctggacagcctgataccgccggatatttttgaaaaggcgcaaaaacagggaaggacaaagccctggggaacggcccacgcgctgctctgcgcggcggacaatatcgacgcgccgttcgcggttatcaacgccgatgatttctacgggcgcgaggctttcgaggtcctcggtaaataccttcgcggaactggtggcgcgggtgaatcggccatagtgccgtaccggctggataaaaccctgagtcctaagggaaccgtcgcgcgcggcttatgtgaaattaaagacgaataccttgtcacggtcgaggagcttaccgccatagccgaaaaagacggcgtcgttttcaacgccaatcccgacggttccgtcaggcggctcgcccccgacagcccggtgtcgatgaatttctggggcttccccccgtccatacttccccgattcaaaaagtattttgacgaattcttaaaaacctttgccgcagatattcccgcgcagattaaaagcgaatgttttattcccaaagcggcggatcattttattaaacagggcatcgccaaaattaaagttctgagggcggattctgactggtttggcgtaacttataaagaagaccgtgaagcggcggtcaagaaactctccgaactgacaaatgccggcgtttacccggaatcactgtggtaa

SEQ ID NO: 55292 - protein, 306 aa, Unknown
  Obtained from environmental sample
  misc_feature (1)..(306): Xaa is any amino acid
MKGPILVLLAAGIGSRYGGLKQMDRLGENGEVLLDYSVYDAIKAGFEKIVFIIRHDIEKDFRDLVAPMGTKVRWELAFQELDSLIPPDIFEKAQKQGRTKPWGTAHALLCAADNIDAPFAVINADDFYGREAFEVLGKYLRGTGGAGESAIVPYRLDKTLSPKGTVARGLCEIKDEYLVTVEELTAIAEKDGVVFNANPDGSVRRLAPDSPVSMNFWGFPPSILPRFKKYFDEFLKTFAADIPAQIKSECFIPKAADHFIKQGIAKIKVLRADSDWFGVTYKEDREAAVKKLSELTNAGVYPESLW

SEQ ID NO: 55293 - DNA, 552 bp, Unknown
  Obtained from environmental sample
  misc_feature (1)..(552): n is a, c, g, or t
atgccggcgtttacccggaatcactgtggtaaaggatatgttacaatgagccttgcggtttgccttttctggactgtgctcctgtcattcatgccaatatccgaactgcgcggggcaattccctttgcggtcgcaaacggcataccctggtactgggcttttccttttgcggttatatgcaacatccttgttgcgcctgtctgctggattttcctcgcgaccgttcacaaactgctttatggaacagaggttcgaaacggcgtaagctggtataaaaatctttttgacaaatttattgagagggcgaggaaaaaactttcagcgggttttgaaaaatggggctggcttggcatcgctgtctttgtcggtattcccttccctttgaccggagcctggacaggaaccctgggcgcgtgggtactgggggtttcacgcaagcggactatgctggcggttatacttggggttattgtttctggaaccattgtcaccgcggtagtggttggagcggtaaaaggttttaatatttttttaaacgaaaaatggagataa

SEQ ID NO: 55294 - protein, 183 aa, Unknown
  Obtained from environmental sample
  DOMAIN (35)...(162): Putative small multi-drug export protein
  misc_feature (1)..(183): Xaa is any amino acid
MPAFTRNHCGKGYVTMSLAVCLFWTVLLSFMPISELRGAIPFAVANGIPWYWAFPFAVICNILVAPVCWIFLATVHKLLYGTEVRNGVSWYKNLFDKFIERARKKLSAGFEKWGWLGIAVFVGIPFPLTGAWTGTLGAWVLGVSRKRTMLAVILGVIVSGTIVTAVVVGAVKGFNIFLNEKWR

SEQ ID NO: 55295 - DNA, 804 bp, Unknown
  Obtained from environmental sample
  misc_feature (1)..(804): n is a, c, g, or t
ttgataatcggaattgacataggggcgacaacgaccaaggcggtttccattgaagacgggaaactgatccgcaaggttaagattaaggcatctgacgcggtgacagcggcaacaggcgcttttggcaagatcgttcttgataacggaattgacataaatgttatcaaggaaatcaggataaccggagccggagccgccaagataaaaggcgacatttttggaatccacaccgcgagagtcggcgagataaaggccatcggcaggggagggatgttcctttccggcctggatgatatcataatagccaacatcggaaccggaacggtaataatagaggcaaacgggcgcgagatttcgcattacggaggttccggcgtaggcggcggcacgatcaccggtctggcgaagaaactcctgccaaccgccgaatttaacggagttatcaaccttgcccaggccggcaacttaagccatgtcgacctgttactggaagacataatggaaactgatttaagttttctgaacaaagaaaccactattgccaatttcgcgaaaatgtcagatcacgcgagcagtgaggacatcgcgctggcaatcatcaatatggtatatcaggttatcggggtgctttccgtttttgccgccagggcgaagggccttaagcgggttattgtcaccggcaacggcagcggcaacaaactcgggcaaaaagtgcttgcagatataaccggaatgtacggcatagagtttatctatccagccgacgccgaatataccaccgcggtgggagcgggactggtttag

SEQ ID NO: 55296 - protein, 267 aa, Unknown
  Obtained from environmental sample
  DOMAIN (1)...(267): Fumble
  misc_feature (1)..(267): Xaa is any amino acid
MIIGIDIGATTTKAVSIEDGKLIRKVKIKASDAVTAATGAFGKIVLDNGIDINVIKEIRITGAGAAKIKGDIFGIHTARVGEIKAIGRGGMFLSGLDDIIIANIGTGTVIIEANGREISHYGGSGVGGGTITGLAKKLLPTAEFNGVINLAQAGNLSHVDLLLEDIMETDLSFLNKETTIANFAKMSDHASSEDIALAIINMVYQVIGVLSVFAARAKGLKRVIVTGNGSGNKLGQKVLADITGMYGIEFIYPADAEYTTAVGAGLV

SEQ ID NO: 55297 - DNA, 537 bp, Unknown
  Obtained from environmental sample
  misc_feature (1)..(537): n is a, c, g, or t
ttgagtgtattatccatgcctacacattcgattttcgtcgccaatatccttaatggtaagactgattcgttttcctatgatgacaataatgaacttattgcaagttttacggcaccgcaggccaacattcttgttgttgatgatatcattaccaatctaaatgtggtaaaagggcttctttctccctatgaaacgcagataaccctgtgtaaaagcggtaagatggcattaaatgcgttaagaagcaaccgctttgacgtgatatttatggatcacaggatgccggaaatggacggtattgaaacgacccatcgtatcagggctttaggggatgaagatccctattataaaaatgtgccgattatagcgttaaccgcagacgctgtttccggtataaaagaaacgtttctggaaaacggcttaaatgattttttatcaaaaccgattgatactattaaactgaactctgtcctggagaaatggatacccagggaaaaacaacatggttcggttattataaacaggaaagggggataa

SEQ ID NO: 55298 - protein, 178 aa, Unknown
  Obtained from environmental sample
  DOMAIN (41)...(159): Response regulator receiver domain
  misc_feature (1)..(178): Xaa is any amino acid
MSVLSMPTHSIFVANILNGKTDSFSYDDNNELIASFTAPQANILVVDDIITNLNVVKGLLSPYETQITLCKSGKMALNALRSNRFDVIFMDHRMPEMDGIETTHRIRALGDEDPYYKNVPIIALTADAVSGIKETFLENGLNDFLSKPIDTIKLNSVLEKWIPREKQHGSVIINRKGG

SEQ ID NO: 55299 - DNA, 612 bp, Unknown
  Obtained from environmental sample
  misc_feature (1)..(612): n is a, c, g, or t
ttgcttcaattcttttttaccgaagaacaattacatgaatatctccacgccgaatacgaagctttcaaaaaaaatgaagccgcggcggaaacaaatcacgccaggcaatccttgcttgacaggggcattcccacgacaaacgactcccttgtccagtgtgtttccgaagataaagcggacgaagtcgctctcttttttgccgccggtttttcgcccgatacaaaagacaaaaaaggaatcccactggtttgtattgccgccagaaacgggaacttaaacaccctaaaactcctgctctataccggcgcccaggtgaatcaaattgccgaagacaggggttctaacgctttatttgacagcgcccttataagaaataaagaaatagtaaaaactcttattgaagccggggcggacgtgaatgttcaaagcaaagacggacagaccgcgcttattgtcgtggtaggcgcaggggatgaggatatagttgaattactggttaaggccggggctgactctgacattaaagacgctctcggcgtcagcgcgagaaagtacgccaccatttttggcaacaaaaaaatgctggctatgtttgactctaactctaaatga

SEQ ID NO: 55300 - protein, 203 aa, Unknown
  Obtained from environmental sample
  DOMAIN (112)...(144): Ankyrin repeat
  misc_feature (1)..(203): Xaa is any amino acid
MLQFFFTEEQLHEYLHAEYEAFKKNEAAAETNHARQSLLDRGIPTTNDSLVQCVSEDKADEVALFFAAGFSPDTKDKKGIPLVCIAARNGNLNTLKLLLYTGAQVNQIAEDRGSNALFDSALIRNKEIVKTLIEAGADVNVQSKDGQTALIVVVGAGDEDIVELLVKAGADSDIKDALGVSARKYATIFGNKKMLAMFDSNSK

SEQ ID NO: 55301 - DNA, 558 bp, Unknown
  Obtained from environmental sample
  misc_feature (1)..(558): n is a, c, g, or t
atgataaataacaatcaaatacaggttattcgcggagacatcacccgccaggcggtcgacgccatcgttaatgccgccaatgaaagcctgcttggcggaggaggcgtagacggcgcaatccattccgccgccggcagagaactggatttggcctgccggaaaattcatgacgagaaaggcggatgcaaaacaggcgacgcggtaattacaaccggcggcaatttgcccgcaaaatttgtcattcatacggttggtcccgtttggcgcggagggaaacagcgggaagccgaattgttatcaagcgcgtatttgagttctttgcgattggcagcggaaaacgggattaagactattgctttcccgaatatcagcacgggaatatacggctttccgaaagaacaggcttcaaaaattgccgtttccgctgttgcggattttcttaacaataacgagacatctgttgaaagtgttgtttttgtttgctttgatcaggagaattttgagctttatagagagatgggtggtaaagatataggtaatataaatgataaagtctga

SEQ ID NO: 55302 - protein, 185 aa, Unknown
  Obtained from environmental sample
  DOMAIN (23)...(139): Appr-1-p processing enzyme family
  misc_feature (1)..(185): Xaa is any amino acid
MINNNQIQVIRGDITRQAVDAIVNAANESLLGGGGVDGAIHSAAGRELDLACRKIHDEKGGCKTGDAVITTGGNLPAKFVIHTVGPVWRGGKQREAELLSSAYLSSLRLAAENGIKTIAFPNISTGIYGFPKEQASKIAVSAVADFLNNNETSVESVVFVCFDQENFELYREMGGKDIGNINDKV

SEQ ID NO: 55303 - DNA, 408 bp, Unknown
  Obtained from environmental sample
  misc_feature (1)..(408): n is a, c, g, or t
atgcccaaatcacagccccccgcaactgttcttcaatctctcatggccgagtacctgcttaaccccttttcgcttgctaaagcgattaacctaagcaattccgcagtacgcttaattgtaatcgggaaggcaaaaattactgttaccacagccttacgccttgccaagtttttcggtcaaactcccgcctattggttagatcttcagcgtgaagcagatatagcagaagcctcgaaagacaaagaattacaggatattctaaaagccattcccaaagcaaagaaacccgccgccactaaagagggagtcgctaaaacgcaacctaaattgagcaaaaagaccaccataaccaccgccccaagtaccgcaaaaaacaaaggcgcaaaaaaggttgtcaagaaaaagtag

SEQ ID NO: 55304 - protein, 135 aa, Unknown
  Obtained from environmental sample
  DOMAIN (11)...(65): Helix-turn-helix
  misc_feature (1)..(135): Xaa is any amino acid
MPKSQPPATVLQSLMAEYLLNPFSLAKAINLSNSAVRLIVIGKAKITVTTALRLAKFFGQTPAYWLDLQREADIAEASKDKELQDILKAIPKAKKPAATKEGVAKTQPKLSKKTTITTAPSTAKNKGAKKVVKKK

SEQ ID NO: 55305 - DNA, 420 bp, Unknown
  Obtained from environmental sample
  misc_feature (1)..(420): n is a, c, g, or t
atgaagaattttatttttgcggtattaattgtttttctctttttatccgtggtttttccggtgcaagcgcagagcaataccgattcttcggctccttcgccgaacgcttttgatatgacaggttttccgcaatgggcaaaagatttgcgccgttgggatataataactttcggcgtatatcctttcgccctgttttttaccacgacggttaccgatcttatgcgctggaatgacgccaacgggatgagcatggatgaccgccgttacgcgccctggccgttaaaatccgcgggcgccgtagaaatgacaaaagacgaattcggaaaagttttattgcaagaccgcggtaatttcggcaatgatcgcgtgtacggatttaattatagtgttggtaaacgaagcaaagaacgcaagcgatag

SEQ ID NO: 55306 - protein, 139 aa, Unknown
  Obtained from environmental sample
  SIGNAL (1)...(23)
  misc_feature (1)..(139): Xaa is any amino acid
MKNFIFAVLIVFLFLSVVFPVQAQSNTDSSAPSPNAFDMTGFPQWAKDLRRWDIITFGVYPFALFFTTTVTDLMRWNDANGMSMDDRRYAPWPLKSAGAVEMTKDEFGKVLLQDRGNFGNDRVYGFNYSVGKRSKERKR

SEQ ID NO: 55307 - DNA, 849 bp, Unknown
  Obtained from environmental sample
  misc_feature (1)..(849): n is a, c, g, or t
ttggagactccctgcaaaataaatcggcggtacaggagtttaccgcctctgttttacaaagcaactcgcttaatggtacagaacgcgccgaaagtcttgagcaggagacgtttttatcccttgcattatccattgataatatgcgattatagaatagagatgtcagttgccgggaatatagaaaaactggaagagcggattcaaaagacttgcgactgcgccaacagaaaacgggatgagattacgctgatgggcgtatcgaaatttgtgcctgttgaactgatagacgaagcgtatcgccacggtattcgctgttttggagagagcagggtaaaagaagccgaggaaaaattaggcgcgtttaaaagtacacattccaatgcgcggcttcatttgattggctctttacagcggaacaaggcaaaacaggcggctcttttttttgactgtattcagtctgtagacagggaagaaattatcgccgagcttgaaaaacattccgctgggcgcgaaaagccgcttgaggttcttcttgagcttcacacgggcgaggaaacaaagagcggttttgcggatcttgacgctgtttttaaggcggcgcaaacggttatggacagtaagtttctgaaagtacgggggcttatgacaatggctccctttaccgaagatacggaattaatccgcgcttctttcaggcagcttgtaaaagcgcaaaaagaacttgaaaggcgtttccctccgaaggagaactgggaatgtctttctatgggaatgtcaaacgattttgatattgctgtcgaagaaggttcaacaatgataaggataggcagtttgctttttaaggaataa

SEQ ID NO: 55308 - protein, 282 aa, Unknown
  Obtained from environmental sample
  DOMAIN (51)...(282): Alanine racemase, N-terminal domain
  misc_feature (1)..(282): Xaa is any amino acid
METPCKINRRYRSLPPLFYKATRLMVQNAPKVLSRRRFYPLHYPLIICDYRIEMSVAGNIEKLEERIQKTCDCANRKRDEITLMGVSKFVPVELIDEAYRHGIRCFGESRVKEAEEKLGAFKSTHSNARLHLIGSLQRNKAKQAALFFDCIQSVDREEIIAELEKHSAGREKPLEVLLELHTGEETKSGFADLDAVFKAAQTVMDSKFLKVRGLMTMAPFTEDTELIRASFRQLVKAQKELERRFPPKENWECLSMGMSNDFDIAVEEGSTMIRIGSLLFKE

SEQ ID NO: 55309 - DNA, 573 bp, Unknown
  Obtained from environmental sample
  misc_feature (1)..(573): n is a, c, g, or t
gtgaagggcgatgtaatgaaaacatggcgcgaacatcaaggcgcgccgtttctttttgggaatcttccgtacaatgtcgcggcggccctgttggcggactttattgaaaatgaccgtattttttcacgcatcgttgttaccgtacaaaaagaagtagccctgcgcatggcggcaaccgctgggaaacccgactattcttcattctcagtattgtgcgcgtcagcctacaaagttaaaccgttaatgacaatccgcccatcgtctttttatccccagccgaatgtggacagcatggcggttctccttgaaaaaaaagcctcccaaaagtaccctgcggttttttatcctctggtgcgggcattgttcgcgtccagacgcaagacgataaaaaacaaccttttaacttttctttcctcccgttttggagactccctgcaaaataaatcggcggtacaggagtttaccgcctctgttttacaaagcaactcgcttaatggtacagaacgcgccgaaagtcttgagcaggagacgtttttatcccttgcattatccattgataatatgcgattatag

SEQ ID NO: 55310 - protein, 190 aa, Unknown
  Obtained from environmental sample
  misc_feature (1)..(190): Xaa is any amino acid
MKGDVMKTWREHQGAPFLFGNLPYNVAAALLADFIENDRIFSRIVVTVQKEVALRMAATAGKPDYSSFSVLCASAYKVKPLMTIRPSSFYPQPNVDSMAVLLEKKASQKYPAVFYPLVRALFASRRKTIKNNLLTFLSSRFGDSLQNKSAVQEFTASVLQSNSLNGTERAESLEQETFLSLALSIDNMRL

SEQ ID NO: 55311 - DNA, 615 bp, Unknown
  Obtained from environmental sample
  misc_feature (1)..(615): n is a, c, g, or t
atgcatggatcaggatggaaaatgaccaaaggaagggtattgaacgtcggcggcaattcaaaggccattccgctccccccacaatacgcgggcttcgagcaccttttattggacattgacgaaaaagcatctcccgacatcctctgcgatgccagagagcttggcagcctagaggcgggccagtttgacgcaatatattgttcgcacacactcgaacacttttacccacacgatgtgccaaaagtgctatcgggttttttgcatgtactcaaagatgacggctttgcccaaataatcgtaccagatattatgggcgcgatgcagatggtggtgcagcgaaacatggacatcgaagatgtattgtacgtatcgcccgctggcccaataacgctgcgcgacatgctttattcttatagtgtgtttgtcgagaagtctccagagttcatgtcgcacaaaacaggcttttctcccaaaagccttgcggctgtggttgaacaggcgggcttcaagatagtcttctccgcgtggggcaatctcaacgcatcggtattggccttcaaaaacgcgccgacacaagccgtaagggagttgtttggtttgccaagcgtcccctag

SEQ ID NO: 55312 - protein, 204 aa, Unknown
  Obtained from environmental sample
  DOMAIN (14)...(98): Methyltransferase domain
  misc_feature (1)..(204): Xaa is any amino acid
MHGSGWKMTKGRVLNVGGNSKAIPLPPQYAGFEHLLLDIDEKASPDILCDARELGSLEAGQFDAIYCSHTLEHFYPHDVPKVLSGFLHVLKDDGFAQIIVPDIMGAMQMVVQRNMDIEDVLYVSPAGPITLRDMLYSYSVFVEKSPEFMSHKTGFSPKSLAAVVEQAGFKIVFSAWGNLNASVLAFKNAPTQAVRELFGLPSVP

SEQ ID NO: 55313 - DNA, 669 bp, Unknown
  Obtained from environmental sample
  misc_feature (1)..(669): n is a, c, g, or t
atgatcagatcggccgaggctttgtccatacagaggcccgacctgctattccgcgacccagacaggctggacagactggtgaacaacccagagaggccgctgaacctgatctttgcaggccgctcccacccagcggacaaccctggcaaagaaatcatcaagcgtgtcaaccaaatgctggaagacccccgcttcaaaaagaggatcgtgtttgtcgaaaactacaacatggaagtgggaagaagcctgtaccaaggcgtggacggctggctcaacaacccccgccgcccgctggaggcctgcggaaccagcggcatgaaggccgtgatgaatggtgcgctgcacatttcgattttggacggctggtgggccgaggcctacgacggagcaaatggctttgccatcggcaacgggcagatccacgccaaccaagacatccaagaccagcgcgattgcgaagccctttacaggctgctggaagaagtcatcgtgccgatgtactacgaccgcgacaaattgggcatcccgcaaaggtggattaagagggtcaagcgctccatcaggactctctcgtggagattcaacgcagaccgcatgctcattgactatgcacgcaactgctacctccccgccgccgatgcgaaccaagctcaaatgcctactccctag

SEQ ID NO: 55314 - protein, 222 aa, Unknown
  Obtained from environmental sample
  misc_feature (1)..(222): Xaa is any amino acid
MIRSAEALSIQRPDLLFRDPDRLDRLVNNPERPLNLIFAGRSHPADNPGKEIIKRVNQMLEDPRFKKRIVFVENYNMEVGRSLYQGVDGWLNNPRRPLEACGTSGMKAVMNGALHISILDGWWAEAYDGANGFAIGNGQIHANQDIQDQRDCEALYRLLEEVIVPMYYDRDKLGIPQRWIKRVKRSIRTLSWRFNADRMLIDYARNCYLPAADANQAQMPTP

SEQ ID NO: 55315 - DNA, 1473 bp, Unknown
  Obtained from environmental sample
  misc_feature (1)..(1473): n is a, c, g, or t
ttggaaaagcttgacgctttcggcaagcgcatgaagacttgccgcatactgctgaacaccccgtcggcgcaaggcggcataggcgacttgtacaacttccgcctgcggccatcgctcactttgggctgcggcagttggggcggtaattcagtttcggaaaatgtcggcgttaaacacctgttaaatattaaaacactggcggcaaggagggaaaatatgctgtggttccgcgctcccgaaaaagtatatatcaagaggggatgcctccccgtggctctggacgaacttaaaaccgttatggggaaaaaacgcgcgttcatcgtaaccgacacattcctgtacgaaaacggttacacaaaaacgattaccgaaaaattggaaagcatgggaattgttcacgaaactttttttgacgtcgcccccgacccgactcttgcctgtgcgaaaaaaggcactgcgattatgagcgccttcaaacccgatgtgatcatcgcgctgggcggcggctcggcaatggacgcgggcaaaatcatgtgggtgctctacgaacatcccgaagttgattttgaggatatggctatgcgcttcgccgacatacgcaagcgcgtctacaccttccccaaaatgggagagaaggcgtactttatcgccatacccacctccgccggaacgggcagtgaggtgacgccctttgccgttatcaccgatgaaaccaaaggcatgaagtacccgcttgcggattacgaacttttacccgacatggcgatagtggacgccgatgtgcagatgaacgcgcccaagggactgacaagcgcgtccggcatcgacgctgtaacccacgcgctggaagcctatgcctcggttatggcttcggactacaccgacggccttgcgatacaggcgctcaaagtgattttcgaatggctgcccatcgcgtacaacgaaggcgcggcgaatcctgttgcgcgcgagaagatggcgaacgccgccacgatagcgggcatggctttcgccaacgcgttcctcggcgtgtgccactcgatggcgcacaaactcggcgcgtttcatcatttgccccacggcgtcgccaacgcgctgatgatcagcgaagtgcttcgctacaacgcctgcgaagttccgccgaagatggggacattccctcaatatgatcatcccagaacattatcacgttacgcgcaaatcgcggacgcgctggctctcggcggcaaaaccgacgaggaaaaacttgagaaactgatctccgctgtggaaaagctgaaagagcagataggtatcaagaaaacaatcaaagattacggcattgatgaaaaagattttcttgcccgccttgacgacatgagcgaacaggcctttgacgatcaatgcacaggcgcgaatccgcggtaccccttaatcgaggaaattaaaaagatgtacctcaatgtatattacggaaagaaggagaaggtgtaa

SEQ ID NO: 55316 - protein, 490 aa, Unknown
  Obtained from environmental sample
  DOMAIN (79)...(475): Iron-containing alcohol dehydrogenase
  misc_feature (1)..(490): Xaa is any amino acid
MEKLDAFGKRMKTCRILLNTPSAQGGIGDLYNFRLRPSLTLGCGSWGGNSVSENVGVKHLLNIKTLAARRENMLWFRAPEKVYIKRGCLPVALDELKTVMGKKRAFIVTDTFLYENGYTKTITEKLESMGIVHETFFDVAPDPTLACAKKGTAIMSAFKPDVIIALGGGSAMDAGKIMWVLYEHPEVDFEDMAMRFADIRKRVYTFPKMGEKAYFIAIPTSAGTGSEVTPFAVITDETKGMKYPLADYELLPDMAIVDADVQMNAPKGLTSASGIDAVTHALEAYASVMASDYTDGLAIQALKVIFEWLPIAYNEGAANPVAREKMANAATIAGMAFANAFLGVCHSMAHKLGAFHHLPHGVANALMISEVLRYNACEVPPKMGTFPQYDHPRTLSRYAQIADALALGGKTDEEKLEKLISAVEKLKEQIGIKKTIKDYGIDEKDFLARLDDMSEQAFDDQCTGANPRYPLIEEIKKMYLNVYYGKKEKV

SEQ ID NO: 55317 - DNA, 1554 bp, Unknown
  Obtained from environmental sample
  misc_feature (1)..(1554): n is a, c, g, or t
ttgccggaattttcaatagccgaattcagttataacgaaaaaaaagcgttcataaaaaatcttttaacttcccatcttgtgcttacggctcaggttctttcgcttctaatcgcggtttatcatttttttctctttttctccagaggccgcaaagatataaagtatttgtatttttcgcttctgtgcctttcattcttctttgcctacactaatgtcggttttgtcttttcatcggcgcattatacattgttggaaaaactcagccggatagggcaagtattctgcctgcctttctttgccgcgtttataattgaatcggtgggtatatttgtcgggaaaaagaaatatatcataatcggtcttctcggctacagcgtgctttgcgtttcattcatagccattcagaatacaaagcaatatgtaaacgaaatgtttaatgttatgacaaatattaatactatccctcttctggctggcagtattgttatcctctcttacgttgtttttttcaggaagaatatcaaaattgtgccgctgtttattatcgcgcttgcggtcgcgggttccagtttgcgcgatctttttgttcttcaaagcggtacggtgccgttgttctggatggcgccctattccttcattctcatggtaattatcatatacgggatgctgatgaccgaggaaaattttattcagggcgctttttcccgctaccttgcgccagaaattatttccgaaattgtcaaagaccccaacaagctgaaccttggcggcgaaaagcgcgaaatgaccgcgatatttaccgatattcagggtttttccgccatttccgaacaactcgatcccgctcatcttgtacggctcttaaacaaataccttactgaaatgagcaatatcatcatggaaaaccttggaactatagataaatacatgggtgacgcgattatcgcgttcttcggagctcctttattcaatgccgaacacagcgcccttgcctgccgcagcgcccttgcgattaaggcggcggaaaaggaactaaataaaacattagtaagtgaaaggttgagccctgtgcctatttttacccgtatcggaataaataccggtgaaatggtagtgggtaatatgggtgcggaaaaaaagatggattataccgtcatggggaacgcggtaaaccttgcatcgcgtattgaaggagtaaacaagtattaccataccggcggcatattgataagcgaatatactagggcaaaaatcggcgatgagtttctgctgcgccgtattgaccgtgtccgggtggtggggataaacacaccgttgcgtctttatgaattgttaccaacggatactgaacagggtgcggtggaaatttgggagaaggctcttgatttgtatgaacaaagagagtttagaaaatcttttggcttgtttgtttcgctcttaaagcgttatccgtatgacaatgcagctaaggtttacgcacaccggtgcaaagcgtttgttaaaactccgccgccggaagattggaatgctgtgaaaaacctaacaaataaatga

SEQ ID NO: 55318 - protein, 517 aa, Unknown
  Obtained from environmental sample
  DOMAIN (23)...(229): 7TM diverse intracellular signalling
  misc_feature (1)..(517): Xaa is any amino acid
MPEFSIAEFSYNEKKAFIKNLLTSHLVLTAQVLSLLIAVYHFFLFFSRGRKDIKYLYFSLLCLSFFFAYTNVGFVFSSAHYTLLEKLSRIGQVFCLPFFAAFIIESVGIFVGKKKYIIIGLLGYSVLCVSFIAIQNTKQYVNEMFNVMTNINTIPLLAGSIVILSYVVFFRKNIKIVPLFIIALAVAGSSLRDLFVLQSGTVPLFWMAPYSFILMVIIIYGMLMTEENFIQGAFSRYLAPEIISEIVKDPNKLNLGGEKREMTAIFTDIQGFSAISEQLDPAHLVRLLNKYLTEMSNIIMENLGTIDKYMGDAIIAFFGAPLFNAEHSALACRSALAIKAAEKELNKTLVSERLSPVPIFTRIGINTGEMVVGNMGAEKKMDYTVMGNAVNLASRIEGVNKYYHTGGILISEYTRAKIGDEFLLRRIDRVRVVGINTPLRLYELLPTDTEQGAVEIWEKALDLYEQREFRKSFGLFVSLLKRYPYDNAAKVYAHRCKAFVKTPPPEDWNAVKNLTNK

SEQ ID NO: 55319 - DNA, 753 bp, Unknown
  Obtained from environmental sample
  misc_feature (1)..(753): n is a, c, g, or t
gtgcttgaccgcaacgtcaacgccggcgatacggtagtggaatcctccagcagcaactcggccagtatttttaccctggcggagaacctcagggaaatgcagattgaggcggcggtaggacaacttgacgttagttctttatacaagggacagccggtacgctttacccttgaaagcctgagcgggcgcagttttaccggaacagtggaaaacatacgaatggttccggttacgtcgaataacattgtttcctacacggtgataatcggcgttaaaaactcagacggcgtccttatgcccggaatgacctgcgcggtaaattttatcgtggaacaacgcgaaaataccctgctgcttcccaacgccgccctgcgctaccagccttcaaccctgagcgcggaacaaattgacgaaatggtgtttgtcgcgggccttacggctatggacgagggccagcgcaagaccgcgatagagacgcgggaacaggcccaggcggcccggaactcggagcggaacgccaccagcctgacaaggctggtggcgggaagccaaaccccaaggccgcccccgcagcacgccggagagggaaaccgcgcggctgtagttatgcggaatgtctggtacttgaacggcgaaggcaagcttgaagtaataagggtgcaaaccggcagcactaacggctcgcttaccgagatcctttcaacggaagaccttgaaggcaaacaggtgattttacgggagaagcttttttaa

SEQ ID NO: 55320 - protein, 250 aa, Unknown
  Obtained from environmental sample
  misc_feature (1)..(250): Xaa is any amino acid
MLDRNVNAGDTVVESSSSNSASIFTLAENLREMQIEAAVGQLDVSSLYKGQPVRFTLESLSGRSFTGTVENIRMVPVTSNNIVSYTVIIGVKNSDGVLMPGMTCAVNFIVEQRENTLLLPNAALRYQPSTLSAEQIDEMVFVAGLTAMDEGQRKTAIETREQAQAARNSERNATSLTRLVAGSQTPRPPPQHAGEGNRAAVVMRNVWYLNGEGKLEVIRVQTGSTNGSLTEILSTEDLEGKQVILREKLF

SEQ ID NO: 55321 - DNA, 1215 bp, Unknown
  Obtained from environmental sample
  misc_feature (1)..(1215): n is a, c, g, or t
atgaacctttcccaactcttacaaacctgctttcgttcaatactccgtaaccgtatgcggagcctcctgacatcattgggggtaattatcggcgttggctcggtaatcatcatggttgccatgggcgaaggttcccagcgggcaatcgaaacgaagataaccgctatggggaccaatttgctgcagattaaccaccggcctccgcccccgcatttaaggactccaggtacaagaatatcggctttcaccagagaggatcttgaaaaacttaaggctgaatcgagctttgccattgcgatttccggaattgtccagaacaacaacgccgacgtgattggcggggaaggaagcgtccaggtgaggcttcagggagtggagcctgacttccagataatacggaactggaatgtaaacgcggggtatttttttgatgatgaggatttgttgcttcgcagcactgttgttgtgatgggacgtaccactgcaaagaacctctttggcaacgcggaaaacgctctctctcagcagatacgaatcggcactgtctattttaccgtcatcggcctcctggaaagtaaaggcgcggattttgaagggagggatcaggatgaaatagtcattgtccccatggacaccgcgatgacgcgcctttacaattccccttacctcaacatgattgtgatgagtgtgttcagcagggactatatggatgcggcgcaaaaagaaaccgaaatgctcctccgggaatcccgcagtatacccgacggaataacccccgattttgccattatgaaccaatcgagcatgatcagcatggcttcgaaacctccaggtattgaccggccttttaacngccatcgcgggcatttcgctctncgtgggcggcatgggcatcatgaacatcatgctcgtttccgtacccgagcgtacgcgggagataggcatcaggatggcgtgggggcccgcaagcgggacatcctgttacagttccttaccgaaagcgtgatattgagccttatggggggcgcgctgggaataggcatggcttttgctgcctgccgcatattgtcagcgactgcgattcccacggcgattaacccggcggttgtggccgttgccgccctgttcgccgtttttatcggggtgatattcggctactatccggcattgaaggcggccaagctgtaccccattgaggccctaaggtatgagtga

SEQ ID NO: 55322 - protein, 404 aa, Unknown
  Obtained from environmental sample
  DOMAIN (223)...(397): Predicted permease
  misc_feature (1)..(404): Xaa is any amino acid
MNLSQLLQTCFRSILRNRMRSLLTSLGVIIGVGSVIIMVAMGEGSQRAIETKITAMGTNLLQINHRPPPPHLRTPGTRISAFTREDLEKLKAESSFAIAISGIVQNNNADVIGGEGSVQVRLQGVEPDFQIIRNWNVNAGYFFDDEDLLLRSTVVVMGRTTAKNLFGNAENALSQQIRIGTVYFTVIGLLESKGADFEGRDQDEIVIVPMDTAMTRLYNSPYLNMIVMSVFSRDYMDAAQKETEMLLRESRSIPDGITPDFAIMNQSSMISMASKPPGIDRPFNXHRGHFALRGRHGHHEHHARFRTRAYAGDRHQDGVGARKRDILLQFLTESVILSLMGGALGIGMAFAACRILSATAIPTAINPAVVAVAALFAVFIGVIFGYYPALKAAKLYPIEALRYE

SEQ ID NO: 55323 - DNA, 1086 bp, Unknown
  Obtained from environmental sample
  misc_feature (1)..(1086): n is a, c, g, or t
ttgattatgaaaacgaccgcgaaaaaaatattgctgacaggcggcggtaccgccggacatgttacgccgaacttggcgttaatccccgacctcaaaaaattgggcttcgacattcactacgtcggcacgcgcaagggtatggaacgcgggctgatcgaaaaatccggtttgccgatacgttaccactgcataagcgcgggaaaactgcgccgttatttcgacctcaaaaatttcaccgacgcgttcaggatcgctatcgggttcatccagtcaatcatcctgatgataaagctccgccccgccgtactcttcagcaagggcggtttcgtctcctgccccgtggtttgggcggcgtggctgtgccgcgtgcccgccatagtccacgaatcggacatcacgcccggcctggccaaccgcctctcaatgccgtttgtcaagaagatctgcttcagtttcccggaaacggaatcgcatctgcccgcctccaagcgagtgatgacgggtctgccggttcgctccgagttgttcggcggcgacgcggcgcgcgggttggaactgtgcgggttcgacggcggcgacggcaaaccggttatcgtcgttataggcggaagtttgggtgcaagcgccgtgaacgaggccgtacggggagggctcgacaaaatgctggttgatttcaaggtctgccatatctgcggaaagggcaacatagcgccgggaagccggcccgggtaccgccaattcgagtacgtcggcgcggagctgccggacttgttcgctatggcggacacggtaatatcgcgggccggagccaccacgctgtttgaattattggcgttgcgcaaacccgccctgctgataccgctcggaacggcggcgagccggggggatcagatattgaacgcggagtcgttcgaaaaatcgggttactgcaaggtcttatcgcaagacggattaaccggcgcgattctcgccgagagcgtcaagcggttttttgatgaggataaggacaagtgcgttgacgcgatgagaaaagccgaatcggcgaaagcggcggacaaggttttggaagtcatcgggcggttatga

SEQ ID NO: 55324 - protein, 361 aa, Unknown
  Obtained from environmental sample
  SIGNAL (1)...(26)
  DOMAIN (197)...(355): Glycosyltransferase family 28 C-terminal domain
  misc_feature (1)..(361): Xaa is any amino acid
MIMKTTAKKILLTGGGTAGHVTPNLALIPDLKKLGFDIHYVGTRKGMERGLIEKSGLPIRYHCISAGKLRRYFDLKNFTDAFRIAIGFIQSIILMIKLRPAVLFSKGGFVSCPVVWAAWLCRVPAIVHESDITPGLANRLSMPFVKKICFSFPETESHLPASKRVMTGLPVRSELFGGDAARGLELCGFDGGDGKPVIVVIGGSLGASAVNEAVRGGLDKMLVDFKVCHICGKGNIAPGSRPGYRQFEYVGAELPDLFAMADTVISRAGATTLFELLALRKPALLIPLGTAASRGDQILNAESFEKSGYCKVLSQDGLTGAILAESVKRFFDEDKDKCVDAMRKAESAKAADKVLEVIGRL

SEQ ID NO: 55325 - DNA, 1080 bp, Unknown
  Obtained from environmental sample
  misc_feature (1)..(1080): n is a, c, g, or t
atggctttagcgtcagacggaatgaattacgcgccgaagggaaaaccgaaccctgtcgtacaaaaaggcgaatttgttttttcggcaattgccctggatcacgggcatatttacgggatgtgcaacggactgattgaggcgggcggggtattaaaaagcgtgtacgatcccgatcccgaaaaggtaaacaatttctgtaaaacgtatcccggcgtaaaacgggcggcaagcgaggatgagatattttccgaccctcaggtgctgcttgtggcgggagcggcggtaacgtcggaacgctgcgccctgggtctgaaggtaatgtccgcgggaaaggattactttaccgataaagcgccgcttacaactctggatcaacttgaggcggcaaagacaaaggtacgtgaaaccggtaaaaagtatatggtgtactacagcgagcgcattcatgttgaaagcgccgttattgccggtcagttaatagaggagggggcaatcggcaaggtgattcaagtactcggtcttggtccgcaccggcttggcgcatcatggcggcntgagtggtttttccaaaaagaaaaatacggcggcatcctatgcgacatcggcagtcatcagatagaacaattcctgtactacaccggagcaaaggacgcttcgattgtacgcgcacagatcgcaaattataatcatccgcaatatcccggtcttgacgacttcggcgacgcgacgcttgttgcggacaacggcgcggcaggttacttccgcgttgactggttcactcccgatggtttgcaaatgtggggagacggtcgtctattcattctcggaaccgaaggatttatcgaacagcgcaaatatatgcagcttggcgaaaaaggcagtcacggcggtaatgtgtatctggcgaacaataaagaagagacatactatgatattgagggaaaagtaggtttcccttattttggcgagcttatccttgattgcctgaaccgcacggaaaacgcaatgacgcaggagcacgcttttaaagccgccgagttatgtgtaaaagcgcagatgcaggcggtaaagattgcttag

SEQ ID NO: 55326 - protein, 359 aa, Unknown
  Obtained from environmental sample
  DOMAIN (38)...(144): Oxidoreductase family, NAD-binding Rossmann fold
  misc_feature (1)..(359): Xaa is any amino acid
MALASDGMNYAPKGKPNPVVQKGEFVFSAIALDHGHIYGMCNGLIEAGGVLKSVYDPDPEKVNNFCKTYPGVKRAASEDEIFSDPQVLLVAGAAVTSERCALGLKVMSAGKDYFTDKAPLTTLDQLEAAKTKVRETGKKYMVYYSERIHVESAVIAGQLIEEGAIGKVIQVLGLGPHRLGASWRXEWFFQKEKYGGILCDIGSHQIEQFLYYTGAKDASIVRAQIANYNHPQYPGLDDFGDATLVADNGAAGYFRVDWFTPDGLQMWGDGRLFILGTEGFIEQRKYMQLGEKGSHGGNVYLANNKEETYYDIEGKVGFPYFGELILDCLNRTENAMTQEHAFKAAELCVKAQMQAVKIA

SEQ ID NO: 55327 - DNA, 1539 bp, Unknown
  Obtained from environmental sample
  misc_feature (1)..(1539): n is a, c, g, or t
atggctatatattgccttgtagcggtattattttgcgtctcctgcggtcaaaaaaccgaaaaaagcgggtcaatgaccgaattttcaggctcattcgtggaaaaaggtcggcctgtcgcggatcttacctcttaccgcatagcctattacgagcctgtggagggtgaaaacgcctcagccgccttcaatattcaggaaagcgacgcgccgtttattataacggatttcggcccccgcgatgaattacctcaggaaattaaaaaaccttccatatatgtggttttttcccagcctgtggttccactggcgaaactcggcgagcctattaaaaaaagcgactttttcactattaacccgcctgttgagggtatttatcgctggtacgggtcacggctgctttcttttgaacctgacgcggaaagcatgccccagcggcgttatacagtcaccgtgtccgataagatcaagtcgctgggcgggaaaagcctccagggcgagcgctctttcagttttgagacggagcggctttccgcgctggaatgggagttgggcgacggcgagcgctggatctgggacggtaatgtgcatcccgaagacgcgaaacagatcagggtaattttttcatacccggtcaaccttgaggaaatcgccaaatggatcgaggtgcgagccggggggaaaacctggccctttaagctggaacggtttcccaaaattgacgaaaagcgttaccggaaggagcagggtgttattgtccgcattaacgataaactacccttggataccgacgtagtaatggcgctaaaacagggggcccgttcggaaccgggctggcttggcacaaaagaggagaaaacctggaacttccataccctgctgcccttcaaatacgaaaatgtttccgtgcgcgcttattcaagcccccgaacccaggaaagcgattctattcccatttcacttcaattcagccaggaagtggaacctgacggcgttgaaaaatatttttcggtcgccggctttccggcgttgaaaaaagaaaatatccatgtctacggaagcacggttgtgattaacaacctgccgctggaatacgagaaaaattacacagtgcgaatttcggccgagttaaaggacctgtacggacgcgctctgggcagggcggaaaacgttgaagcggatgtcggcgaggcgaacagctatgtgtatttccgcaactcaggctcgcgtatgctggaatccggttacccccccaaaataatctgggaaacgcagaatcccgtttcaatacgaagccggattaccacggcgcanagtccctacgaaatactccccctgtcaggcctttcaccaatggacatgtcaacgctgccgcanaattcaaaacgttattttatggaagacctttcccccttccttaacgccgcgggcaagggaagcgtcgcgatgcggtgggaataccggaccanatcttcctgggagaaaggaaaaatctataccagcgatgaatggctctcgctccaggttaccatatcggcataa

SEQ ID NO: 55328 - protein, 512 aa, Unknown
  Obtained from environmental sample
  misc_feature (1)..(512): Xaa is any amino acid
MAIYCLVAVLFCVSCGQKTEKSGSMTEFSGSFVEKGRPVADLTSYRIAYYEPVEGENASAAFNIQESDAPFIITDFGPRDELPQEIKKPSIYVVFSQPVVPLAKLGEPIKKSDFFTINPPVEGIYRWYGSRLLSFEPDAESMPQRRYTVTVSDKIKSLGGKSLQGERSFSFETERLSALEWELGDGERWIWDGNVHPEDAKQIRVIFSYPVNLEEIAKWIEVRAGGKTWPFKLERFPKIDEKRYRKEQGVIVRINDKLPLDTDVVMALKQGARSEPGWLGTKEEKTWNFHTLLPFKYENVSVRAYSSPRTQESDSIPISLQFSQEVEPDGVEKYFSVAGFPALKKENIHVYGSTVVINNLPLEYEKNYTVRISAELKDLYGRALGRAENVEADVGEANSYVYFRNSGSRMLESGYPPKIIWETQNPVSIRSRITTAXSPYEILPLSGLSPMDMSTLPXNSKRYFMEDLSPFLNAAGKGSVAMRWEYRTXSSWEKGKIYTSDEWLSLQVTISA

SEQ ID NO: 55329 - DNA, 459 bp, Unknown
  Obtained from environmental sample
  misc_feature (1)..(459): n is a, c, g, or t
atgaaggaactgcccggcatactgttcatcattgatacccgcatggaagccattgccgtcgcggaagcccagcgccaggggatacccattgtcgcggtggtggacaccaactgcaatcccgacgggattgattaccccatccccggcaacgatgacgcgattcgggccatcaccctgttcacctcgattatcgccaacgcggtcatagaagcggataacgaagtcggccttaaaatcattgaaacgctcggcgacgaagatgaggatatggaaagcctgttgaccgacgtgtccaagaaagaagacgatcaggaagttgatattgccgcggcaatagaaaaatattcttccgctgaaaccatgatggaagcccaaaaggatgaaatacccccggaagaaccggagcaggtagaccatattcaggtggatgaagataaaatttacggagaagacgcttga

SEQ ID NO: 55330 - protein, 152 aa, Unknown
  Obtained from environmental sample
  DOMAIN (1)...(72): Ribosomal protein S2
  misc_feature (1)..(152): Xaa is any amino acid
MKELPGILFIIDTRMEAIAVAEAQRQGIPIVAVVDTNCNPDGIDYPIPGNDDAIRAITLFTSIIANAVIEADNEVGLKIIETLGDEDEDMESLLTDVSKKEDDQEVDIAAAIEKYSSAETMMEAQKDEIPPEEPEQVDHIQVDEDKIYGEDA

SEQ ID NO: 55331 - DNA, 522 bp, Unknown
  Obtained from environmental sample
  misc_feature (1)..(522): n is a, c, g, or t
atggctgatattagcgctgcggatgtaaaacggcttcgggaaaaaaccggagcgggaatgatggaatgtaaaaacgccctggtaagcgccgaaggcgactttgcccaggcggaaaaactactgaaagaaaaagggcttgccgccctggaaaaacgctccgatcgggcgaccaacgaaggcaaaatttttgtaaagataaaggacgacggcacaaaggccgttctggtggaactttcctccgagaccgactttgtagcccgcaaccccgactttatcgtcctgggtaataccattgccaacatcgcgctggaaaagggttatgatgcccccaatgacgaaatgtccggcatggtcacggagcttgccccaaaatccgcgagaacatgggactcaagcggctcaaaaccgtcagcgcgggaagcaacgaataccttacccagtatattcacggtgacggcaatatcggcatcgtggtcaaatgcgtcagcgacaagccggagattttcaaagacgaggaaataa

SEQ ID NO: 55332 - protein, 173 aa, Unknown
  Obtained from environmental sample
  DOMAIN (4)...(44): UBA/TS-N domain
  misc_feature (1)..(173): Xaa is any amino acid
MADISAADVKRLREKTGAGMMECKNALVSAEGDFAQAEKLLKEKGLAALEKRSDRATNEGKIFVKIKDDGTKAVLVELSSETDFVARNPDFIVLGNTIANIALEKGYDAPNDEMSGMVTELAPKSARTWDSSGSKPSAREATNTLPSIFTVTAISASWSNASATSRRFSKTRK

SEQ ID NO: 55333 - DNA, 474 bp, Unknown
  Obtained from environmental sample
  misc_feature (1)..(474): n is a, c, g, or t
atgggactcaagcggctcaaaaccgtcagcgcgggaagcaacgaataccttacccagtatattcacggtgacggcaatatcggcatcgtggtcaaatgcgtcagcgacaagccggagattttcaaagacgaggaaataaaatcctttgtcttttcattggcgctgcacatcgccgctttcaatccctacgcgctggacaaaagtaaaattgacgccgcgtacattaccgaacaggaagaaattttccgcaaacagatggaacaggatgaaaaactcaaaggcaagcccgccaatgtgcttgacggcatactcaagggcaaaattaccaaacacctcgcggaaatctgcctgcatgaacagggttatgtaaaagatgaaaaacttaccgttgcccaggctcttgccgagtgtgagaaaaaaatcggggcaaagataagcatcgccgattatgtgtatttcaaagtaggggtttaa

SEQ ID NO: 55334 - protein, 157 aa, Unknown
  Obtained from environmental sample
  DOMAIN (2)...(157): Elongation factor TS
  misc_feature (1)..(157): Xaa is any amino acid
MGLKRLKTVSAGSNEYLTQYIHGDGNIGIVVKCVSDKPEIFKDEEIKSFVFSLALHIAAFNPYALDKSKIDAAYITEQEEIFRKQMEQDEKLKGKPANVLDGILKGKITKHLAEICLHEQGYVKDEKLTVAQALAECEKKIGAKISIADYVYFKVGV

SEQ ID NO: 55335 - DNA, 555 bp, Unknown
  Obtained from environmental sample
  misc_feature (1)..(555): n is a, c, g, or t
atgcaagaggtcatcgactcaaccgaagaaaaaatgaaaaaaacgctggcaaacctgaaagacggatttgcctcactgcgtaccgggcgggcttcggcggcgctgtttgataaaatcagggtggactactacggcgaaaaatcgccgctgaaccaggtggcaaatatttccattcccgaagcccggcttatcgtaattcagccctgggacaaaaaccttatgggcgaaattgaaaaagcgattcgctcttcggaattgtcgctgaacccctccaatgacggaaaagttatccgcatcgccattcctccccttaccgaggaacggcgcaaggaactggtaaaacttgcgaaaaatcaggcggaacagtcccgcgtggcgatacgcaacatacgccgcgacgggaacgacgaaatcaagaaaatgctgaaagactcttccattactgaagacgatgaaagcaaaggctccgccgatttgcagaaactcaccgacagctatatagacaaggtgaaccatgttcttgaagaaaaagaaaaagaaattatggaagtgtaa

SEQ ID NO: 55336 - protein, 184 aa, Unknown
  Obtained from environmental sample
  DOMAIN (18)...(182): Ribosome recycling factor
  misc_feature (1)..(184): Xaa is any amino acid
MQEVIDSTEEKMKKTLANLKDGFASLRTGRASAALFDKIRVDYYGEKSPLNQVANISIPEARLIVIQPWDKNLMGEIEKAIRSSELSLNPSNDGKVIRIAIPPLTEERRKELVKLAKNQAEQSRVAIRNIRRDGNDEIKKMLKDSSITEDDESKGSADLQKLTDSYIDKVNHVLEEKEKEIMEV

SEQ ID NO: 55337 - DNA, 1050 bp, Unknown
  Obtained from environmental sample
  misc_feature (1)..(1050): n is a, c, g, or t
atgagcgaaaacaaacatttaacgcccgtatggattatatatgtagacggaagaaggcttgacgtcgagcacgaaggggcgctgcggagaataaccgttaaagacgtgttaaacgggatatcggaattttccataatattcgacaccgctgaggtaaaagtccgtgaaaaagggctgttttcatttgaaagcgaagtgtcaatacatttgggatacaaggacgacgttgaggaagtgttcaatggcgaagcgctcggctttcacggaatataccctgaaaacggaggcgaacagctggaggtaagaggctacggcgttctgcataaactggagcacgggacacgatacctcagttatgaaaacaaaacgccgtcggaaataataaaaggcatattggaaagttattcgctgaaagccgaagtggacgagataagcgcggcgcacgagtttcagtccgaagagaacatgacggattacgagtatgtggcggaacaggctagaagccacgggaagcagttatacgctgaaggaacgactgtttatgtgaaagatgaaataaccgtacataaagacgaggtaatatacgaatggggcaagagccttaaaagttttgaggcggcgcaggacgttagcgctctgttaagcggcgttgaatacataggctgggattccatgaaaaacgagtcctttacagggagcgcctcgttagacgacatcgctgtaaagataggcggagataaagactggagcgccgtctccaaaggcggaaacgggaaatacgtggaaagacgcgtagacatgaattgcaaagacacggacgaggctaaaaaattgtctgttgggcgactgcaaaacaactcgtacttgttcgggtacgctcacggaaaaggggaagggaactataagcttaaacccggtatgagagttgtcataaaagcggtaggggaagcgtttgagggagaatatatatctgaaatagtgatacaccagtttgaaaaacaaagcggatacagcagtgaattcacgcttaaaaggaatatgtgtccgtaa

SEQ ID NO: 55338 - protein, 349 aa, Unknown
  Obtained from environmental sample
  misc_feature (1)..(349): Xaa is any amino acid
MSENKHLTPVWIIYVDGRRLDVEHEGALRRITVKDVLNGISEFSIIFDTAEVKVREKGLFSFESEVSIHLGYKDDVEEVFNGEALGFHGIYPENGGEQLEVRGYGVLHKLEHGTRYLSYENKTPSEIIKGILESYSLKAEVDEISAAHEFQSEENMTDYEYVAEQARSHGKQLYAEGTTVYVKDEITVHKDEVIYEWGKSLKSFEAAQDVSALLSGVEYIGWDSMKNESFTGSASLDDIAVKIGGDKDWSAVSKGGNGKYVERRVDMNCKDTDEAKKLSVGRLQNNSYLFGYAHGKGEGNYKLKPGMRVVIKAVGEAFEGEYISEIVIHQFEKQSGYSSEFTLKRNMCP

SEQ ID NO: 55339 - DNA, 426 bp, Unknown
  Obtained from environmental sample
  misc_feature (1)..(426): n is a, c, g, or t
ttgatgttagacttggaccgagaaataaacaagttattggaaaaacaccccgatcccagaaaaggcatagacggcagaatagagttcaggaagaggaaagaaactgaagcgggcttaccgaggttcgggactgtggtagacaacaaagacccgcagtgtctgggaagagtaagagtagcgtgcgatacgatagcgcccggagcggtaacgccgtggatacagataatagcgttaggagcgacgaataagacaggctggtggcagttacccgacataggaacgcaggttgtattgggctttgtgggcaaggggcacaacaaccccgtagtgctgggctgtatatacgacttaaacacctgcctcccgagcatacgcccaagaaagaaagcgacagcaaagtatggcagacaaataaacacagattag

SEQ ID NO: 55340 - protein, 141 aa, Unknown
  Obtained from environmental sample
  misc_feature (1)..(141): Xaa is any amino acid
MMLDLDREINKLLEKHPDPRKGIDGRIEFRKRKETEAGLPRFGTVVDNKDPQCLGRVRVACDTIAPGAVTPWIQIIALGATNKTGWWQLPDIGTQVVLGFVGKGHNNPVVLGCIYDLNTCLPSIRPRKKATAKYGRQINTD

SEQ ID NO: 55341 - DNA, 1386 bp, Unknown
  Obtained from environmental sample
  misc_feature (1)..(1386): n is a, c, g, or t
atgctgacgattccccccaaacgcccgattcgcttttttaacacaaccggcccctgtaatccatgggatcactatatgctgccccctgaagaccggcttgtgggggcgcagcttcaccggtatatcagggacaaactctactgggtactccatgccccccgccagacagggaaaacgacatttttacgtaattgggcaagggagataaattccgtgggcggggtcacagcatgttataccagtctggaaacgtgccagggcatttcaggacgggcagaagctatgataaccatgcataaagctatatgtgaatcggcccgggcgtggaatgtgccgattccggaacttcccctgagcaatcctgaattgttgctgtacgaaacaatgagaaggtggtcggaactaacggcgcctaaaccgcttattgtgttattcgatgaggtagatgtacttgaaggcgaaattctgatttcatttttacgccagttacgtaacgggtttgccgaacgcgatgccggaaaattttctgtgtcaatcgcgctggtgggtatgagggacttaaaagattatattacagccgcaaaaggaggttttgctcccaatcctggctcgccttttaatataaaagaagattcggtagtattatccaactttacccaaacggatattgaaaaactatttgcccaacggactgaagaaaccggtcaggctttagatcgggatgcccttgactatgcgtatgagcagtcatgcgggcagccgtggatagtcaattcgctgtttaaacgcgcaacaatgcgggtattgcatgaagatgattacagcaatgtaaaactggagcatatcagggaggcgcgggaacagatggtgcttgccagagagacgcaccttgattcccttgccgtaagaatacaggataaggctattcgtaaagtgatggagagccttataacgggaacacctgacccggagctaaccgcaagcgaaggtttccgtatttgtatggatttggggcttgttaaaaaagaacggggcacaccaacggtagccaatcctttatacaaggaagtgctcgccaggcaattgacctattcgactcaggatgccattcccgaacctgaatggcaatgggaaaagccggacggttcccttgacatagacgcgctgctgaaggagtttcagatattctggcgtaaacattccgagatttgggaaaagaaatccgattataccgaagcttttccacacctgttgctaatggcttttttgcagcgggtactcaacggcggaggcagaattgaacgtgaatacgccgctggccggggaagaatggatcttgcggtcgaatataacaacaaattttatatcatgactcggccgatctga

SEQ ID NO: 55342 - protein, 461 aa, Unknown
  Obtained from environmental sample
  misc_feature (1)..(461): Xaa is any amino acid
MLTIPPKRPIRFFNTTGPCNPWDHYMLPPEDRLVGAQLHRYIRDKLYWVLHAPRQTGKTTFLRNWAREINSVGGVTACYTSLETCQGISGRAEAMITMHKAICESARAWNVPIPELPLSNPELLLYETMRRWSELTAPKPLIVLFDEVDVLEGEILISFLRQLRNGFAERDAGKFSVSIALVGMRDLKDYITAAKGGFAPNPGSPFNIKEDSVVLSNFTQTDIEKLFAQRTEETGQALDRDALDYAYEQSCGQPWIVNSLFKRATMRVLHEDDYSNVKLEHIREAREQMVLARETHLDSLAVRIQDKAIRKVMESLITGTPDPELTASEGFRICMDLGLVKKERGTPTVANPLYKEVLARQLTYSTQDAIPEPEWQWEKPDGSLDIDALLKEFQIFWRKHSEIWEKKSDYTEAFPHLLLMAFLQRVLNGGGRIEREYAAGRGRMDLAVEYNNKFYIMTRPI

SEQ ID NO: 55343 - DNA, 2169 bp, Unknown
  Obtained from environmental sample
  misc_feature (1)..(2169): n is a, c, g, or t
atgtcgttccttctcgttacgaagtctatatttcatatttggaacaagcagaggactaaagtccttaagactcaagtccggggaagcgtgcctatcggcgacattctgattggcatgtgtttatgctacttgtgcggggtttttgatattctgtacaatatatttttcaaagacaacatctctcttttttcatacagtgtatttgtggtttacgtcgggatggtttttatcctgtcccagcggttcagcggaatgtataagcagttggaacaatccaacgtcatgttggagacaacggtaaagaaacgaaccctggaacttgaggagcagacggtaatagcggttcaggcttcccgcgcaaaaagcgaattcctcgcgaccatgagtcacgaaatacgcactcccctgcacgcggtaatcggcctgtctgaaattgaactgcggaacaggctgtctgactccagcagggaaaatataattcagatacaccagtcaggcacttcgcttttagggattatcaacgacattctggacatttccaaaatcgaagccggaagttttgaacttgttccggctgaatacgagaccgcgccgtttatcagcagtacggttaacctcaacatggtacggctcgggtccaaacccattagttttgttttgaaaatcaacgcggattttccggcgaaactgacaggcgatgaattgcgggttaaacaggtgttgaataatctgctttcaaacgcgattaagtataccgatgaagggactataaccctgaacataacatggactgcccacagcgccggaatggtcaggttgatctttaccgtggaagataccgggataggcatacgcgcggaagataagggaaaactgtttaccagctacacgcagcttgataccaaagcaaaccggaaaatcgaaggtacggggctgggtctggcaattacaaaaaacctcgtggaaatgatgggtggcagcatcagcgtggaaagcgaatacggtaaaggctcggtctttactgctgagattatacaaggcgttgaaaacatcgccgtcatgggacagacaagtcagtccctcggagaagaaaccgccgaagccttacgcaattttcgttatattgccacgggacagactaacagtctgtctcctggaggagtaaaaaatattgtcccctcatggatgccccacgttcaagtattggtagtggacgatttaccggcaaacctccttgtagcccgtgggttgcttgctccctacggcatgcaggtagacaccgccgcttccgggcgggaagccatagaattagttaagaaccataactacgatattattttcatggatcacatgatgcccaaaatggatggcgttgaaactacagaagcgataagaaaattaggaatgaggaatgaggaattaggaaagagcgtgaagcagacaccaattattgcacttacggctaacgcattgcgtgggatgaaagaattttatctggaaaaggggtttgatgattatttgtcaaaaccaatcagtccggaagcgttagacgagattatcaataaatatttaagagaacaaaaatncatgaacaatggacaaatttcaagtagtgagagcgcttcctcttcnatgctaattgctcattgctcattgctaactgaaaatgaggcgcagcggcctgatattctgaaccactacctcgtatcctttacaagtgtacctgaaattgactggcagacaaagtttgacacagcgtattttcaaaggtttaccgctctgataaaatcaaccatcaccgcggaaatgcccgccgcgttgagagaacagatggacttgctggtcgaagccggacagaaagaagacacgcgtaaaatacgggaagcccttcccgctttttgtgaggctttacaaaaagcgctggaacagaaacaaaaagcggcagacaatgggcaggacacagaaggtaaactggatgaactcttgccaaggctgaagaacgcgttgcttgtcggggaaaccgaaacagcggaagctgtaatcggcgaattgggggaggcaacccttaatcccatcggacgggaactgtattttcggctctatgctttgatgcttgaaggagacacggaaaaaattatggaagcgatagaggagatacagcatgattag

SEQ ID NO: 55344 - protein, 722 aa, Unknown
  Obtained from environmental sample
  DOMAIN (120)...(185): His Kinase A (phosphoacceptor) domain
  misc_feature (1)..(722): Xaa is any amino acid
MSFLLVTKSIFHIWNKQRTKVLKTQVRGSVPIGDILIGMCLCYLCGVFDILYNIFFKDNISLFSYSVFVVYVGMVFILSQRFSGMYKQLEQSNVMLETTVKKRTLELEEQTVIAVQASRAKSEFLATMSHEIRTPLHAVIGLSEIELRNRLSDSSRENIIQIHQSGTSLLGIINDILDISKIEAGSFELVPAEYETAPFISSTVNLNMVRLGSKPISFVLKINADFPAKLTGDELRVKQVLNNLLSNAIKYTDEGTITLNITWTAHSAGMVRLIFTVEDTGIGIRAEDKGKLFTSYTQLDTKANRKIEGTGLGLAITKNLVEMMGGSISVESEYGKGSVFTAEIIQGVENIAVMGQTSQSLGEETAEALRNFRYIATGQTNSLSPGGVKNIVPSWMPHVQVLVVDDLPANLLVARGLLAPYGMQVDTAASGREAIELVKNHNYDIIFMDHMMPKMDGVETTEAIRKLGMRNEELGKSVKQTPIIALTANALRGMKEFYLEKGFDDYLSKPISPEALDEIINKYLREQKXMNNGQISSSESASSSMLIAHCSLLTENEAQRPDILNHYLVSFTSVPEIDWQTKFDTAYFQRFTALIKSTITAEMPAALREQMDLLVEAGQKEDTRKIREALPAFCEALQKALEQKQKAADNGQDTEGKLDELLPRLKNALLVGETETAEAVIGELGEATLNPIGRELYFRLYALMLEGDTEKIMEAIEEIQHD

SEQ ID NO: 55345 - DNA, 570 bp, Unknown
  Obtained from environmental sample
  misc_feature (1)..(570): n is a, c, g, or t
atgaaatctaataagtacatttttggaattattgtctctatggcaataatttttttaacaatggcaggctgctggagtccggtcgatgtttcgccggagccacaagcgatcgacatagccgctatagagggcgttaccgcgccggtaaccggcggaattccggttacgacaattaccgaaaacgagcagtacagcggaaccgtaacatggagccccgaccactctgtcttcgccgcagcaacccattatacggcgaccataacactgactgcaaaaaccggctacaccctgcagggagtggaggctgatttctttacggttgcagaaacgatatcggtcagtaaccgcgccaactccggagtcgtaaccgccgtattcccgtcaaccggcggaacagaaactgatccggttataattgaagtagccgccatagagggcattaccgctccggaaaccggcggaactccggttaccgttatcgaacacgcgcagtacaccggaactgtaacatgggaacccgaccactcaaccttgagtccaaaaccgaatacacggcgactattaccctga

SEQ ID NO: 55346 - protein, 189 aa, Unknown
  Obtained from environmental sample
  SIGNAL (1)...(22)
  misc_feature (1)..(189): Xaa is any amino acid
MKSNKYIFGIIVSMAIIFLTMAGCWSPVDVSPEPQAIDIAAIEGVTAPVTGGIPVTTITENEQYSGTVTWSPDHSVFAAATHYTATITLTAKTGYTLQGVEADFFTVAETISVSNRANSGVVTAVFPSTGGTETDPVIIEVAAIEGITAPETGGTPVTVIEHAQYTGTVTWEPDHSTLSPKPNTRRLLP

SEQ ID NO: 55347 - DNA, 477 bp, Unknown
  Obtained from environmental sample
  misc_feature (1)..(477): n is a, c, g, or t
atgattaaagttcttattgtggaagaccaaaccatgctgcgtgaattgctggaacaggttatcagcaagcaggatgacatggaagtcactgggacaacagacgatgccgcaaactcgccggagttgtgccgggaattacagccggacctcgtgcttatggatgtggtaacaaaaaacaacgcatcaggcataatctatacagcgcaaatacgcgcggaatttcccaacataaaaatagtaataatgaccggcttttctgaaataacgtttattgacgaagcaagaaaagccggggcgcacagttatgtttacaaaaactcaggctatgagcatttattttatgtaatccgcaatactatgcaagggaacggcatctaccccggtccggaaaaccatttgtccctgacacgcaatttaacgagagagagctgccgtaaatccgcctngtatgcaagggaaaatcaagaacgganatag

SEQ ID NO: 55348 - protein, 158 aa, Unknown
  Obtained from environmental sample
  DOMAIN (2)...(117): Response regulator receiver domain
  misc_feature (1)..(158): Xaa is any amino acid
MIKVLIVEDQTMLRELLEQVISKQDDMEVTGTTDDAANSPELCRELQPDLVLMDVVTKNNASGIIYTAQIRAEFPNIKIVIMTGFSEITFIDEARKAGAHSYVYKNSGYEHLFYVIRNTMQGNGIYPGPENHLSLTRNLTRESCRKSAXYARENQERX

SEQ ID NO: 55349 - DNA, 927 bp, Unknown
  Obtained from environmental sample
  misc_feature (1)..(927): n is a, c, g, or t
ttgcttgctccctacggcatgcaggtagacaccgccgcttccgggcgggaagccatagaattagttaagaaccataactacgatattattttcatggatcacatgatgcccaaaatggatggcgttgaaactacagaagcgataagaaacaatgaacaattagcaattagcaatgaacaattaaaagggagcgtgaagcaaacaccaattattgcacttacggctaacgcattgcgtgggatgaaagaattttatctggaaaaggggtttgatgattatttgtcaaaaccaatcagtccggaagcgttagacgagattataaataaatatttaagagaacaaaaatcaatgaacaatggacaaatttcaagtagtgagagcgcttcctcttcattgctcattgctaattgctcattgctaactgaaattgagacgcagcggcttgatattttgaatcactacctcgcgtcctttacaagcgtacctgaagctgactggcacgcaaagtttgacacagcgtattttgaaagatttaccgcgctgataaaatcactcagtacttcagaaatgcccgccgcattgcgggaacaggcggtcttgctggctgaagccggacggaaagaggacgtgcgtaaaatacgggaagtccttccggccttttgcgacgctttacaaaaatggcaggaacagaaggcagcgggcagcgggcaggatacagaagataaaatactggatgaaattttgccaaggctgaagaaggctttgcttgccggagaaaccgaaacagcggaaactgtaattggcgaattggggaaggcagtcttcacgcccgccggacgtgaactgtattttcggctctatgctttgatgtttgaaggaaacacgaaaaaaataatggaagcgataaaggatatacaacatgattaa

SEQ ID NO: 55350 - protein, 308 aa, Unknown
  Obtained from environmental sample
  DOMAIN (1)...(108): Response regulator receiver domain
  misc_feature (1)..(308): Xaa is any amino acid
MLAPYGMQVDTAASGREAIELVKNHNYDIIFMDHMMPKMDGVETTEAIRNNEQLAISNEQLKGSVKQTPIIALTANALRGMKEFYLEKGFDDYLSKPISPEALDEIINKYLREQKSMNNGQISSSESASSSLLIANCSLLTEIETQRLDILNHYLASFTSVPEADWHAKFDTAYFERFTALIKSLSTSEMPAALREQAVLLAEAGRKEDVRKIREVLPAFCDALQKWQEQKAAGSGQDTEDKILDEILPRLKKALLAGETETAETVIGELGKAVFTPAGRELYFRLYALMFEGNTKKIMEAIKDIQHD

SEQ ID NO: 55351 - DNA, 1149 bp, Unknown
  Obtained from environmental sample
  misc_feature (1)..(1149): n is a, c, g, or t
atggccgccctaaaaagaaccggtttccgtgaagcccttaaaggagagtttactttccgtgcctttatgaacggcaagcttgatctcaccaagtctgaatcggtaatggagcttgttgcggcaaaaacaaaccgtggacgcgaacaggcggtaatgcgtctaagcggagttttgcaacgggaaatatccgccattaaagaaacactggtggaagtactggcagccgctgaaatttttcttgactacagcgaagatgagtttttatcccctgatgaagaaagctcaggcgcactcccaaataaagctcttgctgaaaaggctgtggaaaagctcaagcttctttcggagctttggagccgtgaacggctgtacaccgaaggcgctttggcagttttagcgggcttgccgaatgctggaaaatcaagcctgtttaattatctgattcgcgaggatcgttccattgttaccgatgtacccggcactaccagggactggatcgaagccgtcatttccatcggagatattccgcttcgtttggcggataccgccggcttgcgaaaaacggacaacaacgcgccggactcgaaggcatttgacgaagcggaaagaatcggcgtggaacgtagcatggagttactggaaaaggccgatcttgttctttatgtagttgacggcacaaaaggcttcagcgaagatgacaggggaatttatcaccaagcaaagcgaaatgctaaaagagaagccgcttctcgtctctggaacaaaacagacattgtaaagccccctgctttttcgaatgaaaaaacacaatttcttcctgtcagcgcgaaaaccggcgaaggcattccggagttgttgcgcctaatggccagccttttggaaaaaagccctctatcgtcattttcttcttcaaccgaagatcaattgcttgaagccgcggggccgggcaatataaggcagaaagagcttattgatttggccgtgggcgaaatagaagaagccctggtcatggcccgccagggaaaaagtcttgaccttatcgccccgctaattcgttccgccgttaacgcactgggagaaataacaggcgaagtttcaaacgcggatattttaaaagttatgttcagccgcttttgcgtggggaagtaa

SEQ ID NO: 55352 - protein, 382 aa, Unknown
  Obtained from environmental sample
  DOMAIN (128)...(257): GTPase of unknown function
  misc_feature (1)..(382): Xaa is any amino acid
MAALKRTGFREALKGEFTFRAFMNGKLDLTKSESVMELVAAKTNRGREQAVMRLSGVLQREISAIKETLVEVLAAAEIFLDYSEDEFLSPDEESSGALPNKALAEKAVEKLKLLSELWSRERLYTEGALAVLAGLPNAGKSSLFNYLIREDRSIVTDVPGTTRDWIEAVISIGDIPLRLADTAGLRKTDNNAPDSKAFDEAERIGVERSMELLEKADLVLYVVDGTKGFSEDDRGIYHQAKRNAKREAASRLWNKTDIVKPPAFSNEKTQFLPVSAKTGEGIPELLRLMASLLEKSPLSSFSSSTEDQLLEAAGPGNIRQKELIDLAVGEIEEALVMARQGKSLDLIAPLIRSAVNALGEITGEVSNADILKVMFSRFCVGK

SEQ ID NO: 55353 - DNA, 879 bp, Unknown
  Obtained from environmental sample
  misc_feature (1)..(879): n is a, c, g, or t
atggccccgccgcagacaattacggcaaatcggcggatcaatttaccgccgccgccaatactgcgggggggaaacgcagcctggccgacgatgccatcgaaaaggcgaaacaacgttcggcggaaagcgccgcttttgcgatcaataccggccttgccctggagggaaacaatgaacaaatataaattaatcgggatagtttcactttttattttgggaactgcgccgatttttgcggcagaaggcgatgttcagcattcagattttattgacagccttattaacaataaatatttgctggaaaataacaggcttatcggtcttgccgaaggaagttttgcggaaggcaagtatgacgatgcggtaaaatacgcgcaggaagcggtactgtacgcacaaaagtccgatgaatggatcgctttgcagatcaagattcgggatgtaaatgaagctatcgcggaggcccagaaacgctttaactgggcgacggctaacggcgccgctaaacaatacgcgcaagcatatggggaagccaaaaccgctctggcggatgcgttggttgcccgctcgcgggaagattgggatgcggcggcggaatcggcgcggaaagtaatttccgctttggcgattctgccggacactccggttttcccggcgcggtacctggtaagaaaatggcaaaccgtgaaagactgcttgtggaacattgccgcaaaaccgcagatttacggggacccgtataaatggcgtgttatttacaacgcgaacaaggcaaagctgccccagccggataatccgaaccttatcaaaccggggatgattctggatattcccagtatcaaaggtgaaacaagatcgggtatgatggaagaaaggtag

SEQ ID NO: 55354 - protein, 292 aa, Unknown
  Obtained from environmental sample
  misc_feature (1)..(292): Xaa is any amino acid
MAPPQTITANRRINLPPPPILRGGNAAWPTMPSKRRNNVRRKAPLLRSIPALPWRETMNKYKLIGIVSLFILGTAPIFAAEGDVQHSDFIDSLINNKYLLENNRLIGLAEGSFAEGKYDDAVKYAQEAVLYAQKSDEWIALQIKIRDVNEAIAEAQKRFNWATANGAAKQYAQAYGEAKTALADALVARSREDWDAAAESARKVISALAILPDTPVFPARYLVRKWQTVKDCLWNIAAKPQIYGDPYKWRVIYNANKAKLPQPDNPNLIKPGMILDIPSIKGETRSGMMEER

SEQ ID NO: 55355 - DNA, 1131 bp, Unknown
  Obtained from environmental sample
  misc_feature (1)..(1131): n is a, c, g, or t
atggataataccatcagaatcacagagtattttgcagatgttaagactctcaaagaacacaacggctattttttcagcgtaggggaggcgctgacggtcgtgatactcggttctttgtgcggtttaaaaaacactagccaaatcagccaatgggcagccaacgggcgggttaagagcttcttagctgcgcattttcgcatagaaaagataccgtgttattattggcttttgtgcttactgaagcttattgacccacactcattaaaccaatgcctgaccagatgggcacaatcgcttttgcctgagggaatgaaggcaatgaccatttcattcgatggtaaaaccatatgttccaccgcaaagatggatgcgtacgaaagccctctccatattgtaagcgcgcaccttgcagaactgggaatcacggtggcgggaaagaagatagacagtaaaagcaatgaaataccggctgtccgcgaattgatagacatgcttgaggttgaaggctgcataattgttgccgatgcgatgcattgccaaaaggaaacggcggcacgtattagggaaaagcaggcggattacctttttaacgccaaagacaaccaactcaggctgaaaaaagacatcgaagagtatgtgcaagacgatgatttgagaaaaaacatgggcacattcaggacatacgagaaaaacggcgggaggattgaggtacggaccgggtttgttacccatgagattgactggctttacggtaaagacgaatggaaagacctgaggtgcataggggcgatacaccggcagttcacctacaagggcaagaccacggacgaatggcattactacatatccagcagggaattgacggcggagggcctattaacgcacgcccgtttagaatggtcggtagaatcaatgcattggctnttagatgtccactttagagaggactactgccgaatcgaagacgaaaacgttcagcaggtgttaaatgtggtgcgcaaaattgcgctcaactgtgttaaaacccacaaagcaaagaccaagtcaaaactccctttatccaaaattatgtttaactgcctactggactgcgaaaggctgctccctgttttgttgtcaggggaaaattga

SEQ ID NO: 55356 - protein, 376 aa, Unknown
  Obtained from environmental sample
  DOMAIN (108)...(339): Transposase DDE domain
  misc_feature (1)..(376): Xaa is any amino acid
MDNTIRITEYFADVKTLKEHNGYFFSVGEALTVVILGSLCGLKNTSQISQWAANGRVKSFLAAHFRIEKIPCYYWLLCLLKLIDPHSLNQCLTRWAQSLLPEGMKAMTISFDGKTICSTAKMDAYESPLHIVSAHLAELGITVAGKKIDSKSNEIPAVRELIDMLEVEGCIIVADAMHCQKETAARIREKQADYLFNAKDNQLRLKKDIEEYVQDDDLRKNMGTFRTYEKNGGRIEVRTGFVTHEIDWLYGKDEWKDLRCIGAIHRQFTYKGKTTDEWHYYISSRELTAEGLLTHARLEWSVESMHWLLDVHFREDYCRIEDENVQQVLNVVRKIALNCVKTHKAKTKSKLPLSKIMFNCLLDCERLLPVLLSGEN

SEQ ID NO: 55357 - DNA, 1443 bp, Unknown
  Obtained from environmental sample
  misc_feature (1)..(1443): n is a, c, g, or t
ttgatggaaggggctaaaagctttgactttttccggcagccggattttgtagaagaaccttttctaaaggggtcttatgctgtctacaaaaaagacacgctggtgggcgaaggtacaggcaagctttgccacatacataggccggaggttattgacgcaagggggcggcggtgctggggggaattgtcggttgttggcaatgagttacgcataactatccctgaaaagtggcttgccgaagctaaatacccggtagtggttgatccgacgattgggactactacagtagggagccaagacacattcaggcagaacggcataaatattattttatatatggggggagagataccagtcaaccgttttttggttccacaatcgtttgacggattatgcattgcttctatgtatgtcaacggcaatggccacctgccgacaggcggccacccggttttatattcggataacggcgataagccgcagacaaaaaaatcaattaatgaatatacggctgattttacttttaccaggaacaacccatccccaggctggagacaatctacattttatacttctgaggtaattcaaagcggcttgtatatttggtttggcgtttttgcttacgcttattgggagccccgctatgattatggcggcaaatgctatcacgatggatatagtttctctcttaccagcgcaccaaacacatatccgctttataatgtcaatatctacaatgattatttattatcaatgtactttacatgtactgccgccgcacagaattttgtccgtacactgacacaaggcgtgtcgttaccagataaccggattgtaacaggcaattacaaacgcattactgaacaaacggttaaggcagacgctacgcctacaaaacagctaacaattttcaagggaatacaagacacattaaacagctttgaccttgctaaaaagattctttctcttttcatcaggatacaagatacatcaagcagtcttagccttacaaataaaatgttttcaggctttagaaaaatacaagatacggcagacggttttgatttgacttccaagatgcttacagttttcgcaagcataaaagacacggtaaacaattttgacctaagcaagatttcttttctgcatttcaggcaagtaagggaaaccataaaaacaagcgacacactttcacatttgagagatttaatccgtgggcttgtagacattgcgggtacggaaagcgaagcaaaaaaggcatggtttcattttagaacgataaatgaaacggctatggctataagctccatatctcgtggtttatttttatttgttcgtattgtttcaggtatatttattcgtgatggcttattagggcggttccttaaatcaaaagcagagctgtcgttaaagtcatgtgttacaaggggaaattactcttga

SEQ ID NO: 55358 - protein, 480 aa, Unknown
  Obtained from environmental sample
  misc_feature (1)..(480): Xaa is any amino acid
MMEGAKSFDFFRQPDFVEEPFLKGSYAVYKKDTLVGEGTGKLCHIHRPEVIDARGRRCWGELSVVGNELRITIPEKWLAEAKYPVVVDPTIGTTTVGSQDTFRQNGINIILYMGGEIPVNRFLVPQSFDGLCIASMYVNGNGHLPTGGHPVLYSDNGDKPQTKKSINEYTADFTFTRNNPSPGWRQSTFYTSEVIQSGLYIWFGVFAYAYWEPRYDYGGKCYHDGYSFSLTSAPNTYPLYNVNIYNDYLLSMYFTCTAAAQNFVRTLTQGVSLPDNRIVTGNYKRITEQTVKADATPTKQLTIFKGIQDTLNSFDLAKKILSLFIRIQDTSSSLSLTNKMFSGFRKIQDTADGFDLTSKMLTVFASIKDTVNNFDLSKISFLHFRQVRETIKTSDTLSHLRDLIRGLVDIAGTESEAKKAWFHFRTINETAMAISSISRGLFLFVRIVSGIFIRDGLLGRFLKSKAELSLKSCVTRGNYS

SEQ ID NO: 55359 - DNA, 711 bp, Unknown
  Obtained from environmental sample
  misc_feature (1)..(711): n is a, c, g, or t
gtgaacgtaatgcttgaaataaccggtcttgatacttactacggggaaagccggatcatcagcgggcttaacctgacgataaaaacgggaagcattacctgtttaataggaagaaacggcgttggcaaaaccacgacgcttaaaagcattatgggtctggtaaaaaccccggcgggcaaaataatttttgacaggcaggacataatcaaacttccggcttatgaccgcgtaaggctcggcatcggttatgtgccgcaggggcgggacatttttccgcagatgaccgtgcgtgaaaatcttgaattggggctgcaggccctcgccggaaaacagcggaagaccgatattcccggatatatttttgaactgttccccgccctgccgaatttcgcgaaacggaagggcggcgatttatccggcggccagcagcagcagcttgccatcgcccgcgcgcttgcggcggaaccgaagattcttattttggacgaaccgaccgaggggattcagccctcaattattcaggacataggcagggcgatacgaaggatcaattccgagaaagggataaccgttcttcttgtggaacagtacctggaatttgtgctggagatttcggatcatttattcatcatggaaaagggaaatgtcgtgttaagcggggcgaccgccgaacaggacgcggagcatattcagaaattattgacaatatag

SEQ ID NO: 55360 - protein, 236 aa, Unknown
  Obtained from environmental sample
  DOMAIN (30)...(214): ABC transporter
  misc_feature (1)..(236): Xaa is any amino acid
MNVMLEITGLDTYYGESRIISGLNLTIKTGSITCLIGRNGVGKTTTLKSIMGLVKTPAGKIIFDRQDIIKLPAYDRVRLGIGYVPQGRDIFPQMTVRENLELGLQALAGKQRKTDIPGYIFELFPALPNFAKRKGGDLSGGQQQQLAIARALAAEPKILILDEPTEGIQPSIIQDIGRAIRRINSEKGITVLLVEQYLEFVLEISDHLFIMEKGNVVLSGATAEQDAEHIQKLLTI

SEQ ID NO: 55361 - DNA, 468 bp, Unknown
  Obtained from environmental sample
  misc_feature (1)..(468): n is a, c, g, or t
atgcacctgacaccgagggagcaggaacggctttttatccattccgccggacagctcgcgaaagagcgcaaggggcgcgggctaaagctgaattatcctgaggcgattgcctatattacatcggagcttttggaacttgcccgcgacggccttaccgttaccgagcttatgcgggcgggcaccaaacttttgagcgccgacgacgttatggacggcgtcgccgagatgatacacgaaattcaacttgaggcgactttccccgacggcactaaacttgttacggtacacgagcctgttccctcaaacggaaaggcgcaccccggcgaatttattttggaggtcaacccaatcaccgtaaacgccgggaaagaaaccgtagagattaatgtcgtcaacacggcggaccgtcctgttcagataggctcgcactttcacttttttgaagtgaacaaaagcgctggactttga

SEQ ID NO: 55362 - protein, 155 aa, Unknown
  Obtained from environmental sample
  DOMAIN (106)...(155): Urease beta subunit
  misc_feature (1)..(155): Xaa is any amino acid
MHLTPREQERLFIHSAGQLAKERKGRGLKLNYPEAIAYITSELLELARDGLTVTELMRAGTKLLSADDVMDGVAEMIHEIQLEATFPDGTKLVTVHEPVPSNGKAHPGEFILEVNPITVNAGKETVEINVVNTADRPVQIGSHFHFFEVNKSAGL

SEQ ID NO: 55363 - DNA, 735 bp, Unknown
  Obtained from environmental sample
  misc_feature (1)..(735): n is a, c, g, or t
atggttatggatatgggcaataaaacaaggttaagcgataaatttatccggttttcaatcggagctaaactggtgacgataatcaccatccttgtccttgtttccctgggtaccataacatttttagtttcctacatggtcagtcaggatttggaaatatcagcggaagagaacaattttgaaattaataggcgctcatcggctgaagcggaacatactttggcaaatgtacgggcaaacgcgcaaattttaatcaaagttatgaattccatgggaatgaacagtcggcttttagaacagactgaagagtttttctttgaagaaaataaacaaatagcggctattgtttttcaaacgcccgataatgacgctaaatttcttataaatgaaagttttttttatttaagggatattgattcttcattggttaattcttattacgctaaaaatatcgagtattatcaaaaagcggcattcggggaatcgtcttttttaaacgcatataaacatttttccatgcatttgctggctttgttttttcctctcccaaacgggcaaacatccgaaggacgcgccgtctttatccttttttcacctgaataccttaatgataacctgagttcaggcataaatcagtcttacctgataaataataaacgcgatattttaatacatcctgattttgaaatggtcaggacatccgctaatatttccgcagggatgatgtccgtatga

SEQ ID NO: 55364 - protein, 244 aa, Unknown
  Obtained from environmental sample
  misc_feature (1)..(244): Xaa is any amino acid
MVMDMGNKTRLSDKFIRFSIGAKLVTIITILVLVSLGTITFLVSYMVSQDLEISAEENNFEINRRSSAEAEHTLANVRANAQILIKVMNSMGMNSRLLEQTEEFFFEENKQIAAIVFQTPDNDAKFLINESFFYLRDIDSSLVNSYYAKNIEYYQKAAFGESSFLNAYKHFSMHLLALFFPLPNGQTSEGRAVFILFSPEYLNDNLSSGINQSYLINNKRDILIHPDFEMVRTSANISAGMMSV

SEQ ID NO: 55365 - DNA, 447 bp, Unknown
  Obtained from environmental sample
  misc_feature (1)..(447): n is a, c, g, or t
atgattcgcgaaagcgccatacgcagcaggcaggacctgcacgaaatcgacggggttaaatattttatcgcttttacaaaattaaacattggcgcgtcgattgtggttaccagtattgagtacaaaaaaatatttgaggtaattaacacgaccacccggcgtaatttgctcttaaccgccgccgtcgtatttttatcgatactttttatctggttcttttccaaaactatttcttccgcgttaaaaatactttctaatgccgcgcgaaaaattgagggcggcgattttgagctcgacctaaaaccaagaagccgcgatgaaatangctttctcacgacaagctttcaacggatgagccaggccgttagtatttttgggaagtttaccaaccgcgaaatagccgttaaagccatggcgcgcggaaataaaaccggggggcttgcctaa

SEQ ID NO: 55366 - protein, 148 aa, Unknown
  Obtained from environmental sample
  DOMAIN (55)...(124): HAMP domain
  misc_feature (1)..(148): Xaa is any amino acid
MIRESAIRSRQDLHEIDGVKYFIAFTKLNIGASIVVTSIEYKKIFEVINTTTRRNLLLTAAVVFLSILFIWFFSKTISSALKILSNAARKIEGGDFELDLKPRSRDEIXFLTTSFQRMSQAVSIFGKFTNREIAVKAMARGNKTGGLA

SEQ ID NO: 55367 - DNA, 594 bp, Unknown
  Obtained from environmental sample
  misc_feature (1)..(594): n is a, c, g, or t
atggtcaactgcgtggaaaagacaaacggcgttgtggataaatttataggcgacgcggttatggcgcattgggggacggcgtataccgccggaagtcccgcaaaggacgcttttaacggtgttaaggcggctcttatgatgcgtaaggcgctggttatgttgaataaaaaacgcatacctgatgatcccggagatccgccaatcaaaatcggctgcggtattaattcgggtattgttacggcaggacaacttggatcagagcttcgcatggaatatacggtaataggcgatcccgtaaatctggcgtcaaggattgaagcgttaaataaacccctggggacggacatattaatttccgagagtacgtggaaccttattaaatatttttttattacggaagaaatgccctctgtaatggtaaagggaaaggaaaaacccgtgcggatattcgccgttgtaaaccatgtttcggttacttcaggtcccagaacattggctgaagtaagggaattgctcggtataaagcctcctgatatttcaaaggttgataccaatgccgaagaaaagaaatataaaattggcgctaacgcgtaa

SEQ ID NO: 55368 - protein, 197 aa, Unknown
  Obtained from environmental sample
  DOMAIN (1)...(154): Adenylate and Guanylate cyclase catalytic domain
  misc_feature (1)..(197): Xaa is any amino acid
MVNCVEKTNGVVDKFIGDAVMAHWGTAYTAGSPAKDAFNGVKAALMMRKALVMLNKKRIPDDPGDPPIKIGCGINSGIVTAGQLGSELRMEYTVIGDPVNLASRIEALNKPLGTDILISESTWNLIKYFFITEEMPSVMVKGKEKPVRIFAVVNHVSVTSGPRTLAEVRELLGIKPPDISKVDTNAEEKKYKIGANA

SEQ ID NO: 55369 - DNA, 354 bp, Unknown
  Obtained from environmental sample
  misc_feature (1)..(354): n is a, c, g, or t
atgcagaacaatcgtaccgaacgtctgggcggcctgattcaggaacttatcagcagtcttattcttgaaagcagaatcaaagatccgagaatatcgcagtttgtctcaataacaagggtaaacgtcacgcgtgatctttcatacgccgacgtatatgtctccaacatccgggaaacagcgaaccttgaacgcaacgcgcagggacttcaaagcgccgccggctttatccaggcccagctgggatcggtcttaaaaatacggaaaatcccccatctgcgcttccacgccgacaccagcatccgggatggttttgacatggttcagaagattgaacaattaacaaataataaataa

SEQ ID NO: 55370 - protein, 117 aa, Unknown
  Obtained from environmental sample
  DOMAIN (5)...(110): Ribosome-binding factor A
  misc_feature (1)..(117): Xaa is any amino acid
MQNNRTERLGGLIQELISSLILESRIKDPRISQFVSITRVNVTRDLSYADVYVSNIRETANLERNAQGLQSAAGFIQAQLGSVLKIRKIPHLRFHADTSIRDGFDMVQKIEQLTNNK

SEQ ID NO: 55371 - DNA, 1782 bp, Unknown
  Obtained from environmental sample
  misc_feature (1)..(1782): n is a, c, g, or t
atgatggccgagtctggaaatatttcggtgtcggaactggcgagaaagatgaacctgaaggcgtcggacttaatccagaaactcatgaagcttggcatgatggttacaattaaccagcagatagacgccgataccgcgactatactggccgccgaatttggcgccgacgtaaaaatcatcagcctgtacgacgagaccatcatagacaccggcacggacgaaggcgcggatatgctgcccagaccgccggttgtcaccgttatgggacatgttgatcacggcaaaaccaaactgctggacgcaatccggaaagcggacgtggtgtccggcgagttcggcgggataacccagcacataggcgcgtacatggtagaaaccccgcacggcagaatcaccttccttgacacgcccggtcacgaggcgttcacccgcatgagggcaaggggcgcgcaggtaactgacattgttattcttgttgtcgccgcggatgacggggtcatgccccagaccatcgaggcgattaaccacgcgaaagaagccgaggttccaatcattgtcgctgttaacaagatagacaagccggaggcaaaccccgaccgcgtcaaaagccagctttccgagcttggccttatgcccgaggaatggggcggccagacgatgtttgtcgaactttcggccctgcaaaaaaccggaatagacaaactcattgacgccatactccttgagtcggagcttcttgatctcaaggccaatttccaccggggcgccgagggaaagattcttgaatcgagaatcgatcacgggcgcggcattgttgccaccgttattgtgcaaagagggactatctccgtgggcgattcttttgtcgccggcatatggcccggaaaagtacgcgcgatcttcaatgaccgcggcgacaaactcaaacacgcgtccccctccatgcccgttgaaatccttggttttgagggaatccccaacgccggcgatcccttgcaggctgttgaggacgagaaaatcgcccgcgagtattcgtccaaacgccaggaactgaaacgtttcgaggacgccaagaacttcaagcaggtaaccgccgagaccctgcgcgacaggataagcgacggcaccatacaggaattgaaggtaatcatcaaggctgacgttcagggttcggctgaggcgctcaagagcagccttgaaaaactttccaccaaagaaattcgattgcatgtcatacaggccctgcccggcccgattaacgaaggcgatgtcgatctcgcgattgcgtccaaggccattatcatcggctttaacgtgcggccccttcccaaggctaaaattctggcggagcaggaaaaggtcgacatacgcaaatacaacatcatctacaaggcggttgaggaaatccatcaagcgatggaaggaatgctcaagcccgataccagagaagaagttatcgcttcggtagaggtgaggaataccttcaaagtaccaaaagttggtaccattgccggctgctttgtgcagagcggcgtagtcaagcgcagcgccagcgtcaatgtaatccgcgcggagatagtgatccactcgggcaaaatcgcgtcgctcaggcgcttcaaggacgacgcccgcgaagttgcggccggttacgagtgcggtatagggctggaaggctttgacgacatacaggttggcgatcaatttgaagtgatcgagattgtagaggtcgcaaggaagttaagtccaaacagggagcaaccaccagccgccagtcagggttga

SEQ ID NO: 55372 - protein, 593 aa, Unknown
  Obtained from environmental sample
  DOMAIN (83)...(192): GTPase of unknown function
  misc_feature (1)..(593): Xaa is any amino acid
MMAESGNISVSELARKMNLKASDLIQKLMKLGMMVTINQQIDADTATILAAEFGADVKIISLYDETIIDTGTDEGADMLPRPPVVTVMGHVDHGKTKLLDAIRKADVVSGEFGGITQHIGAYMVETPHGRITFLDTPGHEAFTRMRARGAQVTDIVILVVAADDGVMPQTIEAINHAKEAEVPIIVAVNKIDKPEANPDRVKSQLSELGLMPEEWGGQTMFVELSALQKTGIDKLIDAILLESELLDLKANFHRGAEGKILESRIDHGRGIVATVIVQRGTISVGDSFVAGIWPGKVRAIFNDRGDKLKHASPSMPVEILGFEGIPNAGDPLQAVEDEKIAREYSSKRQELKRFEDAKNFKQVTAETLRDRISDGTIQELKVIIKADVQGSAEALKSSLEKLSTKEIRLHVIQALPGPINEGDVDLAIASKAIIIGFNVRPLPKAKILAEQEKVDIRKYNIIYKAVEEIHQAMEGMLKPDTREEVIASVEVRNTFKVPKVGTIAGCFVQSGVVKRSASVNVIRAEIVIHSGKIASLRRFKDDAREVAAGYECGIGLEGFDDIQVGDQFEVIEIVEVARKLSPNREQPPAASQG

SEQ ID NO: 55373 - DNA, 1632 bp, Unknown
  Obtained from environmental sample
  misc_feature (1)..(1632): n is a, c, g, or t
ttgatcgccaacctgtatgtcgtcaaagccttccagccctataccgcactcgtaaccggccgcaacttcgcgggcgtcgtccttgaagcgcctgagcgacgcgattttgcccgagtggatcactatctccgcgcggattacattgacgctggcgctgcgcttgactacgccgctctgcacaaagcagccggcaatggtaccaacttttggtactttgaaggtattcctcacctctaccgaagcgataacttcttctctggtatcgggcttgagcattccttccatcgcttgatggatttcctcaaccgccttgtagatgatgttgtatttgcgtatgtcgaccttttcctgctccgccagaattttagccttgggaaggggccgcacgttaaagccgatgataatggccttggacgcaatcgcgagatcgacatcgccttcgttaatcgggccgggcagggcctgtatgacatgcaatcgaatttctttggtggaaagtttttcaaggctgctcttgagcgcctcagccgaaccctgaacgtcagccttgatgattaccttcaattcctgtatggtgccgtcgcttatcctgtcgcgcagggtctcggcggttacctgcttgaagttcttggcgtcctcgaaacgtttcagttcctggcgtttggacgaatactcgcgggcgattttctcgtcctcaacagcctgcaagggatcgccggcgttggggattccctcaaaaccaaggatttcaacgggcatggagggggacgcgtgtttgagtttgtcgccgcggtcattgaagatcgcgcgtacttttccgggccatatgccggcgacaaaagaatcgcccacggagatagtccctctttgcacaataacggtggcaacaatgccgcgcccgtgatcgattctcgattcaagaatctttccctcggcgccccggtggaaattggccttgagatcaagaagctccgactcaaggagtatggcgtcaatgagtttgtctattccggttttttgcagggccgaaagttcgacaaacatcgtctggccgccccattcctcgggcataaggccaagctcggaaagctggcttttgacgcggtcggggtttgcctccggcttgtctatcttgttaacagcgacaatgattggaacctcggcttctttcgcgtggttaatcgcctcgatggtctggggcatgaccccgtcatccgcggcgacaacaagaataacaatgtcagttacctgcgcgccccttgccctcatgcgggtgaacgcctcgtgaccgggcgtgtcaaggaaggtgattctgccgtgcggggtttctaccatgtacgcgcctatgtgctgggttatcccgccgaactcgccggacaccacgtccgctttccggattgcgtccagcagtttggttttgccgtgatcaacatgtcccataacggtgacaaccggcggtctgggcagcatatccgcgccttcgtccgtgccggtgtctatgatggtctcgtcgtacaggctgatgatttttacgtcggcgccaaattcggcggccagtatagtcgcggtatcggcgtctatctgctggttaattgtaaccatcatgccaagcttcatgagtttctggattaa

SEQ ID NO: 55374 - protein, 543 aa, Unknown
  Obtained from environmental sample
  misc_feature (1)..(543): Xaa is any amino acid
MIANLYVVKAFQPYTALVTGRNFAGVVLEAPERRDFARVDHYLRADYIDAGAALDYAALHKAAGNGTNFWYFEGIPHLYRSDNFFSGIGLEHSFHRLMDFLNRLVDDVVFAYVDLFLLRQNFSLGKGPHVKADDNGLGRNREIDIAFVNRAGQGLYDMQSNFFGGKFFKAALERLSRTLNVSLDDYLQFLYGAVAYPVAQGLGGYLLEVLGVLETFQFLAFGRILAGDFLVLNSLQGIAGVGDSLKTKDFNGHGGGRVFEFVAAVIEDRAYFSGPYAGDKRIAHGDSPSLHNNGGNNAAPVIDSRFKNLSLGAPVEIGLEIKKLRLKEYGVNEFVYSGFLQGRKFDKHRLAAPFLGHKAKLGKLAFDAVGVCLRLVYLVNSDNDWNLGFFRVVNRLDGLGHDPVIRGDNKNNNVSYLRAPCPHAGERLVTGRVKEGDSAVRGFYHVRAYVLGYPAELAGHHVRFPDCVQQFGFAVINMSHNGDNRRSGQHIRAFVRAGVYDGLVVQADDFYVGAKFGGQYSRGIGVYLLVNCNHHAKLHEFLD

SEQ ID NO: 55375 - DNA, 339 bp, Unknown
  Obtained from environmental sample
  misc_feature (1)..(339): n is a, c, g, or t
ttggccttgagatcaagaagctccgactcaaggagtatggcgtcaatgagtttgtctattccggttttttgcagggccgaaagttcgacaaacatcgtctggccgccccattcctcgggcataaggccaagctcggaaagctggcttttgacgcggtcggggtttgcctccggcttgtctatcttgttaacagcgacaatgattggaacctcggcttctttcgcgtggttaatcgcctcgatggtctggggcatgaccccgtcatccgcggcgacaacaagaataacaatgtcagttacctgcgcgccccttgccctcatgcgggtgaacgcctcgtga

SEQ ID NO: 55376 - protein, 112 aa, Unknown
  Obtained from environmental sample
  SIGNAL (1)...(26)
  misc_feature (1)..(112): Xaa is any amino acid
MALRSRSSDSRSMASMSLSIPVFCRAESSTNIVWPPHSSGIRPSSESWLLTRSGFASGLSILLTATMIGTSASFAWLIASMVWGMTPSSAATTRITMSVTCAPLALMRVNAS

SEQ ID NO: 55377 - DNA, 1668 bp, Unknown
  Obtained from environmental sample
  misc_feature (1)..(1668): n is a, c, g, or t
gtgggcgggaagaaagtattgatgactacaatcagcgttccgatacgggctaacggcagggttgtaggggttgcgggctttgaccttccgctttcgggtattcaaaaaatttcgcagaccaataaacctttccccgattgcgtaaccgcagtattcagtaacgacgctacggttaccgcccactttgacgaaagccgtatcgggaaaaatgcgaaagataccgacgcggacatgaatggtccgtatcataatgattttttgaacgcggttaaaacaggcaagccttttacttttagcaggtatatcccggcattaaagacggacatgagaatattcctcattcccattactatcggctctacgaaaacccccttaagctatgcgatagccattatgcgcaatacgataatggcaccggtctatgtaatgcttgagataacattggcgattagcggagtggtattggcgctgataattttggcggcgttatacctttcccgtaccatcagcagaccaatcgtcaaggtggcaaataacctcaaggatattgccgaaggtgaaggcgatttaacccataccattccggtacattccaaagacgaggtgggcgctcttgccctgtatttcaacaagacgctggagaaaatcaaaaaccttgtcgtaaatgtaaaaaaagaagccgctacgctgtcggaaatcggcaataatctcgcgtcaaacatgaatgaaaccgcatcggcggtcaaccaaattaccgctaatatacagagtatcaaaggccgcgtcattaaccagagcgccagcgttactgaaacccacgcgaccatggaacagattgtcaccaacattaataaactcaatgagcatgtggaagatcaggctgacacaataacaaaacggtccgccttcattcaggcaatggtagacaatatcgattcggtaaaccagactctgcataaaaatctggaaaatgtgcaaaatctgaaagatgcctccgaaataggacgcggcggattgcaggaagtagccgccgacattcaggaaatcgcccgcgagtccgaagggcttttggaaattaactcggtaatggaaaacatcgccagccagaccaatcttctttcaatgaacgccgcgattgaggcggcgcacgcgggagaagcgggcaaagggtttgccgttgtcgccgatgagattcgcaaactggccgaaagttccggcgagcagtccaagaccatcggcgatgttttgaaaaaaataaaaagttcgatggacaagataacccaatccactaacaatgtaatagccagattcgaggcgattgactcaggcattaaaacggtggcggaacaggaagagattatccgtcaggcgatggatgagcagggcgagggtagcaaacagcttcttcagggaaccagcaatttgaatggaattacccagcaggtaaaggccggttccgaggaaatgcttgtcggcagccaggaagtaatgaaagaaagccataaccttgaaaaagtaacgcaggaaataaccggtggcatgaacgaaatggcatccggggcagaacagatgaacatcgcagtacacaacgtaaatgatataagcggcaagaacagtgacgccattaacacgctgatgaaggaagtttcacgcttcaaagtggagtaa

SEQ ID NO: 55378 - protein, 555 aa, Unknown
  Obtained from environmental sample
  DOMAIN (4)...(74): Cache domain
  misc_feature (1)..(555): Xaa is any amino acid
MGGKKVLMTTISVPIRANGRVVGVAGFDLPLSGIQKISQTNKPFPDCVTAVFSNDATVTAHFDESRIGKNAKDTDADMNGPYHNDFLNAVKTGKPFTFSRYIPALKTDMRIFLIPITIGSTKTPLSYAIAIMRNTIMAPVYVMLEITLAISGVVLALIILAALYLSRTISRPIVKVANNLKDIAEGEGDLTHTIPVHSKDEVGALALYFNKTLEKIKNLVVNVKKEAATLSEIGNNLASNMNETASAVNQITANIQSIKGRVINQSASVTETHATMEQIVTNINKLNEHVEDQADTITKRSAFIQAMVDNIDSVNQTLHKNLENVQNLKDASEIGRGGLQEVAADIQEIARESEGLLEINSVMENIASQTNLLSMNAAIEAAHAGEAGKGFAVVADEIRKLAESSGEQSKTIGDVLKKIKSSMDKITQSTNNVIARFEAIDSGIKTVAEQEEIIRQAMDEQGEGSKQLLQGTSNLNGITQQVKAGSEEMLVGSQEVMKESHNLEKVTQEITGGMNEMASGAEQMNIAVHNVNDISGKNSDAINTLMKEVSRFKVE

SEQ ID NO: 55379 - DNA, 429 bp, Unknown
  Obtained from environmental sample
  misc_feature (1)..(429): n is a, c, g, or t
atgattaaaaatgttaagtttttattttttaattatggtatattctatataattttcattgtaaaggaaaatattatggtacaattatttactgaaaggcttttaattagagatcatactttagatgatttatataattatcatgaattattatccgatacccaatcaatgagatatttaacatttctgaaaacatctaatttagaagaatcaaaacaaagcctacaaaaagctatagatgaagcaaattccgatgataggaaacattattttttctgggttgaaaataaaataacaaaagaatatattggagaagttggatataatgtaatattaagtactccttttggtaaaatagcgactataggatattacataaaagaaaattgttggaataatgggtatgcaacagaagcgacaaaaaaataa

SEQ ID NO: 55380 - protein, 142 aa, Unknown
  Obtained from environmental sample
  misc_feature (1)..(142): Xaa is any amino acid
MIKNVKFLFFNYGIFYIIFIVKENIMVQLFTERLLIRDHTLDDLYNYHELLSDTQSMRYLTFLKTSNLEESKQSLQKAIDEANSDDRKHYFFWVENKITKEYIGEVGYNVILSTPFGKIATIGYYIKENCWNNGYATEATKK

SEQ ID NO: 55381 - DNA, 432 bp, Unknown
  Obtained from environmental sample
  misc_feature (1)..(432): n is a, c, g, or t
atgaagatacttgtgatcaacgggccgaacatcaatctgctcggtcatcgggagccggatatttacggtattaaaagttatacgtcattgctggaattcatacgggatgtagccgcgcagcataacgtggaagtagagtgtatgcagacgaaccacgagggggcgatcgtagacacaatccaggccgcttacggccgctttgacgccatcgtgatcaatccggcggcatatacgcacacaagcgtcgccattcttgacgcgctaaaggcggtcgcgcttccggcggtagaggtgcatttatcgaacgtccatgaacgcgaggctttccgtaaaatatcctatgtggcgcaggcctgcgagaggacattctccggcatgggatttgaaggatacgcgctggcgatacgttatctcgcggggaaggaagaataa

SEQ ID NO: 55382 - protein, 143 aa, Unknown
  Obtained from environmental sample
  DOMAIN (1)...(143): Dehydroquinase class II
  misc_feature (1)..(143): Xaa is any amino acid
MKILVINGPNINLLGHREPDIYGIKSYTSLLEFIRDVAAQHNVEVECMQTNHEGAIVDTIQAAYGRFDAIVINPAAYTHTSVAILDALKAVALPAVEVHLSNVHEREAFRKISYVAQACERTFSGMGFEGYALAIRYLAGKEE

SEQ ID NO: 55383 - DNA, 1227 bp, Unknown
  Obtained from environmental sample
  misc_feature (1)..(1227): n is a, c, g, or t
atgaaaaaaacattcggtttgttaggcgaaaaattgggacacagcttctcaccgctaatacacggatacctcggcgaatatgattattctctgtatgaggtatccgcagatgatcttgattcgttcatgactgacagacatttcgacgggattaacgtaaccatcccttacaaacaacaggtaatgccttactgcgtcaccctttcccatgaggcgcggacaatcggcagcgtgaacacgatcataaagaatgaaagcggggcgctgcacgggcacaacacggattatcacgggtttaacgtaatgcttgaacatggcggaatagatccgaaggggaaaaagacgttagtgttaggcgacggcggatccgcgcggacagtgagggcggcgctggacgggctgggcgcgcgcgagattgtaacgatctcccgccggggggagaatcactacggcaacatcgctctgcattatgacgcggatgtcatcgtaaacaccacgcccgtcggcatgtatcctgacaatggcaatagccccttaagccttgccgggtttaagcaattaacgggcgtggccgatttgatctacaatcccacgcggaccaaactgctgcttgaagccgcggggcttggtattccttgcgtaaacggcctcgcgatgcttgttgcccaggcggaagcggcatcccgcttgtttatgaacggacccgccaggcctgaattagtgaataaaattcacgacgttattctcaaaagaacgcgaaacatcgcccttatcggcatgcccggctgcgggaaaagcactgtcggtcgtatcctcgcccaaaagatggggcggccctttattgatattgacgcgcggattgagacggccgccggaaaaagaatccccaaaattttctccgaagacggagaagaaatattcagacggctggaaacgcgcgtacttgccggggaagccaaaaatagaggcatggtactggcgacgggcggaggcgtggtaacaagacctgaaaatctcgatttgctgaagcaaaacagtttaattgtttatttaaaacgcgaattaaccgatcttattacagagggcaggccgctttcacagaacatggggattcaagcccttgccgaaaagcggctgcctttatatgaggcgtggggtgatctcgccgttcaggtggaggcgaaacctgagcaaacggcggcaaagatacaggaggtggtacaatga

SEQ ID NO: 55384 - protein, 408 aa, Unknown
  Obtained from environmental sample
  DOMAIN (99)...(203): Shikimate / quinate 5-dehydrogenase
  misc_feature (1)..(408): Xaa is any amino acid
MKKTFGLLGEKLGHSFSPLIHGYLGEYDYSLYEVSADDLDSFMTDRHFDGINVTIPYKQQVMPYCVTLSHEARTIGSVNTIIKNESGALHGHNTDYHGFNVMLEHGGIDPKGKKTLVLGDGGSARTVRAALDGLGAREIVTISRRGENHYGNIALHYDADVIVNTTPVGMYPDNGNSPLSLAGFKQLTGVADLIYNPTRTKLLLEAAGLGIPCVNGLAMLVAQAEAASRLFMNGPARPELVNKIHDVILKRTRNIALIGMPGCGKSTVGRILAQKMGRPFIDIDARIETAAGKRIPKIFSEDGEEIFRRLETRVLAGEAKNRGMVLATGGGVVTRPENLDLLKQNSLIVYLKRELTDLITEGRPLSQNMGIQALAEKRLPLYEAWGDLAVQVEAKPEQTAAKIQEVVQ

SEQ ID NO: 55385 - DNA, 573 bp, Unknown
  Obtained from environmental sample
  misc_feature (1)..(573): n is a, c, g, or t
ttgatccaacctgctgtcgaaggcgggcgtaaaaaagaaaacatccgcgaaattttctcgcatgagcaggcaattcaacaatgcgccggatacctgaagggacttggcaagaatgtgaaagtcaccaccgtcaccaataccgccgaagcggcgaaaatggttgcggaatccgaccgaaacgacattgcggctcttgcctctcattcgtgctgcgatctgtacgccctgaaatgcctggaaagctcggtacaggacaggggcaataactatacgcggttcatttgcatctccaaaaatctggaaatataccccggggccgaccgtaccagtattatgcttactacatcacacaaacccggttcgctttacaaggttcttggccttatatacgcccttggcgttaacgtcgtaaagctggaaagccgcccgattcccgaccgcgattttgaattcatgttctatttcgatcttgaaacatcggtatattcaaaaaaattcagccagcttatgtgcgagcttgaaaatttatgcgaggaatttcactatctcggaagttacacagagattgtttga

SEQ ID NO: 55386 - protein, 190 aa, Unknown
  Obtained from environmental sample
  DOMAIN (1)...(101): Prephenate dehydratase
  misc_feature (1)..(190): Xaa is any amino acid
MIQPAVEGGRKKENIREIFSHEQAIQQCAGYLKGLGKNVKVTTVTNTAEAAKMVAESDRNDIAALASHSCCDLYALKCLESSVQDRGNNYTRFICISKNLEIYPGADRTSIMLTTSHKPGSLYKVLGLIYALGVNVVKLESRPIPDRDFEFMFYFDLETSVYSKKFSQLMCELENLCEEFHYLGSYTEIV

SEQ ID NO: 55387 - DNA, 861 bp, Unknown
  Obtained from environmental sample
  misc_feature (1)..(861): n is a, c, g, or t
atgtacgatgatataatagccgaggattttctccccgtgatttacagtcccgtttccctgaccacgaaaaaccagaagttgcagcccgtgatttcgatcgtgcaaaaagccatgcacaactcctccctgggctatttagccggcctttacaggcagggggaaaccgaacaccgccggcacaaactgtttatgcgcctgaccgaagaggaaaaagcgtatatacgcgaacacccggtaatatcgtttgccgccgaatacgataattatccggtcagcttttacaacaaatatgaaaagcaatggcagggaatcgcccatgacatattgaaagagctggaggcgcttacttttttaagttttaatataaccaatgaaaaaaatacggaatggtccgatcttttactctcgctggaaagcggggaagcgtccatgataagcgagcttttatattcggaagatcgcgatggggcattcctgctgcccaagtccgtgattatgacggaccattacacgcttatttccaaatctgactaccccgacatcaatatcaacgacatcttacgcatcaatgtgggtttgattaaaaataccgcctatgcttcgttatttcaaaactgctttccggatcatgaaaacacgacgatctatgagaatacctacgccgcctttaaggctttggaaagcggcgaaaatcatatggtaatggcgaatttaagccagcttctcatggtgaccaattactatgagcgcacgggctacaaggcaaatttcgtgtttattttgcttccgaatccacctttggttttaccggaacgagacgattctgtgctccattgtggacaaggcgctccgctttattga

SEQ ID NO: 55388 - protein, 286 aa, Unknown
  Obtained from environmental sample
  DOMAIN (80)...(281): Bacterial extracellular solute-binding proteins, family 3
  misc_feature (1)..(286): Xaa is any amino acid
MYDDIIAEDFLPVIYSPVSLTTKNQKLQPVISIVQKAMHNSSLGYLAGLYRQGETEHRRHKLFMRLTEEEKAYIREHPVISFAAEYDNYPVSFYNKYEKQWQGIAHDILKELEALTFLSFNITNEKNTEWSDLLLSLESGEASMISELLYSEDRDGAFLLPKSVIMTDHYTLISKSDYPDININDILRINVGLIKNTAYASLFQNCFPDHENTTIYENTYAAFKALESGENHMVMANLSQLLMVTNYYERTGYKANFVFILLPNPPLVLPERDDSVLHCGQGAPLY

SEQ ID NO: 55389 - DNA, 1158 bp, Unknown
  Obtained from environmental sample
  misc_feature (1)..(1158): n is a, c, g, or t
ttggaaactagtgccaaaatggaaattacggaaaaacctggcaatacctcaaacaccgcaggacaaaccccgtcggggttagccccatcggagcaagtcccgtcgggacaagccccgtcgggacaagtcccgttagaattattaaataccgctcgtaatgaaatggccaagcgcattgtaggtcaaaaagaaatgatcgatggccttcttacagcccttatcgccggcgggcatatactgcttgagggagttcccggccttgcaaaaaccagggctgttaagactctggcggaaattaccggattggtttttaagcgcattcagtttaccccggacttgctgccggctgaccttaccgggacgctggtgtgggaacaggcgacctcttcgttttcggtgcgccgggggccggtattcgcaaacgtaatcctcgctgacgaaattaaccgtgcgcctgcaaaagttcagtccgctcttcttgaagccatggaagaacagcaggtaacgataggggaaaagtcctattcgctgccatcgccgttttttgtcctggcaactcaaaaccctattgagcatgaggggacatatgcccttcctgaagcggagctggatcgctttttgttgaagctgctggtgccttaccctgaccctgaggaagaactgcatattctggactttgcggttccctttggcaaaaaggaagcagccaaaaaaagcggtaaaaacagtgctgatggcgtaaccgatgttacgctggctcccgtattgggtccgggagcgctggaaattctacgaaaggcagccgattcgatttttacagatgagcaaattttaaggtatatagtttcagttgtggcggcatcaaggccagccgcttcccgttccaccgctgatggggtgaggtccggcaggcagagggaagggctttatcgttacattgcctttggcgcttcgcccagggcctccctcgccctttaccgctgttccagaatcagggccttttttgagggtcgttcttttgttacccccgaagatgtaaaagctgcggcttttccggttntgaggcacaggctggttctttcctacgaggccgaagctgacggtcttgattcggatacggtgatttcacggattctgaccctggttcccatgccttag

SEQ ID NO: 55390 - protein, 385 aa, Unknown
  Obtained from environmental sample
  DOMAIN (78)...(214): ATPase family associated with various cellular activities (AAA)
  misc_feature (1)..(385): Xaa is any amino acid
METSAKMEITEKPGNTSNTAGQTPSGLAPSEQVPSGQAPSGQVPLELLNTARNEMAKRIVGQKEMIDGLLTALIAGGHILLEGVPGLAKTRAVKTLAEITGLVFKRIQFTPDLLPADLTGTLVWEQATSSFSVRRGPVFANVILADEINRAPAKVQSALLEAMEEQQVTIGEKSYSLPSPFFVLATQNPIEHEGTYALPEAELDRFLLKLLVPYPDPEEELHILDFAVPFGKKEAAKKSGKNSADGVTDVTLAPVLGPGALEILRKAADSIFTDEQILRYIVSVVAASRPAASRSTADGVRSGRQREGLYRYIAFGASPRASLALYRCSRIRAFFEGRSFVTPEDVKAAAFPVXRHRLVLSYEAEADGLDSDTVISRILTLVPMP

SEQ ID NO: 55391 - DNA, 1344 bp, Unknown
  Obtained from environmental sample
  misc_feature (1)..(1344): n is a, c, g, or t
atgaacaaacccgatttcaaaaacggcgaggagatcgaattgatgataaaagcgccgtacgcgggagcggggcttatcaccattgaacgcgacaaaatttacgcgcaccgctggttcaggagcagcggggaaacttccatgcagactatcaccgttccggctgaacttgaggggaacgcctatgtgaacgttcactatttaagatcgcaggattcgcctgaaatctttatgtctcctttatgttatggggtggttccgttttccatcagccgcgagaaccgtaccaaccggatcaaattggacattcccggcgaggcaaaaccgggagaagattttgttataaaatactccaccgcccgtcggggaaagataattgtttacgcggtggacgagggcatacttcagcttgcgggatatcaaacccccaatccgctggcgttctttttcaggaaaaaagcgcttgaagtgaagactgcccaaatactcgacatggtgctgccgcgttattccgttgttcaaagtcttgcggcaatgggcggcggcggcggttttgacgatgagtatctttcgcgtaaccttaatccgtttaagcgcaagcagaatgttcccgtggcttattggtcggggattgttgattcaggaccggaagcaaaagaactgcgttaccgtgtgccgggttattttaacggaacattaagggtcatggctattgccgtaagcgacagcgcgataggcgcgggcgaagaccgttctttgattcgcagtacgtttataatttcgcctaacgcaccgatgatggcggctccgggggatgagtttaatatttcgctgacggtaaccaacaaccagaaaggcgcgggagaaaaaggcaaggtgagccttaaagcgattccttcggaacatcttgccatttcggggaacagcgaatttaacctggacattccggaaggcaaggatcaaaccctgaacattccggttaaggcggcgggcccgcttggggcggcgcagatacgttttgccgcttccaataacggcgaaacatcggaactttccgcttatatgagcgttcgtcccgccgtgccgtaccgtgtatcgctttattcgggaacgataaaaaacaaaagcgccgaaacttcaattgaccgcaatctttacgaggaatttcacaccagagaagtttcgctttcttaccttcctatgggaatggcaaaggggctttcgttcttccttaataatttcccctacggctgttcggagcaaattaccagcgccgttttccccttcctgtacccgcagcttttcaaggaactcaaatatcaaaggcgcaggcctcggccaatctga

SEQ ID NO: 55392 - protein, 447 aa, Unknown
  Obtained from environmental sample
  DOMAIN (1)...(139): Alpha-2-macroglobulin family N-terminal region
  misc_feature (1)..(447): Xaa is any amino acid
MNKPDFKNGEEIELMIKAPYAGAGLITIERDKIYAHRWFRSSGETSMQTITVPAELEGNAYVNVHYLRSQDSPEIFMSPLCYGVVPFSISRENRTNRIKLDIPGEAKPGEDFVIKYSTARRGKIIVYAVDEGILQLAGYQTPNPLAFFFRKKALEVKTAQILDMVLPRYSVVQSLAAMGGGGGFDDEYLSRNLNPFKRKQNVPVAYWSGIVDSGPEAKELRYRVPGYFNGTLRVMAIAVSDSAIGAGEDRSLIRSTFIISPNAPMMAAPGDEFNISLTVTNNQKGAGEKGKVSLKAIPSEHLAISGNSEFNLDIPEGKDQTLNIPVKAAGPLGAAQIRFAASNNGETSELSAYMSVRPAVPYRVSLYSGTIKNKSAETSIDRNLYEEFHTREVSLSYLPMGMAKGLSFFLNNFPYGCSEQITSAVFPFLYPQLFKELKYQRRRPRPI

SEQ ID NO: 55393 - DNA, 2403 bp, Unknown
  Obtained from environmental sample
  misc_feature (1)..(2403): n is a, c, g, or t
ttgccctggaagaatgaagacaaacaagatttttacgcctatttaacatttttccggagactgcggcggaaatgggttttgttcattgatataaatgatgacaattacaaataccgccttgtgacgctcatcgccgctgttttgctgacgggcttcgccatagccctggggctgtctttgctgggagccgtattcgggataaaaatctttaacccatttttaggttcgttctttgcccatgcttacggcatcctcgctttctttattccgttttatctttgctacgccgctactgttctggccgatccccactggcagccggatcgcgttttctttctggccgcgtcgcctttcccctttcttacgctcggggcaggctacatcataatccgcgattttgaagctctctcacgggattacgcttttctggattttaccggaaaaacgggatttggcgtaatcgtcgtcgtaatgacttttctggaagtggtcgcctcacagatgttaaaaaacgccctgttccccaaggtaattattgatgggaagaaaaagagaatctggcggagcaaaaaagaagctcttttgttgtcgccgcctgaacccaaacctgaacttaaacccgaacttaaacctcagctaaaatctgaacctgctgaacctgaagaagaaatatacggcgtttatgtcaaagatactgacacgatagaaattgaactgcctccgatgaggcccttgcacagcccgcttgcccttgaatatctggacgaggcgaacagggaagccgcaaaaaggcacagggaaacaaccgtcggcggttatgggaacaaactcgccggcagcatggaacgcgccattgaagaagcggaagtgatagccgcgatccacagcgaacagcttcgtaagaagtcaaccgacaaggctgcaagccatactgcgcccggccatacggcgcgcgcaagcaaaaaaaaatacagcatcccgctggaaatcctgagcgagtatccggacggcgaatactggatcatagatcaggcgacgcgcgacgcggcaaataccctcaaggaaacccttgaggaatttaaaattcaggctgaggttaccggaataaaaaaaggcccggtaataacgatgtttgaactgctccccgcgccgggcgtcaagctctcccggattgtcaacttgcaggacaatatcgccttgcgcctcgccgccgcgtccgtgcgtattgtcgcgcctattcccgggaagcacgccgtgggcattgaggtgcccaacgcgaagcggcacattgtttcgttcagagaaattattgagggcgaattgcagcgggagggcaaacgcccggagattccggtggttatggggaaggacgtttcaggcgataaggctttgtctattgatctgacgcagatgccccatctgttgattgccggggcgacaggctcgggaaaatcggtctgcgtcaactcgctgatcctctcgatactgtaccaactgcccccttcggaatgccgcctaatactcatcgatcccaagattgtggaactaaaactctacaatgatatcgcccatttgctcactcctgttattaccgaaccaaaaaaagcgtttcaggctttgcagtactgcatctatgaaatggagcggcgttatgcctgcctcgattcaatgggggtgcgcgacatacgcaattacaacaaacgcattaaggaaagaaatatcgcccaggagcacatgccctatatcgtggtaatcattgacgagtttgccgaccttatggcgaccaccggcaaggagcttgagtcaactctggcacgccttgccgcgatgagccgtgcggtgggcatccatctggttctggcgacgcagcgcccctcaatagacgttatcaccggccttatcaaagccaatatccccagccgcatcgccttcatggtcgccagcaagatggacagccgcatcatcattgacgcggtgggcgcggaaaaactcctgggtaagggcgatatgttgtacgccggaattacagaccccttcccgatccgtatgcaaggggcatttgtatccgaagaagaagtcgaggcggtggtctcccacgttaagacattcggcgaacctgattatatcgacgatgaaatcttttttgatgaagaagaggaagaagccgagccgtctcttttctccggaggcgacgatcccctgtatgagaaagccctggagatcgtcatgcagcaggggaaggccagcgccagttacatacagcgccgcctgaaaatcggttacaaccgcgcagcccgcctggtggaagaaatggaacacaggggtgttgtcggcccggcgcagggatcaaagccgagggaactgctgcggggaggtaaacgccgaggtcagtactctccataa

SEQ ID NO: 55394 - protein, 800 aa, Unknown
  Obtained from environmental sample
  DOMAIN (432)...(627): FtsK/SpoIIIE family
  misc_feature (1)..(800): Xaa is any amino acid
MPWKNEDKQDFYAYLTFFRRLRRKWVLFIDINDDNYKYRLVTLIAAVLLTGFAIALGLSLLGAVFGIKIFNPFLGSFFAHAYGILAFFIPFYLCYAATVLADPHWQPDRVFFLAASPFPFLTLGAGYIIIRDFEALSRDYAFLDFTGKTGFGVIVVVMTFLEVVASQMLKNALFPKVIIDGKKKRIWRSKKEALLLSPPEPKPELKPELKPQLKSEPAEPEEEIYGVYVKDTDTIEIELPPMRPLHSPLALEYLDEANREAAKRHRETTVGGYGNKLAGSMERAIEEAEVIAAIHSEQLRKKSTDKAASHTAPGHTARASKKKYSIPLEILSEYPDGEYWIIDQATRDAANTLKETLEEFKIQAEVTGIKKGPVITMFELLPAPGVKLSRIVNLQDNIALRLAAASVRIVAPIPGKHAVGIEVPNAKRHIVSFREIIEGELQREGKRPEIPVVMGKDVSGDKALSIDLTQMPHLLIAGATGSGKSVCVNSLILSILYQLPPSECRLILIDPKIVELKLYNDIAHLLTPVITEPKKAFQALQYCIYEMERRYACLDSMGVRDIRNYNKRIKERNIAQEHMPYIVVIIDEFADLMATTGKELESTLARLAAMSRAVGIHLVLATQRPSIDVITGLIKANIPSRIAFMVASKMDSRIIIDAVGAEKLLGKGDMLYAGITDPFPIRMQGAFVSEEEVEAVVSHVKTFGEPDYIDDEIFFDEEEEEAEPSLFSGGDDPLYEKALEIVMQQGKASASYIQRRLKIGYNRAARLVEEMEHRGVVGPAQGSKPRELLRGGKRRGQYSP

SEQ ID NO: 55395 - DNA, 1326 bp, Unknown
  Obtained from environmental sample
  misc_feature (1)..(1326): n is a, c, g, or t
atgaagaatattgttaattctattatttattattttcagcgaataaacgcaaattctcttgaaggcaaacgctttatatccaaaaccatattcttttatatattatccgaaatgtttttctcatttattatttgtttcggttttttcttttttattttttttgtaaaccagatacttcttatggcaaaagaaatcctcaccaaacgcgtgccctttgatcaagtcgcgcttttaatacttttttccctgcccagcgtaatcgccatgtcggctccgtttgcgtgccttgtcgggacccttatgactgtagggcgtttaacgtccgataacgaaatacttgttatgctttcatccggcctgtcatataaaaatgttttttttccggctataacagtcggaataattatttcccttttatctttttttacaaacgacgtgctccttccggcgggtaccgttcaattcaataagttgtggcgaaaaattcttgtttccactcccgcgctggaaatggaagccaattcggtgaaaaaattcaaggataccgtaattgttaccggcggcgtaaaagataatataattgaaaacctgcttataatggataagaccgaagacggcgagcgccggattataatggcaagcagcgcggaattaaaagacggcggtaaagagggcttgagtcttaatcttgagggggcgtttgttcattcagcaaaggaaattgtaagagaagattacgattacgctaattcggaaagtttacagtactgggtttccaatgaagatattattcagcaatatgtaagcgtaagcccaagagagatgagttcccgtgacgttcattccgctattgtggaaaaaaagaccgatttagcggaaagacttaacgatagaaaattacgcatgattgcaaacatggtatctttagaaaatattcttagggcgggacaggaaggagaaggctggaaccgcagatcggcgaccttctctacttttcaacgtgatacagccgcccttgaatcaattttgagtgacagatcgcttaccatttatgtaattgaaatatacaggaaattttccgttccccttggcgcgttttgttttgtttttctcgcggtttctttaggactgatggcgaagaaaagcgggcagaccgtaggttttatttttggcaatattatcgccgtgttatactggtcaatgctttttatagggcagacgatgggccttcgcgctggaaccccgccttttttatcgatgtggacaccaaattttttctttttatttatagggcttgttcttgccgttattaaggtgcaaaaatga

SEQ ID NO: 55396 - protein, 441 aa, Unknown
  Obtained from environmental sample
  DOMAIN (32)...(437): Predicted permease YjgP/YjgQ family
  misc_feature (1)..(441): Xaa is any amino acid
MKNIVNSIIYYFQRINANSLEGKRFISKTIFFYILSEMFFSFIICFGFFFFIFFVNQILLMAKEILTKRVPFDQVALLILFSLPSVIAMSAPFACLVGTLMTVGRLTSDNEILVMLSSGLSYKNVFFPAITVGIIISLLSFFTNDVLLPAGTVQFNKLWRKILVSTPALEMEANSVKKFKDTVIVTGGVKDNIIENLLIMDKTEDGERRIIMASSAELKDGGKEGLSLNLEGAFVHSAKEIVREDYDYANSESLQYWVSNEDIIQQYVSVSPREMSSRDVHSAIVEKKTDLAERLNDRKLRMIANMVSLENILRAGQEGEGWNRRSATFSTFQRDTAALESILSDRSLTIYVIEIYRKFSVPLGAFCFVFLAVSLGLMAKKSGQTVGFIFGNIIAVLYWSMLFIGQTMGLRAGTPPFLSMWTPNFFFLFIGLVLAVIKVQK

SEQ ID NO: 55397 - DNA, 2181 bp, Unknown
  Obtained from environmental sample
  misc_feature (1)..(2181): n is a, c, g, or t
ttggggtacaataaaatgaaaaaagggatttttagatcggttgaattctggaaagcctccataatgcccttgccggatcattccttctttgaattgctgcggactgttttcggaaaaataaaaactccctttaacaaacaaaatctggtcggcgaccttgaaaaattcctgttaaacaatgatatacaaaaaagtattgcagcttatattgacaaaaatgacgcccgtattattgccgctgtcgcggcgctgaatgaaccaaccgcccaggaactgaacgccttttttgaccaggagtgggacaataccgaattacatgacatgataataaatcttgaggaaagatttattttattccgctttatggaagaaggtcgaaacgaaagccgcctggcgctcaatcctgtgctggaaccggtattggcgcaatatatcgatgataaatcctcattgtttccctcattcaatattaaaacgcctgataaaacaggcaaacaaaatttacctttctttgatgaccgtattctggcggcgctgctttcctttgtttcccaaaatgaggcattttttatcaaagaggggagaatacgccaaaaggtcctgaatatggcggcggccctgttccccgcccttcagttggaacctgtcataggcggcttacaggttttggggctgttcttcgcaaacggcgatacgctgcttcccgattttacccgttttaccgcttttggcagacttgacagactggaaagaatgggatactgcgcggctggtatcctatgttattacgagtcngcggcgggtgaaccgtcaccctggttattccgctcaaagctccgtaggtacgcgtcatttatccataatttccatacttcgcttgatcccgaacaacagtacccccttgtaaccctgcgaaggcttttatttattcttggacgggacaacaatgaaattaattacgatatgctcatcaaggcaatggagcagacggggctcttaatttcagattcaaacaagcgctggcagaaataccagcccgccccggaaggcgcgtctgcaataaatgcagtggcaaagaatgccgtggcaagaattgccatggattccccgttcacgctggtgatgtaccctgagattgcgtataacgacgcgatagaacttgcctctatttcccgcgttaccgggaccggattgaatgtcagctttgaaatagacaaagacgcagcggtctcggcgtttaaccggggtatttccgccgccgctgccatagagcttttacagcggctgtcaggaaaccgaatcgacggaaacgcggcctttaccctgcttgattgggaaaaacgatacagggaggtaggcttaagcaaagggcttgtattgagcctttctcccgaacgcgactatcttgccgaaacaaaaccgctgtcaaaatatataaccgcgaaactggcgacgggaatatatatgatcccggaaaacatggaagaaaaggtatatatagccctggaaaaagccggagtcaccattttcgcaaaaccgaacaaccgccatacagatgacagcaatgcgttatccgggagccctcttagcagcggcgcgcttagcagcgcggcagattcccgcatttattccccgcgtctgagcgcgggaatgtccaacactgaaaaaaaccggcaattcaaacccgaaaacgaagaaaacaaaaataatatatcagcgtctgaccctccggcgtccgttccggcttcgtccgttccggcttcgtccgttccggcttcggctgctctaattgaaggatttcattctataataaacaagatgcgtcttggggccgaacagaaggaagaacttacggcgcgcgttaacagaaggcttgtgctgtgcgaagcacagttaaaagacgcggttgtccgttatgagaaacttgaggcgcgcggtctggattacgctggcaagactatgattgcgaaacaggctatagccaggcaatcaccattggaagtaagctggccgggccgtcaaaagcaggagagcgttatcggtattccaaaaacgctggaaaaaaaggatgacgaaagcgttctggtcatggaatcagcggggaatacccttcgtatccccctggggaagatcggccttttgcggcggatcaaaaaatctatttttgaaaatattaattag

SEQ ID NO: 55398 - protein, 726 aa, Unknown
  Obtained from environmental sample
  misc_feature (1)..(726): Xaa is any amino acid
MGYNKMKKGIFRSVEFWKASIMPLPDHSFFELLRTVFGKIKTPFNKQNLVGDLEKFLLNNDIQKSIAAYIDKNDARIIAAVAALNEPTAQELNAFFDQEWDNTELHDMIINLEERFILFRFMEEGRNESRLALNPVLEPVLAQYIDDKSSLFPSFNIKTPDKTGKQNLPFFDDRILAALLSFVSQNEAFFIKEGRIRQKVLNMAAALFPALQLEPVIGGLQVLGLFFANGDTLLPDFTRFTAFGRLDRLERMGYCAAGILCYYESAAGEPSPWLFRSKLRRYASFIHNFHTSLDPEQQYPLVTLRRLLFILGRDNNEINYDMLIKAMEQTGLLISDSNKRWQKYQPAPEGASAINAVAKNAVARIAMDSPFTLVMYPEIAYNDAIELASISRVTGTGLNVSFEIDKDAAVSAFNRGISAAAAIELLQRLSGNRIDGNAAFTLLDWEKRYREVGLSKGLVLSLSPERDYLAETKPLSKYITAKLATGIYMIPENMEEKVYIALEKAGVTIFAKPNNRHTDDSNALSGSPLSSGALSSAADSRIYSPRLSAGMSNTEKNRQFKPENEENKNNISASDPPASVPASSVPASSVPASAALIEGFHSIINKMRLGAEQKEELTARVNRRLVLCEAQLKDAVVRYEKLEARGLDYAGKTMIAKQAIARQSPLEVSWPGRQKQESVIGIPKTLEKKDDESVLVMESAGNTLRIPLGKIGLLRRIKKSIFENIN

SEQ ID NO: 55399 - DNA, 852 bp, Unknown
  Obtained from environmental sample
  misc_feature (1)..(852): n is a, c, g, or t
ttgcccatccagattatcacctggcggtccggacgtgatgccgattttccccatttcaggctgttcagggaacagcattgggggctgattatttatgatgaagtccatcttttacccgcgcctgtatttcgcgtaacagcggaattgcaggcggtcaggcgtttggggttaacagctactttgatccgcgaagacggagcggaggacacggtattcagcctggtagggccgaagcgttatgacgtaccgtggaaagaacttgaaggcaaaggctggatcgccgaagcggtctgtacggaaatccgcattgatctaccggaggatctgaaaataccctatgccgtggcttcacagcgtgaaaagtaccgcattgccagcgagaacccgttaaaggaagaaattgtaacccaactaatagaaaaccacagcgacgatcatattctcgtcatcggtcaatacctttcccagctcgattcgctcgcgaaactgcttaaagtcccgctaatcaccgggaaaacacctaacgcggagagggaaaggatttacaacgaattcaagcggagagagctcagggtcatcgtagtttcgaaggttgccaattttgccatcgacctgccggatgcttcaatggcgattcaagtttcaggttccttcggctcgcggcaggaagaggcccagcgtctggggcgcatcctgcggccaaaagacaaagaagccaaacaccataacgcgctgttttttacccttgtctcccgttacacggtggaagaagatttcgcggcaaaccggcataaatttctcgccgagcagggatataaatactccattcaacattggggtacaataaaatga

SEQ ID NO: 55400 - protein, 283 aa, Unknown
  Obtained from environmental sample
  DOMAIN (163)...(235): Helicase conserved C-terminal domain
  misc_feature (1)..(283): Xaa is any amino acid
MPIQIITWRSGRDADFPHFRLFREQHWGLIIYDEVHLLPAPVFRVTAELQAVRRLGLTATLIREDGAEDTVFSLVGPKRYDVPWKELEGKGWIAEAVCTEIRIDLPEDLKIPYAVASQREKYRIASENPLKEEIVTQLIENHSDDHILVIGQYLSQLDSLAKLLKVPLITGKTPNAERERIYNEFKRRELRVIVVSKVANFAIDLPDASMAIQVSGSFGSRQEEAQRLGRILRPKDKEAKHHNALFFTLVSRYTVEEDFAANRHKFLAEQGYKYSIQHWGTIK

SEQ ID NO: 55401 - DNA, 585 bp, Unknown
  Obtained from environmental sample
  misc_feature (1)..(585): n is a, c, g, or t
atgtatcgaggtaatatggctgctaatcattcaatccccggcgaatatcgtagagcggctgaacgtctgtttttcaaggacgggttttccaaggggcataaacctgatgtaaaagccgcttgtgaatttgccaagtcgcttggcatcggctttgaataccagcgtttactcgcgctcgaaaaaaacagcggtgagttacggacttttcttgatcagtttcaaaacaatctggctttgttaattaaaaaaacatgggtggaaaaatccgatgaggagcgtaagggaaaattacaggatgacattccgttatttatgtctacggttgagcagacggactatataaaagccatagatgaatttagcatgattcttgatgaattagcctatttattttttggcactcagagcgagaaagaagactttgccgagtatacattccgcattgacgtgcagatggggcttttttggtggtacggaagcaagcttgagatgttaaaagacataaaaactcaaaatatcgacaataatgataaagtgttatgggcaattttgcttttaggactctgttatctgacaaatatttaa

SEQ ID NO: 55402 - protein, 194 aa, Unknown
  Obtained from environmental sample
  misc_feature (1)..(194): Xaa is any amino acid
MYRGNMAANHSIPGEYRRAAERLFFKDGFSKGHKPDVKAACEFAKSLGIGFEYQRLLALEKNSGELRTFLDQFQNNLALLIKKTWVEKSDEERKGKLQDDIPLFMSTVEQTDYIKAIDEFSMILDELAYLFFGTQSEKEDFAEYTFRIDVQMGLFWWYGSKLEMLKDIKTQNIDNNDKVLWAILLLGLCYLTNI

SEQ ID NO: 55403 - DNA, 609 bp, Unknown
  Obtained from environmental sample
  misc_feature (1)..(609): n is a, c, g, or t
atgaatgattctaccgggactgaaactgaattgcaaaaaaatgatgattgccgcactgattttatcagcgaatttattaaagaagacttagcggcgggaaagtacagttatgtgcatacgcgctttccgccggaaccaaacggctggctgcatatcggccactgcaaggcgttctttatcgactttagcatggctgagcgctttggcggaaaatgcaacctgcgctttgacgacaccaatcccgaaaaagaagatgtctcctacgttgaagcgattaagcgcgacataaaatggatgggcttcgattgggaagaccgtgaattttacgcttccgattactatgattacctgtacgagttagctgtaaagatcatcaagaagggaaaagcttatgttgatgatctgacggataccgaaatcagcgagtaccgtgggactgcggttgcggataaaaacaatatcaccgtaacgccgccgggcagaaacagcccgtaccgtgaccgttccgtcgaagaaaatcttgacctctttgccaaaatgcgctcgggcgaatacccggacggtgcgaaaacattacgcgcaaaaattgacatgacccaccctaattaa

SEQ ID NO: 55404 - protein, 202 aa, Unknown
  Obtained from environmental sample
  DOMAIN (37)...(202): tRNA synthetases class I (E and Q), catalytic domain
  misc_feature (1)..(202): Xaa is any amino acid
MNDSTGTETELQKNDDCRTDFISEFIKEDLAAGKYSYVHTRFPPEPNGWLHIGHCKAFFIDFSMAERFGGKCNLRFDDTNPEKEDVSYVEAIKRDIKWMGFDWEDREFYASDYYDYLYELAVKIIKKGKAYVDDLTDTEISEYRGTAVADKNNITVTPPGRNSPYRDRSVEENLDLFAKMRSGEYPDGAKTLRAKIDMTHPN

SEQ ID NO: 55405 - DNA, 474 bp, Unknown
  Obtained from environmental sample
  misc_feature (1)..(474): n is a, c, g, or t
gtgctggggtatcgaacgcaagcgggtaattcaaaagccgatggatataaaaaagaaatagaaaacgccgttaaggtggcaaagaaattaaaagaactgggctggcgttttgcgtcgcacagctatggacatttgaatatgccaaaggtaactatggcggcatttttaaatgatcttaattcatgggataaagaagtaaagccgattttgggcgatacagacctttacatatatccctatggagcggcgctggaaaagcaagaggataaacataaagtactgcgcgatagaaattataatttatttttcggcgtcggcagcggatacggttacaaggtcggtcccagatcggaatatatttatttaacgcgcagaaatattgacggttgttactttaggttattcagaaacagcgacaagaaattatttgatatcgataaagtaatggataaaaaaaaccggggtatcaagtaa

SEQ ID NO: 55406 - protein, 157 aa, Unknown
  Obtained from environmental sample
  misc_feature (1)..(157): Xaa is any amino acid
MLGYRTQAGNSKADGYKKEIENAVKVAKKLKELGWRFASHSYGHLNMPKVTMAAFLNDLNSWDKEVKPILGDTDLYIYPYGAALEKQEDKHKVLRDRNYNLFFGVGSGYGYKVGPRSEYIYLTRRNIDGCYFRLFRNSDKKLFDIDKVMDKKNRGIK

SEQ ID NO: 55407 - DNA, 300 bp, Unknown
  Obtained from environmental sample
  misc_feature (1)..(300): n is a, c, g, or t
ttgtatcagggtgtaactcttggcgcgttgtccacaaaaggcggacaaagtataaagggagtaaaacgccacccgactatttgcgacaatgtcacgatatactcaggagccagcattttgggaggggacactattatcggcgaaggagtggtaatcggcggcaacgcttttgtgatacgctccgtaccggaaaaaacaagagtcagcgtgaaaaaccctgaactgcagtttaagagcagcggcaatatttcatctcacatggaattggatcaactggatttttggcattacgagatatag

SEQ ID NO: 55408 - protein, 99 aa, Unknown
  Obtained from environmental sample
  misc_feature (1)..(99): Xaa is any amino acid
MYQGVTLGALSTKGGQSIKGVKRHPTICDNVTIYSGASILGGDTIIGEGVVIGGNAFVIRSVPEKTRVSVKNPELQFKSSGNISSHMELDQLDFWHYEI

SEQ ID NO: 55409 - DNA, 609 bp, Unknown
  Obtained from environmental sample
  misc_feature (1)..(609): n is a, c, g, or t
ttgaggaataaaatggaaatagatcaagaaatcgaacaaatagccgctgaattactgagtgattttcagaagaagcgcgatgtagcgaaacagccggtgaaatcggtcatcatcgaaatcatcggcaaaatgcagcatcttttgtttccgggaatttttgaaagcgttttaacaagcggctctgtaaagaacaaactcaatgtcatgctggaagaagtttccaatgatctagccgcgcagacaagattggctttgcgttatgacctgcggtacaaagacacagatcaggatgagattgacaaaatagcgtgggatataacgcgccaatttatccttaagattccgactatcaaagattttttagaaaaagatattgaagcggcgtatagcggcgaccccgcggcgtacagcanagcggaaattgtcatatcctatcccggcatttacgccacaatgatttacaggatagcgcatgaactttatttgctgtccgtaccgcttatcccaagaattatgagcgagtacgcgcacagcgcaaccggaattgacattcacccgggcgcggcaataggcaaatattttttattgaccacggcacgggtactgtaa

SEQ ID NO: 55410 - protein, 202 aa, Unknown
  Obtained from environmental sample
  misc_feature (1)..(202): Xaa is any amino acid
MRNKMEIDQEIEQIAAELLSDFQKKRDVAKQPVKSVIIEIIGKMQHLLFPGIFESVLTSGSVKNKLNVMLEEVSNDLAAQTRLALRYDLRYKDTDQDEIDKIAWDITRQFILKIPTIKDFLEKDIEAAYSGDPAAYSXAEIVISYPGIYATMIYRIAHELYLLSVPLIPRIMSEYAHSATGIDIHPGAAIGKYFLLTTARVL

SEQ ID NO: 55411 - DNA, 489 bp, Unknown
  Obtained from environmental sample
  misc_feature (1)..(489): n is a, c, g, or t
atgtactatccatatacatttaccgcgaccgacgctcttggaaactccagttccacggaaggcaaaatcggcattgacgttcttgtcatccgcgacggcgacaggctgaggatacaaatcccctcaatccaattcaggccgaatttcgcggacttccaaggtctgcccaaggatgttgttgataacaatatgcgcataattaggcgcatcgcgcagatactcaaccaattccgcgattacaaggtacaggtggaaggccacgccaatcccacgcaaccggtaggccccgcgcgcgacagggaagagcctgaatcaaagcgcataagtgagttgagggcaagggcgattgtagatctattggtacgcaacggcgttttacgaagcaggctgaccgccacaggagccggttcatccaaaacaatcgccgactttgaagaccgcgacaactggtggaaaaaccgtagggtggaattttacttgattaagtag

SEQ ID NO: 55412 - protein, 162 aa, Unknown
  Obtained from environmental sample
  DOMAIN (58)...(154): OmpA family
  misc_feature (1)..(162): Xaa is any amino acid
MYYPYTFTATDALGNSSSTEGKIGIDVLVIRDGDRLRIQIPSIQFRPNFADFQGLPKDVVDNNMRIIRRIAQILNQFRDYKVQVEGHANPTQPVGPARDREEPESKRISELRARAIVDLLVRNGVLRSRLTATGAGSSKTIADFEDRDNWWKNRRVEFYLIK

SEQ ID NO: 55413 - DNA, 1173 bp, Unknown
  Obtained from environmental sample
  misc_feature (1)..(1173): n is a, c, g, or t
atgatcagatcggccgagcatcgacagataaatcggaaagagcactacggagcagtcatgaagaatgaattttcctgcattatttgtgtcgctgatataaatataaccggcgctttggatcaatgccttgtagagttggcgctgcccgaagtttttatacagcgggccaaacagatgtcgctggaagacaggcacggatttctggggcggcagatctccaaactggaagaaagcagggctgtgatctatcgaatatatgtcccttcggaatacgaaataggtatggtaaaccgcattgtagacgcgacggatttaaaaatgggcggacgaggctgtataattgttcagcatattgataattatcgcgctaatcatctctcttatgatacggaaaaattggataaactctgcgggagagcggggagggtgacgcaaaaacaacacgcccttatttcctgcatagtttccagaggccagggaaattcgcttgccgaggcgctgctggagcttggcatctgtgtgccggttattttttatggaaccggcgtggggattagggacaggctgggacttttaagaataactgttcccgtagaaaaagaaattctctggtttatagttcccgcttccgacgcgatacttgtggaaaaaattattattccacgcgccgggctggacattcccggcagaggttttttatatacaatgtatatacacgctccggttgtaaacctgcgggtaaggcacggcaagagggcccatgccgcgacaatggagcagatcatagccgcactggatgaagttcgcggatcaagcgattggcgccgttttggttccagaaaacacgatccgacgggtaaaaacagatcttccagcacccgcgcgctcttttttatcggcgaagcggaagacgttgaaatttttcgtaaagtggcaatagaaagcggggccaggggcgcgactctgaatgaacttgaaatgcgttcctacaccgcccaaacccaggacgaggcaaaggagtctcattcccgtctgctctgtgatatagtcattacccgggccgtggaagaaaaaatcatggaaaatatcgctaaaacaaatctccttgacggcagcaggcactgcggattaaaaactttcgatgtggaaatgccttcggtaatacggaaataa

SEQ ID NO: 55414 - protein, 390 aa, Unknown
  Obtained from environmental sample
  misc_feature (1)..(390): Xaa is any amino acid
MIRSAEHRQINRKEHYGAVMKNEFSCIICVADINITGALDQCLVELALPEVFIQRAKQMSLEDRHGFLGRQISKLEESRAVIYRIYVPSEYEIGMVNRIVDATDLKMGGRGCIIVQHIDNYRANHLSYDTEKLDKLCGRAGRVTQKQHALISCIVSRGQGNSLAEALLELGICVPVIFYGTGVGIRDRLGLLRITVPVEKEILWFIVPASDAILVEKIIIPRAGLDIPGRGFLYTMYIHAPVVNLRVRHGKRAHAATMEQIIAALDEVRGSSDWRRFGSRKHDPTGKNRSSSTRALFFIGEAEDVEIFRKVAIESGARGATLNELEMRSYTAQTQDEAKESHSRLLCDIVITRAVEEKIMENIAKTNLLDGSRHCGLKTFDVEMPSVIRK

SEQ ID NO: 55415 - DNA, 522 bp, Unknown
  Obtained from environmental sample
  misc_feature (1)..(522): n is a, c, g, or t
gtgtttgttatctttcctattccttgcttattgacgaacggagcgaggtcgcgtccgtgcttgcacggacatgttccccaaccgaacccgaagggcgtcgaaccagaggttcgcggttcccctcttgtgggtgatcaattcagaatacaaataccgtcaatcatgttccccgccaacagcgcggtctttgacggtctgaatcagaatatattggataacaatatccgtgttatcaagcgcgtcgcgcaaatactcaacaagttcaaaggctacaaggtagtagttgaaggccacgcaaatccgactacggcctccggtacagcccgtgaacaggaagaaccttcattgaaggatcttagtgaaaagcgcgcgggatatgttcttgagcagcttgtccgcaatagcgtcgccagaaacaggctttcgtttaccggcgagggcggctccatgccggtggttccttttgaggagcattcaggctggtggaaaaacaggcgcgttgactttattttgattaggtag

SEQ ID NO: 55416 - protein, 173 aa, Unknown
  Obtained from environmental sample
  DOMAIN (62)...(165): OmpA family
  misc_feature (1)..(173): Xaa is any amino acid
MFVIFPIPCLLTNGARSRPCLHGHVPQPNPKGVEPEVRGSPLVGDQFRIQIPSIMFPANSAVFDGLNQNILDNNIRVIKRVAQILNKFKGYKVVVEGHANPTTASGTAREQEEPSLKDLSEKRAGYVLEQLVRNSVARNRLSFTGEGGSMPVVPFEEHSGWWKNRRVDFILIR

SEQ ID NO: 55417 - DNA, 891 bp, Unknown
  Obtained from environmental sample
  misc_feature (1)..(891): n is a, c, g, or t
gtgtccgtggcggtttgcgaaacgcctgccggagaatataaattccacggttatgtgcattatcccgacggaacaaagcttggagagcgaaaaggagaccagcctcagtttgatcccggcgttttaacggaaggcgataaaacatatctctttacgggtttttgcgggcgcgacgataaaacaagaataggcgcgacagcggtaacgctgggaaaggatatgcttaccgttcttgatgagcctgtccttatcgctcccggagtccataacagcaagggcacaagttttgaaggctatgaatttttcgaagctccgtccttaagaaaacgcggcgatacttattattttatttattcatcaatcgcgtctaacgagctttgttatgcgacaagtaaataccccttaaaagattatgtttacggcggcgttatcatcagcaatgccgatgtgcatataggcacatacaaaccagccgataaacctatgggctgcggcggcaataatcacggaagcatcatagaaataaaaggcaaatggtatatcttttatcacaggcataccaacggaaacgagttcagccgtcagggatgcctggagcctatagtaataaaagctgacggttctattccgcaggtggaaatgacttcttgcgggccgaacagcaagccgcttgccggcaaaggggaatttccggcatatattgcgtgtaacatattttccgtggtaaataaccggcagttagaaagacaatggccgtttcacaaccagtctctgccgaaaatttcgcangatggacgggacggcgatgaagaacccggctttgtaactaatattgcggatatcacggtattggctttaaatactttgattgcaagggaattaagagaataa

SEQ ID NO: 55418 - protein, 296 aa, Unknown
  Obtained from environmental sample
  misc_feature (1)..(296): Xaa is any amino acid
MSVAVCETPAGEYKFHGYVHYPDGTKLGERKGDQPQFDPGVLTEGDKTYLFTGFCGRDDKTRIGATAVTLGKDMLTVLDEPVLIAPGVHNSKGTSFEGYEFFEAPSLRKRGDTYYFIYSSIASNELCYATSKYPLKDYVYGGVIISNADVHIGTYKPADKPMGCGGNNHGSIIEIKGKWYIFYHRHTNGNEFSRQGCLEPIVIKADGSIPQVEMTSCGPNSKPLAGKGEFPAYIACNIFSVVNNRQLERQWPFHNQSLPKISXDGRDGDEEPGFVTNIADITVLALNTLIARELRE

SEQ ID NO: 55419 - DNA, 1146 bp, Unknown
  Obtained from environmental sample
  misc_feature (1)..(1146): n is a, c, g, or t
atggaaaaatattcagctcgtctgtctaaaattcaaaactggatggcagaagaaggtataagccttttaatgctggaagatacagaaggaaggcgcgatcataatatccgctggcttacaggacatccgggagacgctattctttttatcacacaggaagaagcccattcacgaaaagcaaataacaaaggaatacttgcggcatgggacattaaccttgcaaggctctatgcgagccagtctcctgtcatgtttgcagcttacaatgatttcggcagacagcctctcaaagcaattgccgcagctttacaaatactgaaaattccgtcaggttcaaagatcgaaataccttccgttaccccctaccctgctttccttgattatgtaggtgagctttcaggttatgacatcctgtgccgtaaaaacggcgcaggtgttgaacttgacaaattgcgcgcagtcaaggacgaagaagaaattgcaatcataaggaaagcggcggacattacaaatgaattaattgaccttctggaaaaaaatgtacgcgaagataaaattaaaaccgaagccgacgcagccctgtttatagaagttgaatcccgcaaacgcggctgcgaagggacaagttttgagacccttgccgcaggacctcaccgcagttttgcaattcacgcttttccgtcatggacatgttctcagttcggcgggaagggactgtctattctggactttggggtaaaatatggcggctacagtaccgatgttacactaacctttgcccgcgatattgatccaaaacaggaaaaacttgttaatatggtcgaaaaagccgctaaactggcaattacaatgtcgcataacgagacgcctgcaaaggatattgccgccgctgtagatgctttttttgctaaatccaagaaacaaatgccccacggtcttggtcacggcataggtcttcaggaacatgaataccctttaatcagaaaccgcagcgacaacgaatgggtactggaaccaggaatgatctttacaatagagccgggtctttacgacccgctgcttggcggctgccgccttgaaaatgatatccttataaccgaaaaaggtcaggaaatccttacaacagcgcatattatacgcctctag

SEQ ID NO: 55420 - protein, 381 aa, Unknown
  Obtained from environmental sample
  DOMAIN (161)...(375): metallopeptidase family M24
  misc_feature (1)..(381): Xaa is any amino acid
MEKYSARLSKIQNWMAEEGISLLMLEDTEGRRDHNIRWLTGHPGDAILFITQEEAHSRKANNKGILAAWDINLARLYASQSPVMFAAYNDFGRQPLKAIAAALQILKIPSGSKIEIPSVTPYPAFLDYVGELSGYDILCRKNGAGVELDKLRAVKDEEEIAIIRKAADITNELIDLLEKNVREDKIKTEADAALFIEVESRKRGCEGTSFETLAAGPHRSFAIHAFPSWTCSQFGGKGLSILDFGVKYGGYSTDVTLTFARDIDPKQEKLVNMVEKAAKLAITMSHNETPAKDIAAAVDAFFAKSKKQMPHGLGHGIGLQEHEYPLIRNRSDNEWVLEPGMIFTIEPGLYDPLLGGCRLENDILITEKGQEILTTAHIIRL

SEQ ID NO: 55421 - DNA, 693 bp, Unknown
  Obtained from environmental sample
  misc_feature (1)..(693): n is a, c, g, or t
gtgatagggccggtgcgctgcaaacacgactccgccgacattgtctggattgagcgtatcgcctcaaaagaagacatggacaaagcggatcataaccgcgtactggaacaggacgcttttaatatctgcaaagaaaagattttaagccaccagcttgaaatgaaactggtgcatgtgcattatttgctggaagagcccaagatactttttttcttcacggcggaaaaccgcgtggacttccgcgaactggtgaaggaccttgtcagcgtttttaaaacccgtatcgagctgcgtcagatcggcgtccgcgacgaagccagggtggtaagcgggcttggcatttgcgggcggggctactgttgccattccgtttccgacaagctgaaacccgtgtcaataaaaatggcgaaagaccagaacctttcgtttaactcaatgaaaatatccgggccctgcggaaggctgctctgctgcctttcttacgagcacggtttttactgcgagcagatccgccgtatcccgcaggaaggctcaagggtaagccatgaaaacgaaacatgggccgttaccgaagcgaacatggtcaccggccaggtaaaactctccaacagcgacggccggctggtaaccctccccgccgacaggtttgaaaaagttgataaccactggaaaacaaaacaaaataataaataa

SEQ ID NO: 55422 - protein, 230 aa, Unknown
  Obtained from environmental sample
  DOMAIN (13)...(100): PSP1 C-terminal conserved region
  misc_feature (1)..(230): Xaa is any amino acid
MIGPVRCKHDSADIVWIERIASKEDMDKADHNRVLEQDAFNICKEKILSHQLEMKLVHVHYLLEEPKILFFFTAENRVDFRELVKDLVSVFKTRIELRQIGVRDEARVVSGLGICGRGYCCHSVSDKLKPVSIKMAKDQNLSFNSMKISGPCGRLLCCLSYEHGFYCEQIRRIPQEGSRVSHENETWAVTEANMVTGQVKLSNSDGRLVTLPADRFEKVDNHWKTKQNNK

SEQ ID NO: 55423 - DNA, 903 bp, Unknown
  Obtained from environmental sample
  misc_feature (1)..(903): n is a, c, g, or t
atgaattcaaaacagttcatcaaaacccttatctaccgcgccattaacgtagagctcgatctttcctctgcgcctggatgtaaaaacctggagcggaaaaacctcgccccggacggcgcgaagggcggcgttgaaatatatccccaggctttcttcgccgtggcgatccgcggcgacctcgacgtaaacgagacaaaacttgccgccatggtaaaagccggcgaggtcgcccttgccgccgacgccgatgtcgtccgcctgaccaacgcgcctgtgggttttgccggccccgtggggcttaccacgctgcccgtcatcgtcgatcacacggttactggtatgagcgacgcggttacaggcgcgctggcaaaagacctgcactataagcacgtcgtttacggccgggatttcacgccctggatgactgccgatctgcgtaccgtcaaggccggcgacctctgccccgtttgcggcggagagttatacgaaaagaaaggcaacgagcttggccatattttcaagctgggttacaaatacacccgcagcatgaacgtacattacctggacgagaacggcaaaagccagaccccgaccatgggcagctacggcataggcgttgaccgcgccctcgcctcggtcatagaagaacaccacgacgatgccggcattatctggcctgtctctgtcgcgccgtaccatgtcataatcgttcccattaaatatgacggggaggtaaaggccgccgccgacctgtttgccgccgagcttgagaaagccggcattgaagtcctgctggacgaccgcaacgagcgccccggcgtcaagttcaacgacgccgaccttacaggcatcccctggcgcgtagtggtaggcgacaagggccctcgcgcagtcccaggttga

SEQ ID NO: 55424 - protein, 300 aa, Unknown
  Obtained from environmental sample
  DOMAIN (14)...(137): YbaK / prolyl-tRNA synthetases associated domain
  misc_feature (1)..(300): Xaa is any amino acid
MNSKQFIKTLIYRAINVELDLSSAPGCKNLERKNLAPDGAKGGVEIYPQAFFAVAIRGDLDVNETKLAAMVKAGEVALAADADVVRLTNAPVGFAGPVGLTTLPVIVDHTVTGMSDAVTGALAKDLHYKHVVYGRDFTPWMTADLRTVKAGDLCPVCGGELYEKKGNELGHIFKLGYKYTRSMNVHYLDENGKSQTPTMGSYGIGVDRALASVIEEHHDDAGIIWPVSVAPYHVIIVPIKYDGEVKAAADLFAAELEKAGIEVLLDDRNERPGVKFNDADLTGIPWRVVVGDKGPRAVPG

SEQ ID NO: 55425 - DNA, 597 bp, Unknown
  Obtained from environmental sample
  misc_feature (1)..(597): n is a, c, g, or t
atggccgagtttgcttacatttcgcttgtggacatcgacagggatgagttggggatgccccgcgcccatttcctgatcaaacgggcagtcggggcggcgggcgatcggtttataatggaaaaaggcgagatgaaaatccgttttgccggagacgaccgctggacggacgagaggaaatacgcggcggagcgcggatggaaacataatatcagccgcctgatggatacggagaaataccagacgctggaagcggcgggaagggccgccgcctggcaggatctcggcttgccggttccggaacgcctgcaaaaagcgcaggattccatgaacggcatccgttatcccgattacctcgcccatgaaaaggccaggcttgaaaccctgcgatgcgccatgccccatgaccgccgttatgcgacacttatggcgagacattcgctcggatggtacgtaccggagggcaggatgcttcccctcggcgacaaccgcgacaattcgcgggacgggcgttacttcggcccggtgcggctttcaaaggtgctgggcagaggctccgcaattttctggcccctcaacaggatggggttgatccgatag

SEQ ID NO: 55426 - protein, 198 aa, Unknown
  Obtained from environmental sample
  misc_feature (1)..(198): Xaa is any amino acid
MAEFAYISLVDIDRDELGMPRAHFLIKRAVGAAGDRFIMEKGEMKIRFAGDDRWTDERKYAAERGWKHNISRLMDTEKYQTLEAAGRAAAWQDLGLPVPERLQKAQDSMNGIRYPDYLAHEKARLETLRCAMPHDRRYATLMARHSLGWYVPEGRMLPLGDNRDNSRDGRYFGPVRLSKVLGRGSAIFWPLNRMGLIR

SEQ ID NO: 55427 - DNA, 735 bp, Unknown
  Obtained from environmental sample
  misc_feature (1)..(735): n is a, c, g, or t
atgtcaatgtttgacaaggcgttaaaatattcatacgccgaacaaaaaagggaacgccacagactgctgcgtattgtcatgatcttcctgttcctgttccttctgtataacgtaataaacgctttcttcgtctcggtttgggtcctgaacaatgacacaatggaacccggactgcgctcaggagatcgttttattgtgtactcgtctttcctgccttttgttatttccagaatcaataaaaccggcggaacagtccctttcaaacgcggatccattgtattgattgataccaggcgcggcgagaaccggaattggcctttagcaactgccgacagttttgtacgcttcgtaacggcccaaaaaaaagaaatcctgaacgcggatgaaaatctgtatataaagcggatcatcgccattcccggcgacgagatcagtatgaacaattttgttttcagggtgaagccggcgggcaatatgtatgtttttaccgaatttgaactttccgaccgcccttattacccgaacataccccaggtgccggccctttgggatgagtcgcttcccttttcagggtacatggacagcaaaacgctcggccccggcgagtatttcgtcgtttcagacgatcgcggaaactcgggcgactcacgcacatgggggccggttaacgcgaaaaaattactgggaaaacccatattccgtttctggcccatcgggcgaatcggccgtccctag

SEQ ID NO: 55428 - protein, 244 aa, Unknown
  Obtained from environmental sample
  misc_feature (1)..(244): Xaa is any amino acid
MSMFDKALKYSYAEQKRERHRLLRIVMIFLFLFLLYNVINAFFVSVWVLNNDTMEPGLRSGDRFIVYSSFLPFVISRINKTGGTVPFKRGSIVLIDTRRGENRNWPLATADSFVRFVTAQKKEILNADENLYIKRIIAIPGDEISMNNFVFRVKPAGNMYVFTEFELSDRPYYPNIPQVPALWDESLPFSGYMDSKTLGPGEYFVVSDDRGNSGDSRTWGPVNAKKLLGKPIFRFWPIGRIGRP

SEQ ID NO: 55429 - DNA, 492 bp, Unknown
  Obtained from environmental sample
  misc_feature (1)..(492): n is a, c, g, or t
atgacggcatcactgtatattcatgttcccttctgtctgcaaaaatgcgattactgcgatttttattcccttccggtcgcatccaatttagccaatcaggccctgatggatccgtatatcgacgccgtgtcatgcgatatagaggaacagatcggcatgttcaatgtagacggcgtaccaagcgtttatataggcggcggaacgccttcagcgcttggcgcggagcgcataacgcgcctgctggcctcaattaaaaaattgttagcgggcatggacgcgcccccggctgaatttacggtggaaacaaacccggaatcgactaacggggctttcctgcaggcctgccttgaaggcggcgtcagccgtataagccttggcgtacagagcttctgtgaagcgtcacgaaaagccgttcgcagacaaggcggccttaagcaaatcgaagaagctctttcccttatcgcgtggtattaccccaagcttttccgttga

SEQ ID NO: 55430 - protein, 163 aa, Unknown
  Obtained from environmental sample
  misc_feature (1)..(163): Xaa is any amino acid
MTASLYIHVPFCLQKCDYCDFYSLPVASNLANQALMDPYIDAVSCDIEEQIGMFNVDGVPSVYIGGGTPSALGAERITRLLASIKKLLAGMDAPPAEFTVETNPESTNGAFLQACLEGGVSRISLGVQSFCEASRKAVRRQGGLKQIEEALSLIAWYYPKLFR

SEQ ID NO: 55431 - DNA, 669 bp, Unknown
  Obtained from environmental sample
  misc_feature (1)..(669): n is a, c, g, or t
ttgtgcatggccgaacacggcgcaaatttaattttacattcacgctcggtcgcgcatacggaaaaagttttgaatgaggtaggcaaatttggaatcgaagcctttgccgttgaagccgagctttccaagcccgatgaagtaaaagccctgcttcaaaaaattgataaaagcgggaaaaatgtcggaatagtattcaatgacgccggcgtgcaggtcgcttaccggcaggaatattttcaaacccccgtcgcggattttacgcagagttttctgataaacaccatcgcgcccatcatgatatgttaccattttttgcccaaaatgattgcgaacggttttgggcgtgtcatcaataccaccagcggaatacgcaacgaaccgcagcaggcgggctattcggcaagtaaagccgccctcgacaaatttacaactgacctggcgtccgttttggacggcacggacgtaattataagccttgccgatcccggatggatccgcaccgacctgggcggccccaacgctcccggcgcggtagaaagctgcatgcccggaatggccgtcggcgcgtttgtcaacgacaaaaaaagcggaaggctttttcccgcgccgcgtttccacggcatgacgctggaacaggcggtacaggccgttgaatccggcttaaattag

SEQ ID NO: 55432 - protein, 222 aa, Unknown
  Obtained from environmental sample
  DOMAIN (3)...(151): short chain dehydrogenase
  misc_feature (1)..(222): Xaa is any amino acid
MCMAEHGANLILHSRSVAHTEKVLNEVGKFGIEAFAVEAELSKPDEVKALLQKIDKSGKNVGIVFNDAGVQVAYRQEYFQTPVADFTQSFLINTIAPIMICYHFLPKMIANGFGRVINTTSGIRNEPQQAGYSASKAALDKFTTDLASVLDGTDVIISLADPGWIRTDLGGPNAPGAVESCMPGMAVGAFVNDKKSGRLFPAPRFHGMTLEQAVQAVESGLN

SEQ ID NO: 55433 - DNA, 1626 bp, Unknown
  Obtained from environmental sample
  misc_feature (1)..(1626): n is a, c, g, or t
ttgacggaactgtggagatataagcgggaatttatgacgaaatatgtttttgtaacaggcggtgttgtatcggggcttggaaagggaattacagccgcgtctttgggcaggctgttaaaacagcgcggcttaaaagttgcggcgcagaaactcgatccgtatatgaatgttgacccgggaactatgagtccgtttcagcacggcgaagtttttgttaccgatgacggcgcggagactgatcttgatctggggcattacgagcgctttattgatgaaaacctgactaaactcagtaatctgacatcaggtcaggtgtacaggaatgtacttgagcgtgaacgggcgggagcctatctcggcagtacagtgcaggtcatcccccatgttaccggtgaaataaagagctttatctatgccggggctgaaaacagccgcgccgatattttaattacggaaataggcggcactaccggtgatattgaaagccagccttttttggaggcaatcaggcagatttcacttgaaaaaggccgcgaaaactgcctgtttattcacgttacattgatcccgtatttaaaagcgtcgggcgagcacaagtcaaagccaacgcagcactctgtcaaagaactgcgcgctatcggtatttcacctaatatcatcatagcgcgggctgacgagccgataagcgacggtattacggataaaatatcgcttttttgcaacgtgaagcccgattgcgtcatagagaacattaccatcccattcctttatgaagcgcctcttttgctgcatcaaaacggcctggacaaggtcgtctgccgcgaacttggtattgaagctcctgagcctgatctgaatgagtggagcgtcatggttaaaaaaatcggggagagaaaacgggaagtcaatatcgcgattgtcgggaagtatgttcaattacacgacgcgtatctttccattattgaaagtctgaaccacgcgggcattgaagccggagcaggggtaaacatccaatggattgacagcgaggacgtaacaaacgaaagcgtggacgaactgttatgcgaagcggacggcatgatcattcccggcggcttcggcgaaaggggaattgagggaaaaatcaccgcctgccgttacgcgagggaaaacgatatgccgtatctgggaatctgccttggaatgcagattgccgttattgaatttgcgcgtaacgtctgcgggttgaagcacgcccattcaagcgaatttgacgaagtttccccccatcgcgtcatcgatctgatgcccgatcaggccggcatggtcggctcgggcggcaccatgcggctgggcgcgtatccgtgtaaagtcacgcagggaacgctgctgcacaggctttacaacgcggatgaaataagcgaaagacaccgccaccgttttgaattcaacaatgactaccgggagactctgacgggcaaaggtatggttatttgcggcgtgtcacctaacggcaatctcgtcgaggcgattgagcttccggatcgccgttttttcaccggggttcaattccatcccgagttcaagagccgccccaataaaccgcacccgttgtttttaggcctggtaaaagcggcgattaaatag

SEQ ID NO: 55434 - protein, 541 aa, Unknown
  Obtained from environmental sample
  DOMAIN (304)...(520): Peptidase C26
  misc_feature (1)..(541): Xaa is any amino acid
MTELWRYKREFMTKYVFVTGGVVSGLGKGITAASLGRLLKQRGLKVAAQKLDPYMNVDPGTMSPFQHGEVFVTDDGAETDLDLGHYERFIDENLTKLSNLTSGQVYRNVLERERAGAYLGSTVQVIPHVTGEIKSFIYAGAENSRADILITEIGGTTGDIESQPFLEAIRQISLEKGRENCLFIHVTLIPYLKASGEHKSKPTQHSVKELRAIGISPNIIIARADEPISDGITDKISLFCNVKPDCVIENITIPFLYEAPLLLHQNGLDKVVCRELGIEAPEPDLNEWSVMVKKIGERKREVNIAIVGKYVQLHDAYLSIIESLNHAGIEAGAGVNIQWIDSEDVTNESVDELLCEADGMIIPGGFGERGIEGKITACRYARENDMPYLGICLGMQIAVIEFARNVCGLKHAHSSEFDEVSPHRVIDLMPDQAGMVGSGGTMRLGAYPCKVTQGTLLHRLYNADEISERHRHRFEFNNDYRETLTGKGMVICGVSPNGNLVEAIELPDRRFFTGVQFHPEFKSRPNKPHPLFLGLVKAAIK

SEQ ID NO: 55435 - DNA, 1230 bp, Unknown
  Obtained from environmental sample
  misc_feature (1)..(1230): n is a, c, g, or t
gtgaacatttgttcaggtaaaaaaatggaacttttgcaaaaattggaaattcttgccggtgcggcaaaatatgatgtttcttgttcctccagtgggggctcaaggacaacgcaaaggggtggttttgggaattcctgcccagcaggggtgtgccattccttcacagaagatgggcgatgcatttcgctgctcaaaattttgctcacaaatgtgtgcctttacgattgcgcatattgcgcaaaccgcaaaagcaacgatgttccaagagccacattcaaagtagaagaagttgtgaaattgaccattgaattttacaaaagaaattacatagagggcttgtttttgagttcgggagttattaaaaaccccgattacactatggaggctttgctcagagttgcaaaaagtttgcgcgaggagcataaattcggcggctacattcacctaaaagcaatccctggcgcaagccaagatttaataaccttggcaggttattacgcagacagaatgagcgtgaatattgagattccatccgagccttccctaaaaatgcttgcccccgataaaaattttgaatccgtttattcgcccatgaaccgcctgcgaacaaaaattttggaacacaagggaaacctaaaacgtaggggtttgaaaaaatttgtccccgcggggcaaagcacacagatgattgtcggggcaagcccagaaaatgatttgaaaataataacccttgcggctagcctttacaaaactcaggaattgaagcgggtttattattctggctatattcctgtaaataatgatgaacgcttgcctgtgatatctgcgcccccgttaaaaagggaaaaccgtctttaccaagcggattggctaatgcgtttttacggttttagctacgatgaaattttggataaaaacaatccctggctagacccggaatttgacccaaaaatggcctgggctttgagacatcctgaattttttcccatagatttggactgcgcaagctatgaggaaattttgcgagttccgggcgtgggagtgaagagcgcaaagttcattgtgcacagccgccgctttggcaaaattcgtttggagcatttgaaaaaaatgggtgttgcattaaagagagcaaaattttttattgcaaaccccgatttgccaacagaatggcaaaaattatatccagagcaagttagagctcagttgagtaatagaacaattctttaa

SEQ ID NO: 55436 - protein, 409 aa, Unknown
  Obtained from environmental sample
  DOMAIN (66)...(248): Radical SAM superfamily
  misc_feature (1)..(409): Xaa is any amino acid
MNICSGKKMELLQKLEILAGAAKYDVSCSSSGGSRTTQRGGFGNSCPAGVCHSFTEDGRCISLLKILLTNVCLYDCAYCANRKSNDVPRATFKVEEVVKLTIEFYKRNYIEGLFLSSGVIKNPDYTMEALLRVAKSLREEHKFGGYIHLKAIPGASQDLITLAGYYADRMSVNIEIPSEPSLKMLAPDKNFESVYSPMNRLRTKILEHKGNLKRRGLKKFVPAGQSTQMIVGASPENDLKIITLAASLYKTQELKRVYYSGYIPVNNDERLPVISAPPLKRENRLYQADWLMRFYGFSYDEILDKNNPWLDPEFDPKMAWALRHPEFFPIDLDCASYEEILRVPGVGVKSAKFIVHSRRFGKIRLEHLKKMGVALKRAKFFIANPDLPTEWQKLYPEQVRAQLSNRTIL

SEQ ID NO: 55437 - DNA, 435 bp, Unknown
  Obtained from environmental sample
  misc_feature (1)..(435): n is a, c, g, or t
atgaatttaggtttattaggcgcaggtcttgtaatgggaatcgcggctatcggatcgggtatcggaattggttatgccggatcggctacaataggcgcatggaaaaagtgttatatttccaataaagcggctccaatgatgctgctggcatttgccggcgcgccgttaacacagactttttacgggtttatccttatgggtcagatggtaacagccgccgaagcaaggcctgaaaactgctggctttatatcggttacggcatagcctccggtcttgcgatggcgttttcagccatagtgcagggcaaagtaggcgccgccgccgccgacgcgcagggtgaaacaggcaaaggcttcgcgcagtacatcgccgtagtaggtatcgccgagacaatcgcccttttcgcgatggtcttaacgatgatcagtctgtaa

SEQ ID NO: 55438 - protein, 144 aa, Unknown
  Obtained from environmental sample
  SIGNAL (1)...(28)
  misc_feature (1)..(144): Xaa is any amino acid
MNLGLLGAGLVMGIAAIGSGIGIGYAGSATIGAWKKCYISNKAAPMMLLAFAGAPLTQTFYGFILMGQMVTAAEARPENCWLYIGYGIASGLAMAFSAIVQGKVGAAAADAQGETGKGFAQYIAVVGIAETIALFAMVLTMISL

SEQ ID NO: 55439 - DNA, 1167 bp, Unknown
  Obtained from environmental sample
  misc_feature (1)..(1167): n is a, c, g, or t
ttgagcaggtcgccgcgttattgcaagggcttatcaaggaagacgaaggaagtgacattattcaggaggaaaggcatgattgacgaacttcaaaccgctgaacctcataaaatctcggaaatttccaaagtaggctaccagcttttaaaagaaaataaaatagacgacgccatagactgttttactaaaatccttttaatggacgaaaataacaattacgcgcttgtgggattgggagacgctacgcgcaaacaaggttcaattcacgaagccgtaaaattttatcaaagatgcctttcaaaccacccgggaaacaattacgcgctattcgggcttgcggactgctacaaggcgatgaaccagtacaaaaaagcgattgaaatatgggaacagtaccttgttcacgacgataaaaacataactgtccttacaagaatagcggacgcttacaggaaggtgcgtgatttcgccaattccagaaatatctacatgaaggttctggaaatggaaagctccaacccctacgccattataggcatggggcatcttcattatgattttaaggaatacaaagacgcgctttattattgggagaggatgctggaaataaacagcgacaacgtggatatccgcgtcctaacttccataggcaattgccacagaaaattaaaaaccttcagcgaaggcattccttattttgaagccgctcttaaaagagaaaaaaataatttttacgcccttttcggcctagccgactgttacaggggcatgaaccagattgaaacgtcattaaaatactggaatctgattcttgaacaggatcccagaaacaaaatgatcttaacgcgcatgggagacgcgtaccgcaacctgaatgattatgaaaaagcaaaagattactatgaaagagccctgaatatagaatttgacacttatgccgtaatgggtcttgcgttaatcgcgaaagaacagggaaaatttgacgaagccataacttccttcagacgtttgatccagcaggactccagaaatttccgcctttacattgaactttccgactgttatctgaaatccggcgaccgccgcaaagcggcggaaattctggaagattttcaaagattgggaattaaaaatcaaaaagtagctgaaatactggaaagcatgtaa

SEQ ID NO: 55440 - protein, 388 aa, Unknown
  Obtained from environmental sample
  DOMAIN (244)...(277): Tetratricopeptide repeat
  misc_feature (1)..(388): Xaa is any amino acid
MSRSPRYCKGLSRKTKEVTLFRRKGMIDELQTAEPHKISEISKVGYQLLKENKIDDAIDCFTKILLMDENNNYALVGLGDATRKQGSIHEAVKFYQRCLSNHPGNNYALFGLADCYKAMNQYKKAIEIWEQYLVHDDKNITVLTRIADAYRKVRDFANSRNIYMKVLEMESSNPYAIIGMGHLHYDFKEYKDALYYWERMLEINSDNVDIRVLTSIGNCHRKLKTFSEGIPYFEAALKREKNNFYALFGLADCYRGMNQIETSLKYWNLILEQDPRNKMILTRMGDAYRNLNDYEKAKDYYERALNIEFDTYAVMGLALIAKEQGKFDEAITSFRRLIQQDSRNFRLYIELSDCYLKSGDRRKAAEILEDFQRLGIKNQKVAEILESM

SEQ ID NO: 55441 - DNA, 1080 bp, Unknown
  Obtained from environmental sample
  misc_feature (1)..(1080): n is a, c, g, or t
atgaaaacaattccggcgagccttgcgggttttcttccggcggaacttgaaaacattctccttcccctgccccgaatgcgcgcctcccaaatatacaaatggataacccgcggcgtcctggattttgatcaaatgacagatcttccctccgctctgcgtgaagaactaaaaagccgcttcgaactctattcctccgctgtagacagccgttatgaagataaatcctctgaaaaaattgttatcgctcttaaagacggtataaaaattgagtctgttcttctaaatgacggaaaatcgcgctttaccgcctgtctttcgacccaggccggatgccccgcggggtgcgtattctgcaaaacaggcagtctcggcttttcccgcaaccttacagccgccgaaataacggaacaatttttgtttttacggatgatggtttacagggaaaccgcttccaaagaggcggccgacaatagcggacatggtattgataacatcgtcatcatgggcatgggagaacctttgttaaatctcgaagaactgcgaaaagccattacattctttacagacacggtaggcattaatttttccaaacgcaggattacggtttccacgtgcggtatctgcgaaagtctgtttgatcttgcaaataacggtccatacatacggcttgccctttcgcttgtaacggctgacgagcctctgcgccaaaaactgatgcctgtcgccgccgccaacccccttgcaaaagtaaaacaagcccttgccgcatttcagaataacggcggcgggcgcattacgctggaaataccgcttttgggcggcgttaacacccgcgataaagacgccattgccgccgctcaattcgcaaagggcatagataccgttgtaaacataatcccgtggaatccagccgtcggccttgagtttgagggcaagcctttgcgcgaacctgaaaaaaaagagacggaagactttgtaaaactgcttgaaagccgcggattaaaagttactatgcgccgccgcaaaggacgaagcgtcatgggcgcttgcggacagcttggatcaattagcaatgagtag

SEQ ID NO: 55442 - protein, 359 aa, Unknown
  Obtained from environmental sample
  DOMAIN (105)...(286): Radical SAM superfamily
  misc_feature (1)..(359): Xaa is any amino acid
MKTIPASLAGFLPAELENILLPLPRMRASQIYKWITRGVLDFDQMTDLPSALREELKSRFELYSSAVDSRYEDKSSEKIVIALKDGIKIESVLLNDGKSRFTACLSTQAGCPAGCVFCKTGSLGFSRNLTAAEITEQFLFLRMMVYRETASKEAADNSGHGIDNIVIMGMGEPLLNLEELRKAITFFTDTVGINFSKRRITVSTCGICESLFDLANNGPYIRLALSLVTADEPLRQKLMPVAAANPLAKVKQALAAFQNNGGGRITLEIPLLGGVNTRDKDAIAAAQFAKGIDTVVNIIPWNPAVGLEFEGKPLREPEKKETEDFVKLLESRGLKVTMRRRKGRSVMGACGQLGSISNE

SEQ ID NO: 55443 - DNA, 906 bp, Unknown
  Obtained from environmental sample
  misc_feature (1)..(906): n is a, c, g, or t
atgaacgatacaatgttaattacattatattgtgttattgatgattttatcaaggctttaatgaacactacagacggacaaaaaatgatgaagttatggatagctaanagagggccgcaaagacagtttagtcccagtgaagtactgacgttgaatattctgaggttctattttcatatatntgatttaaaagcgtttgtgcgtctcgcgaagagcgcttataaagcctatttcccgcatctgcccaactatgaaaactttcttaaagcgacaaaccgatcgtttccatacacattattgtttttacggtattcactggagcttaaccgtcggacaagcaaaaacggattgttttttcttgattcgaccgcattgagcgtatgcgctaacgggaacataagcagccataaggtaacaaaaggctattcgtcacgggggaagacaagtaaggggtggttttacgggttcaaactgcacggagcttgtgatgtagaaggaaaccttgtgaatctacggtttaccaccgggagtgagcatgatagtcgcgaggtcgagtcgttgactgacggactgaccggattattcgttggcgatgccggttatatattgaagcaagatgtttttgttaggttatttgaaaaacataaacgcattctggctgcctcacggaagaacatgaaacgtctgatgacagaagagcagggatttatgttaagaaagcgaagcgttattgaaacagtatggggtgtgctaaaggaacgatacgggctggtatttcatttggccagaaatattataggtctgttcagacattactgctacagtttactcagtagtatgttacgaccatttgtgtattcatctacattaatgttacctaagcttccatttagtctcttgtcttga

SEQ ID NO: 55444 - protein, 301 aa, Unknown
  Obtained from environmental sample
  DOMAIN (117)...(281): Transposase DDE domain
  misc_feature (1)..(301): Xaa is any amino acid
MNDTMLITLYCVIDDFIKALMNTTDGQKMMKLWIAXRGPQRQFSPSEVLTLNILRFYFHIXDLKAFVRLAKSAYKAYFPHLPNYENFLKATNRSFPYTLLFLRYSLELNRRTSKNGLFFLDSTALSVCANGNISSHKVTKGYSSRGKTSKGWFYGFKLHGACDVEGNLVNLRFTTGSEHDSREVESLTDGLTGLFVGDAGYILKQDVFVRLFEKHKRILAASRKNMKRLMTEEQGFMLRKRSVIETVWGVLKERYGLVFHLARNIIGLFRHYCYSLLSSMLRPFVYSSTLMLPKLPFSLLS

SEQ ID NO: 55445 - DNA, 516 bp, Unknown
  Obtained from environmental sample
  misc_feature (1)..(516): n is a, c, g, or t
ttgttgttaattaactatataggatggcgggtgtttttatttattttctcttcattaaaactcgaaattcggcctattaatacgtcaaggcgcgtttaccgtattatcctccgcagttacgccgatgtccacatgccggtcgtcaggtggcgttattcggccgttttcccccggaacttttttccgtctcccctttccgattacgcgaatactcaaaaagaaagtaacgctccccctctcgagccctctcttctttcttttaattacagaattaaacacagtttcttttatagaccttactggcttccggagcttgtttttgacgacggctctaaaacatacatcagatttccctcgcaggttctccagagggaaatgcccgccgtctttgaaaataaaagatttattttaaattaccgcgtcctcggcaatctgatcgtcatcgacaaattaatcgaggatattacggtaaaaatcgaacgtaccgaaatttctatcactaaaaaaagaggctga

SEQ ID NO: 55446 - protein, 171 aa, Unknown
  Obtained from environmental sample
  DOMAIN (6)...(162): Conjugal transfer protein
  misc_feature (1)..(171): Xaa is any amino acid
MLLINYIGWRVFLFIFSSLKLEIRPINTSRRVYRIILRSYADVHMPVVRWRYSAVFPRNFFPSPLSDYANTQKESNAPPLEPSLLSFNYRIKHSFFYRPYWLPELVFDDGSKTYIRFPSQVLQREMPAVFENKRFILNYRVLGNLIVIDKLIEDITVKIERTEISITKKRG

SEQ ID NO: 55447 - DNA, 744 bp, Unknown
  Obtained from environmental sample
  misc_feature (1)..(744): n is a, c, g, or t
atgagcagatttttcagaaaaacaaacgcaagcgaaatcgtaaaaaaactggttgtaaaaacagtttgcgaacgctcgcttattaacgagggcgaccgtgtgcttatagccgtttcgggaggaaaagattcaagcgtgttgtcttgggcgctttctgcaataaagcccgctttaaaaataaattatgaattggcgggcttacacataagcaccgatttttgcgcctgttgcaagaaatcggttctttgcaaaaaattggaagaatgggggattccgtttaccgatttattcgtccctgtcattggcagactcaaagaaggcgagaaaatgaactgctactggtgttccacgcagagacggacagaactgttaaaattcgccgttgaaaacggttttaacaaaatagcgcttggtcatcatctggacgacattatcgaaactttttttatgaacctctgctcaaaaggcgaactgcttaccatgccgattaatttaaaataccgaaaatatcccgtcagccttatccgcccgcttgccttgctggaagaaaagcaaattatttcctgcgcgggggagcaggatattctaaaaaacgcctgtacctgcccctacggacaaaactcaaaacgccgcgacatgcggggcaaaatagcggattttgcgggaaaagaggcgggcgacgttaaacgacggatattaaaggctctcggtgagggaaagattgattatttgacagacgaataa

SEQ ID NO: 55448 - protein, 247 aa, Unknown
  Obtained from environmental sample
  DOMAIN (33)...(238): PP-loop family
  misc_feature (1)..(247): Xaa is any amino acid
MSRFFRKTNASEIVKKLVVKTVCERSLINEGDRVLIAVSGGKDSSVLSWALSAIKPALKINYELAGLHISTDFCACCKKSVLCKKLEEWGIPFTDLFVPVIGRLKEGEKMNCYWCSTQRRTELLKFAVENGFNKIALGHHLDDIIETFFMNLCSKGELLTMPINLKYRKYPVSLIRPLALLEEKQIISCAGEQDILKNACTCPYGQNSKRRDMRGKIADFAGKEAGDVKRRILKALGEGKIDYLTDE

SEQ ID NO: 55449 - DNA, 408 bp, Unknown
  Obtained from environmental sample
  misc_feature (1)..(408): n is a, c, g, or t
gtgatagacgccatcgacagtttgaaccataaactcgatttaatcgaaattgtttataacgctaatgttactctcttttcttcgatgagtatggctcttaaaactgacccgtcgcaaataaagacggcatcaatatggaaaacagatggctgtcctttggcgcggcttgtgcgtcagggactgagaaagcgcggcttttcaggagattttacggctgtgtacagcgcggaaacgtcggcgcacaatgaaacggacgaagagcaatttgtaaacactgacggaaacagtccttatcagggacggaaaaaagtaaacgggagtattgtaactgtaacggcaagcgcggggctgctgctggcaagtttggtaattaacagcatacttgaagaaaaagcgggtaaggcatga

SEQ ID NO: 55450 - protein, 135 aa, Unknown
  Obtained from environmental sample
  misc_feature (1)..(135): Xaa is any amino acid
MIDAIDSLNHKLDLIEIVYNANVTLFSSMSMALKTDPSQIKTASIWKTDGCPLARLVRQGLRKRGFSGDFTAVYSAETSAHNETDEEQFVNTDGNSPYQGRKKVNGSIVTVTASAGLLLASLVINSILEEKAGKA

SEQ ID NO: 55451 - DNA, 675 bp, Unknown
  Obtained from environmental sample
  misc_feature (1)..(675): n is a, c, g, or t
ttgatggccgaggaaaacattcacctggcgatccgcgtttcgatatttggaggcatagttacaagcacagtgacagttgatgcggcaaccgcagcgaagcttggagagctgtttttggagatcgtggcggcccctgactttgagccgaaagcgctggacatacttatgcagaaaaaaaatcttcgcataataaaactttcaaagtcccccgttgaatcccacgaatacatcgctgttgacggcggccttttagtccagcaaagcgaccgcaggcttcttgaaaaatgggaggtcgtgacaaaaaccgtaccagccgtcggagacttgcgggacatgatcttcggcatgagggccgtaacatttgtaaagtcgaacgcgataatgattgtcaaagacgaggctgccaccggaattgggggagggcaggtaaaccggatatggcctactgtgcagtcgctggaacggagcgcggctgttacaaaggacgggccggccagggtgcttgcctccgacgcgtttttcccctttgccgatgttgtggaagccgccgcggctgccggcataaaggcgataatccagcccggaggatcggttaacgataaactgtcaattgaggcctgtgacaagcacggtatagcgatggtctttaccggcatacggcacttcaagcactaa

SEQ ID NO: 55452 - protein, 224 aa, Unknown
  Obtained from environmental sample
  DOMAIN (1)...(158): AICARFT/IMPCHase bienzyme
  misc_feature (1)..(224): Xaa is any amino acid
MMAEENIHLAIRVSIFGGIVTSTVTVDAATAAKLGELFLEIVAAPDFEPKALDILMQKKNLRIIKLSKSPVESHEYIAVDGGLLVQQSDRRLLEKWEVVTKTVPAVGDLRDMIFGMRAVTFVKSNAIMIVKDEAATGIGGGQVNRIWPTVQSLERSAAVTKDGPARVLASDAFFPFADVVEAAAAAGIKAIIQPGGSVNDKLSIEACDKHGIAMVFTGIRHFKH

SEQ ID NO: 55453 - DNA, 1089 bp, Unknown
  Obtained from environmental sample
  misc_feature (1)..(1089): n is a, c, g, or t
ttgcagagcggtatccagacgctttacttggggtttacgggggacgactgggaggttttttccacggcttaccttccttacccgcagcgggtggcggagcttatcacgcggatcatcgagacgcaggaaccggtggcgctctcggagcttgggtggcttgattacaagattactatgctgtttctagagagcgccaagaacgcgttctccggcgcccccaaggccataagcgcgccgcattacgcggtattgaacaagccgacgctttggaagggggccacgggcgaaaatttgcagcagagcagttggaaccttaccgtcggcgaccaggtctttgtggcaaacgctttgggcgtgccggtgatcaccgagtttttgcggcataatatattggccggcgggccgggggtgctgcccacctttccgggcagtcttatagtggccaagtacacgagcggggttgggctctttgtgaacatcgggcttgtttcgaggatgacggttattgaccgcgacgcgcaggcgttgctctttgagtcggatacgggaccggggacgatactaattgacaagtgcgctcaggaggcggattgcgccggcgggtttgaccgtgacggggcgcttaccgccacgggggccccatgcgccgagtgccttgagatactcgcagccgatccgtggatagttaaggccgcgccaaagcaggcgtcgccggagattttttcgcacctgctcagccatccttgtctcaaaccgcttagccccgtagacaagctggcgacgatcacggcgctcacagctaggagcgtatacaatttctaccgcagggagtacaaggaaacggcgcagccttcggcgctttggatatctggcggcggcgccaataacttgacgcttgtcgatttttttaaggcctcgtttgatcccataccggtgcgcagcgtggaggatctgaatgtcccgctcgatatgaaagtgccgctgacgctcgggttgactgtggacgcgttcgtctgcgggaagaccgtaccttgggagtcggggagcaaccccagagtcaagccgttggggcggtgggcgcttccgtag

SEQ ID NO: 55454 - protein, 362 aa, Unknown
  Obtained from environmental sample
  DOMAIN (7)...(336): Uncharacterised protein family (UPF0075)
  misc_feature (1)..(362): Xaa is any amino acid
MQSGIQTLYLGFTGDDWEVFSTAYLPYPQRVAELITRIIETQEPVALSELGWLDYKITMLFLESAKNAFSGAPKAISAPHYAVLNKPTLWKGATGENLQQSSWNLTVGDQVFVANALGVPVITEFLRHNILAGGPGVLPTFPGSLIVAKYTSGVGLFVNIGLVSRMTVIDRDAQALLFESDTGPGTILIDKCAQEADCAGGFDRDGALTATGAPCAECLEILAADPWIVKAAPKQASPEIFSHLLSHPCLKPLSPVDKLATITALTARSVYNFYRREYKETAQPSALWISGGGANNLTLVDFFKASFDPIPVRSVEDLNVPLDMKVPLTLGLTVDAFVCGKTVPWESGSNPRVKPLGRWALP

SEQ ID NO: 55455 - DNA, 405 bp, Unknown
  Obtained from environmental sample
  misc_feature (1)..(405): n is a, c, g, or t
atggcgcaagccgcaaccgccatcccaaaattctccggcgtatgcaacttctacggcgccaaagtcatggaggattcgcgggcaatgggcattatactctcggaggtgagcaagcgtaaagccttcttcatttacacagacgtctcaaaaaaatccgtggccccgcagctgactaaatcaatgaaaatcccaagcgcccccatacaaggttcgatagacgcggcggcgacggcggagcaagcgaaagagaagctgcgccgctactctataacagccgaaaagacgggtaaggtactgatcaaagcgcaaccgtccacggcgtttataaaagccctaaaagaggagacggaaacgcttagaaagaatggaatcaaacttgtttatgtgtcggaactggtcaaataa

SEQ ID NO: 55456 - protein, 134 aa, Unknown
  Obtained from environmental sample
  DOMAIN (1)...(134): Divergent polysaccharide deacetylase
  misc_feature (1)..(134): Xaa is any amino acid
MAQAATAIPKFSGVCNFYGAKVMEDSRAMGIILSEVSKRKAFFIYTDVSKKSVAPQLTKSMKIPSAPIQGSIDAAATAEQAKEKLRRYSITAEKTGKVLIKAQPSTAFIKALKEETETLRKNGIKLVYVSELVK

SEQ ID NO: 55457 - DNA, 1365 bp, Unknown
  Obtained from environmental sample
  misc_feature (1)..(1365): n is a, c, g, or t
atgagtattaaaatttttctagacgaatccgaaatgccgcgtaagtggtacaatgtcgccgccgacctgccgcccactccgccgccgctcgcccccaacggcgggccgctcacaccagacgccctcggagccatctttccgatgaacctcatcgaacaagaggtaagcactgagcggtggatcgacatacccgatgagatcgtcgacatcctctataggtggagaccgtcgccgctgcgccgggccgtattccttgaaaaagcgctcggtacgcccgccaagatcttttacaaagacgagagcgtctcccccgccggaagccacaaacccaacaccgcgataccgcaagtgtggtacaacaaaaagttcgggacgaagacgctgaccacggagaccggagcgggccagtggggctgcgccctctcgttcgcctgctcgctcctcgggcttacctgcaaggtctacatggtgcggatcagcttcgaccagaaacccttccgcaaaacgatgatggaggcgtggggcggcaagtgcgtggcaagcccgagcgacgagaccgagtcgggccgcaagtacttggcgaaagacccgtccatgcccggaagcctcggcatagcgataagcgaggccgtagaggaggccgtggccgacaaatccggatcaacgaagtactcgctcggcagcgtgcttaaccacgtgatgctccaccagacgatcatcgggcttgaggcgaagaaacagctcgctaaaatagggataaagaagccggacgtagttatagcttgcgctggcggcgggtcaaacttcgcgggtttggcgttcccgttcatccacgacaagataaacggcgagaacatcgacatcatccccgtggaaccgacctcctgcccgacactgacacgcggaatttacacatacgacttcggcgacgcggcggggcttactcccctgctgccgatgcacactctgggtcacaacttcatgcccgcccccatccacgccggagggctgcgctaccacggcatgtcgccgctggtgtcgcaagccgtaaaatgcggcttggcggccccgatggcgctcccgcaattagagagctacagcgccgccttaacgtgggcgcgcaccgagggcttcgtaatagcccccgagtcaagccacgccatagccgcggcaattcgcgaagcgaataaagctaaagaagagggcaaggaaaaggtgatactgctgaacgtcagcggacacgggttgatggatttggccgggtactcaaagttcctaaacggcgagctcaccgactattcgctccctcaagaggagattgacagggcggagaaagagttggacaatctacctaagattgggtaa

SEQ ID NO: 55458 - protein, 454 aa, Unknown
  Obtained from environmental sample
  DOMAIN (70)...(414): Pyridoxal-phosphate dependent enzyme
  misc_feature (1)..(454): Xaa is any amino acid
MSIKIFLDESEMPRKWYNVAADLPPTPPPLAPNGGPLTPDALGAIFPMNLIEQEVSTERWIDIPDEIVDILYRWRPSPLRRAVFLEKALGTPAKIFYKDESVSPAGSHKPNTAIPQVWYNKKFGTKTLTTETGAGQWGCALSFACSLLGLTCKVYMVRISFDQKPFRKTMMEAWGGKCVASPSDETESGRKYLAKDPSMPGSLGIAISEAVEEAVADKSGSTKYSLGSVLNHVMLHQTIIGLEAKKQLAKIGIKKPDVVIACAGGGSNFAGLAFPFIHDKINGENIDIIPVEPTSCPTLTRGIYTYDFGDAAGLTPLLPMHTLGHNFMPAPIHAGGLRYHGMSPLVSQAVKCGLAAPMALPQLESYSAALTWARTEGFVIAPESSHAIAAAIREANKAKEEGKEKVILLNVSGHGLMDLAGYSKFLNGELTDYSLPQEEIDRAEKELDNLPKIG

SEQ ID NO: 55459 - DNA, 717 bp, Unknown
  Obtained from environmental sample
  misc_feature (1)..(717): n is a, c, g, or t
gtgatcaacaaaccggccggattagtcgtccaccctgggcggggaaacgcaaacgggacggtggtcaacgccctgctgcaccgattcggtatcaacagcgtatcgtcgggttctgagtgctataggccggggatcgtccataggcttgataaggatacatcaggagcgctcatcgtcgctaagaccgacgccgctcacgtcgctttcgccgaactttttatgtcgcgggctataaacaaggtctacacggggttctgcgttggggcgcgtccgttagaacatgaggtgattgatctgccgctagccgcaagtcaacgcgaacgggtcaaacgtattgtaaacgagcgtaacggcaaaccggccgtcactgagtacagcctgaaagattttatctgcgggatagcgctgatggaattcaccttgcataccgggcgtacgcaccaaatacgcgttcattgcagtcacagaggttttcccattgtgggggatgatttatacggcgggacgcgcgaagcggcgctcaagatccagccgatggaaaggccgtttgcgtacagcgtcttcaaatgcttcaaaaggcaggcgctgcacgctttgtcgctctcgtttgtccacccgttgacgcaagagaacgtaaaggttacagcgccgtatcctgacgattttaataaagcgttagagatattttctcaacatccattacccaatcttaggtag

SEQ ID NO: 55460 - protein, 238 aa, Unknown
  Obtained from environmental sample
  DOMAIN (1)...(155): RNA pseudouridylate synthase
  misc_feature (1)..(238): Xaa is any amino acid
MINKPAGLVVHPGRGNANGTVVNALLHRFGINSVSSGSECYRPGIVHRLDKDTSGALIVAKTDAAHVAFAELFMSRAINKVYTGFCVGARPLEHEVIDLPLAASQRERVKRIVNERNGKPAVTEYSLKDFICGIALMEFTLHTGRTHQIRVHCSHRGFPIVGDDLYGGTREAALKIQPMERPFAYSVFKCFKRQALHALSLSFVHPLTQENVKVTAPYPDDFNKALEIFSQHPLPNLR

SEQ ID NO: 55461 - DNA, 699 bp, Unknown
  Obtained from environmental sample
  misc_feature (1)..(699): n is a, c, g, or t
gtgttgattttgcgctccagcgttgccgatgcaaaaatgagaatgttcaatttggatggcagtgaaggcaatatgtgtggaaacgccattagatgtgtagcaaaatatctttacgataatggaataattcaaaaagaagaaatacgaatagaaacaaaaagcggagtgaaagaacttcgcttatttataaaggataatcatgtatattctgtgaaagtaaatatggggcgagcagaacttacacctgaaaaaatacccgtaaaattaactggcgaaaacgccatcgcaaagccgataaccattggcggcaagaaatacgcaattacctgtgtttcaatgggaaatcctcacgcagtgaactttgttgaaaacgtggtgggatttgatttgcaaaaaataggtcccttgtttgagagcaatcccattttcccagaaaaagtaaacaccgaatttgttgagcttttaggcaggaattgcctaaaaatgcgagtatgggagcgaggcagtggagaaacccaggcttgcggcacaggagcctgtgcctcggctgtggcagccgttttaaacggacattgcgacaaagacacagacataaaagtccagctcccaggcggcgaactaataatcaaatacacagacgaaactgtttatatgactggaaactgcgttaaagtttttgatggtgtagtggatatataa

SEQ ID NO: 55462 - protein, 232 aa, Unknown
  Obtained from environmental sample
  DOMAIN (2)...(81): Diaminopimelate epimerase
  misc_feature (1)..(232): Xaa is any amino acid
MLILRSSVADAKMRMFNLDGSEGNMCGNAIRCVAKYLYDNGIIQKEEIRIETKSGVKELRLFIKDNHVYSVKVNMGRAELTPEKIPVKLTGENAIAKPITIGGKKYAITCVSMGNPHAVNFVENVVGFDLQKIGPLFESNPIFPEKVNTEFVELLGRNCLKMRVWERGSGETQACGTGACASAVAAVLNGHCDKDTDIKVQLPGGELIIKYTDETVYMTGNCVKVFDGVVDI

SEQ ID NO: 55463 - DNA, 1200 bp, Unknown
  Obtained from environmental sample
  misc_feature (1)..(1200): n is a, c, g, or t
atgagcatgaacgaaacaccttcgtcgaaccgcgtccatatcgccttttttggccgcagaaacgccggtaaatccagccttgtaaacgccgtaacagggcaaaatttggctgttgtaagcgaaattaaaggaacgacaaccgaccccgtccacaaggctatggaactgctgccactaggccctgtcgtaataatcgacactccgggtattgacgacgagggcgagcttggggaaaaacgggttggcaaggcgcggcaggtactgaataaaaccgatgtcgcggtgctggtactggacggggaactgccctgcactctccttcccgccgaaaaagaactaattgatgtttttatatccagaaatataccatatatcaccgtgcaaaacaaatcagatacggcaggtacagcgcctgaggagggtatcctgcccgtaagtgcaaagacgggtgaaaacgtcaatttactgaaagaaaaaatcgccgctctggcgcttgataaggaaccggaacaaagacttgtagcggatttaatcaaaccggatgattttatagttcttgtaatccccattgacaaggccgctcccaagggacggttgatccttccccaacaacagatgatacgcgatattttagaagcgggcgcaaacgcaatcaccgtgagagaaaccgaattacggcaaacacttgccgacatcggtaaaacgccgactcttgtaatcacggacagccaggcttttgcgcaagtttccgccattgtgccgcgggagattcccctaacttctttttcaattttattcgcccgctacaagggctttttaaaaaccgccgtcaaaggagccgccacacttgacaatctgcaagacggtgacaaagtgcttatctgcgaaggctgtacccaccacagacaatgcgacgacatcggaaccgtgaaattaccgcgctggattaaaaaccactccaaaaaggaaccggaattcaatttctgttcgggtggcgattttccgcgggatttatcggcttacaaggttgtcgttcattgcggagcgtgcatgttgaacgaacgcgaaatgcattaccgtaggaaacattccgaggagcaaaatattccgttcacaaattacggcgtaactatcgcccacatgaatggaattttacagcgatgcattgagatgcttgatataagagaggaaaatcaatga

SEQ ID NO: 55464 - protein, 399 aa, Unknown
  Obtained from environmental sample
  DOMAIN (14)...(131): Dynamin family
  misc_feature (1)..(399): Xaa is any amino acid
MSMNETPSSNRVHIAFFGRRNAGKSSLVNAVTGQNLAVVSEIKGTTTDPVHKAMELLPLGPVVIIDTPGIDDEGELGEKRVGKARQVLNKTDVAVLVLDGELPCTLLPAEKELIDVFISRNIPYITVQNKSDTAGTAPEEGILPVSAKTGENVNLLKEKIAALALDKEPEQRLVADLIKPDDFIVLVIPIDKAAPKGRLILPQQQMIRDILEAGANAITVRETELRQTLADIGKTPTLVITDSQAFAQVSAIVPREIPLTSFSILFARYKGFLKTAVKGAATLDNLQDGDKVLICEGCTHHRQCDDIGTVKLPRWIKNHSKKEPEFNFCSGGDFPRDLSAYKVVVHCGACMLNEREMHYRRKHSEEQNIPFTNYGVTIAHMNGILQRCIEMLDIREENQ

SEQ ID NO: 55465 - DNA, 1212 bp, Unknown
  Obtained from environmental sample
  misc_feature (1)..(1212): n is a, c, g, or t
ttgcctatgagcatgaacgaaacaccgtcctcaaaccgcctgcatatcgcgttttttggccgtagaaacgccgggaaatccagcctggtaaacgccgttacagggcaaaatcttgccattgtaagcgatatgaagggtacgacgacggacccggttttcaaggcaatggaaattcttcccctgggaccggtcgttattatcgacacccccggttttgacgacgatggcaaactgggggaattgagggtaaacaggactaaacaggttctgaataaaactgacgcggcggttttggtccttgacggggagcttccgcccgactccgccctatccgccgttgaagctgagttaaccgggctttttaatgaaaaaaaaataccctatttaatcgcgcttaataaatgcgatctttgtaataccgattccatgtcaatggcctctgagagcgaaattctgcccgtaagcgcaaaaacgggctttaacatcaatcaattaaaagaaaaaattgccgttcttgcgcttgaaaaggaaccggaacaaaggctggtcgcggatttaatcaaaccaaatgattttatagtccttgtaatccccattgacaaggccgcccccaagggacggttgatccttccccaacagcaaatgatacgcgacattttagaagcgggcgcgaacgcaatcactgtcagggagaccgaattaaagcaaactcttgccgacatcggcaaaacgccgtccctttgtatcacggacagccaggctttcgcgcaggtttccgccattgtgccgcaggagatacctctcacttctttttcaattttattctcccgctacaagggcttcttaaagaccgccgtcaaaggggccgccgcccttgacagcctgcaagacggcgacaaggtgcttatctgcgaaggctgcacccaccaccgccaatgcgacgacatagggacggtgaaattgccgcgctggatacggaaccactccaagaaagagccggaattcaatttttgttcggggggcgattttccgcaggatttatctgcttacaaggtcgtcgtccactgcggggcgtgcatgctgaacgagcgcgaaatgcactaccgcagaagacattccgaagagcaaaatattccgtttacaaattacggaatatctatcgcacatataaatggaattttaaagcgatgtatagcgatgttggatatttag

SEQ ID NO: 55466 - protein, 403 aa, Unknown
  Obtained from environmental sample
  DOMAIN (11)...(200): Elongation factor Tu GTP binding domain
  misc_feature (1)..(403): Xaa is any amino acid
MPMSMNETPSSNRLHIAFFGRRNAGKSSLVNAVTGQNLAIVSDMKGTTTDPVFKAMEILPLGPVVIIDTPGFDDDGKLGELRVNRTKQVLNKTDAAVLVLDGELPPDSALSAVEAELTGLFNEKKIPYLIALNKCDLCNTDSMSMASESEILPVSAKTGFNINQLKEKIAVLALEKEPEQRLVADLIKPNDFIVLVIPIDKAAPKGRLILPQQQMIRDILEAGANAITVRETELKQTLADIGKTPSLCITDSQAFAQVSAIVPQEIPLTSFSILFSRYKGFLKTAVKGAAALDSLQDGDKVLICEGCTHHRQCDDIGTVKLPRWIRNHSKKEPEFNFCSGGDFPQDLSAYKVVVHCGACMLNEREMHYRRRHSEEQNIPFTNYGISIAHINGILKRCIAMLDI

SEQ ID NO: 55467 - DNA, 1065 bp, Unknown
  Obtained from environmental sample
  misc_feature (1)..(1065): n is a, c, g, or t
atgaaagcactacaacctcaattcgatccagaagacaaagagttaatggaaaagctattatcaacaggccacattgaatacaaatatgcagtacggctgcgaacagtgttattacgggcacagggtgaaggaaccggagatattgccagatttttgggaatacatcaatcctcggtaagtgagtatataaaccgatataatgagcacggaattgattcacttttacgggacaagacccgcaaaccgggaaaagaaccaataagccaggatataaaaaacaagatctaccgcctggcatgcaatgaaaaaccaaaagatgaaacccattggagttgccggactttagcccagcgcgtagggatctcgcatactaaagtaaatcagatattgcaagaacatggattacaaccgcacagggtggggaaacggaattacagtaatgacatcaattttgaaacgaaactcattgacgtggtgggattatacctaaaaccgcctaaaaacgcgataatactgtgtatagacgagaaaagccagatacaagcgctggaacgaagccagccagtactgccgattatccggaatgttcccgagcggcaaagcgtagactatctgcggcacgggacgaccacgctgtttgcggcattggacgtgttaagcgggaatgtcatcggcgaatgcagcgagcggcatactgctgaagattacatccgttttttgaagaaggtggacagggcttgcgcgaaaaaaaaggtgctgcacattattacggataacctgtcggcgcataaaacgcccgcggtgtacgaatatcttgaaactgtgccggggagatttgtactgcattttatcccgacccattcatcctggctcaatttggtggaacggtggtttgcggagataacgaacaaacggatacggcggggaagctttgaatcggttccgcaattgatacgggcaataaaagattacatcaagacatggaacaagtcagggcgttcatttacctggacaaaaacacctgaagaaattcttgcaaaaataaataaagcaaaatcattttga

SEQ ID NO: 55468 - protein, 354 aa, Unknown
  Obtained from environmental sample
  DOMAIN (192)...(346): Integrase core domain
  misc_feature (1)..(354): Xaa is any amino acid
MKALQPQFDPEDKELMEKLLSTGHIEYKYAVRLRTVLLRAQGEGTGDIARFLGIHQSSVSEYINRYNEHGIDSLLRDKTRKPGKEPISQDIKNKIYRLACNEKPKDETHWSCRTLAQRVGISHTKVNQILQEHGLQPHRVGKRNYSNDINFETKLIDVVGLYLKPPKNAIILCIDEKSQIQALERSQPVLPIIRNVPERQSVDYLRHGTTTLFAALDVLSGNVIGECSERHTAEDYIRFLKKVDRACAKKKVLHIITDNLSAHKTPAVYEYLETVPGRFVLHFIPTHSSWLNLVERWFAEITNKRIRRGSFESVPQLIRAIKDYIKTWNKSGRSFTWTKTPEEILAKINKAKSF

SEQ ID NO: 55469 - DNA, 981 bp, Unknown
  Obtained from environmental sample
  misc_feature (1)..(981): n is a, c, g, or t
ttgaaagaaataggcaacgaccttgcaagcaatatgaccgaaactgcggcggcggtaaacgagatcacttccaatatccagagcatcaagagcagggttataaaccagagcgccagcgtaaccgaaaccaacgccactatggaacaggttattgtcaacatcaacaaactcaacggccatgttgacaaccaaagcagaaacgtttcccaggcgtcgtccgccattgaggagatggtggcaaatatcaactcggtaacaaatacgctggtaaacaacgccaccaatgtaaacacattaatagaagcctccgaagtaggaaagacaggattgcaggaagtggcgtcggacattcatgaaatatcgcgcgagtcggaaggcttgctggaaattaacacggtaatggaaaatatcgccagccagacaaacctgctttctatgaacgccgcgatagaagcggcgcacgccggagaggcgggaaaaggcttcgccgtagtcgccgacgaaatccgcaaactggcggaaagttcaagcgagcagtccaaaactatcggcactgtactgaagaaaatagcggaatcaataaataaaattacaggctccactaacaatgtgttggataagttcgaagcgattgactcgggagttaaaaccgtatcacagcaggaagaaaatatccgcaacgcgatggaagaacaggaacagggaagcaaacaggtattgaacgctcaaagcagtttaagcgaacttacccaagaggtaaaaagcagttccgaagaaatgcttaacggcagtcaggaagttatgcatgaaagccagaatcttgaaaggatgacacaggaaataacaagcggcatgaacgaaatggcttccggcgcggaacaagtaaatgtcgcggtacaccatgtcaacgagataagcgccaaaaaccgtgaaagcattgataatctgatacaagaagtttcgcgcttcaaggtggagtaa

SEQ ID NO: 55470 - protein, 326 aa, Unknown
  Obtained from environmental sample
  DOMAIN (69)...(282): Methyl-accepting chemotaxis protein (MCP) signaling domain
  misc_feature (1)..(326): Xaa is any amino acid
MKEIGNDLASNMTETAAAVNEITSNIQSIKSRVINQSASVTETNATMEQVIVNINKLNGHVDNQSRNVSQASSAIEEMVANINSVTNTLVNNATNVNTLIEASEVGKTGLQEVASDIHEISRESEGLLEINTVMENIASQTNLLSMNAAIEAAHAGEAGKGFAVVADEIRKLAESSSEQSKTIGTVLKKIAESINKITGSTNNVLDKFEAIDSGVKTVSQQEENIRNAMEEQEQGSKQVLNAQSSLSELTQEVKSSSEEMLNGSQEVMHESQNLERMTQEITSGMNEMASGAEQVNVAVHHVNEISAKNRESIDNLIQEVSRFKVE

SEQ ID NO: 55471 - DNA, 360 bp, Unknown
  Obtained from environmental sample
  misc_feature (1)..(360): n is a, c, g, or t
ttgcttccctgttcctgttcttccatcgcgttgcggatattttcttcctgctgtgatacggttttaactcccgagtcaatcgcttcgaacttatccaacacattgttagtggagcctgtaattttatttattgattccgctattttcttcagtacagtgccgatagttttggactgctcgcttgaactttccgccagtttgcggatttcgtcggcgactacggcgaagccttttcccgcctctccggcgtgcgccgcttctatcgcggcgttcatagaaagcaggtttgtctggctggcgatattttccattaccgtgttaatttccagcaagccttccgactcgcgcgatatttcatga

SEQ ID NO: 55472 - protein, 119 aa, Unknown
  Obtained from environmental sample
  misc_feature (1)..(119): Xaa is any amino acid
MLPCSCSSIALRIFSSCCDTVLTPESIASNLSNTLLVEPVILFIDSAIFFSTVPIVLDCSLELSASLRISSATTAKPFPASPACAASIAAFIESRFVWLAIFSITVLISSKPSDSRDIS

SEQ ID NO: 55473 - DNA, 1542 bp, Unknown
  Obtained from environmental sample
  misc_feature (1)..(1542): n is a, c, g, or t
gtgcccggtcatatgcaccttgacaacattgccaaagcggccgcggacggagtccgcatggccggcgggacgcccgtgatctttcctgtaatcggagtgtgtgacggaatagcgatgggtcacgagggtatgcgttattcgcttcccacaagggagctaatcgccgactcggttgagtgcatggcgactgcccacgcttttgacggactcgtctttatccccaactgcgacaagatagtgccgggtatgctgatggcatcggcgcggcttaaccttccctctgtttttgtttcgggcggccccatgcttgccggacgcaaggacggaaaaccccttacccttaccaccatgtttgaggcggtaggcgccgtagccgccggaaagatcagcgaacaggaacttgaggagcttgaaaacctttcctgcccgggctgcggttcctgcgccggaatgtttacggctaaactcatgaactgcgtaaccgaggctctgggcatggctctgccgggcaacggcacaatacccgccgtaatggcggagcgcgtgcgtctcgcgaaaaaaaccggaatgttgataatggacgttctaaaaaaagatctgcgccccaaaaacatactcactcaggcggcgtttatgaacgccctcgccctggacatggcgctgggctgttccacaaataccgcgcttcatcttccggcaatagccggggaagcgggcgtcaagctcgacctggaactccttaacaaagtaagcgcaattacgcctaacctctgccgcctcgccccggcgggaaaggacgcgattgaggatttgcacgcggccggcggaattcccgcggtcttaaaagaactttccaaaaagaaccttgtcgatctgaaagccgcgaccgtgtacggctgtctcggcgacacgctgaaaaaagccgttaaccgcaaccccgatgtcattaggccgctggaaaacccttattccgcgacaggcgggcttgccgcgttaaagggaaacatcgcgcaggatggctgcgttgtcaagcgcagcgcggtagcggattccatgctgaaacacgaggggccggcgagggttttcgattccgaggaaaccgcgttcgacgcaatcatgggaaagaagataaaagccggagacgtagtagttatacgttacgaagggcccaggggcggccccggcatgaaggagatgctcgctcccaccgcggcccttgccggcatgggccttgacgacaaggtggcccttatcacggacgggcgtttctcgggcgcttccaagggcgcctctataggacacgtatcgcctgaggctgcgttgggcggaaacatcggcatcatcaaggaaggggacataatcgccattgacattgacggactttcgataaacgtgaagattaacgaagaagaaatcgcgcggcggaaaaaaaattggaagcctctttcaaagatacacacaggctaccttgcccgttatgccgcgcaagtcggctcggccgctcagggcgcggtttttacagagccgcgtaaaggagattga

SEQ ID NO: 55474 - protein, 513 aa, Unknown
  Obtained from environmental sample
  DOMAIN (2)...(507): Dehydratase family
  misc_feature (1)..(513): Xaa is any amino acid
MPGHMHLDNIAKAAADGVRMAGGTPVIFPVIGVCDGIAMGHEGMRYSLPTRELIADSVECMATAHAFDGLVFIPNCDKIVPGMLMASARLNLPSVFVSGGPMLAGRKDGKPLTLTTMFEAVGAVAAGKISEQELEELENLSCPGCGSCAGMFTAKLMNCVTEALGMALPGNGTIPAVMAERVRLAKKTGMLIMDVLKKDLRPKNILTQAAFMNALALDMALGCSTNTALHLPAIAGEAGVKLDLELLNKVSAITPNLCRLAPAGKDAIEDLHAAGGIPAVLKELSKKNLVDLKAATVYGCLGDTLKKAVNRNPDVIRPLENPYSATGGLAALKGNIAQDGCVVKRSAVADSMLKHEGPARVFDSEETAFDAIMGKKIKAGDVVVIRYEGPRGGPGMKEMLAPTAALAGMGLDDKVALITDGRFSGASKGASIGHVSPEAALGGNIGIIKEGDIIAIDIDGLSINVKINEEEIARRKKNWKPLSKIHTGYLARYAAQVGSAAQGAVFTEPRKGD

SEQ ID NO: 55475 - DNA, 303 bp, Unknown
  Obtained from environmental sample
  misc_feature (1)..(303): n is a, c, g, or t
gtgtgtatctttgaaagaggcttccaattttttttccgccgcgcgatttcttcttcgttaatcttcacgtttatcgaaagtccgtcaatgtcaatggcgattatgtccccttccttgatgatgccgatgtttccgcccaacgcagcctcaggcgatacgtgtcctatagaggcgcccttggaagcgcccgagaaacgcccgtccgtgataagggccaccttgtcgtcaaggcccatgccggcaagggccgcggtgggagcgagcatctccttcatgccggggccgcccctgggcccttcgtaa

SEQ ID NO: 55476 - protein, 100 aa, Unknown
  Obtained from environmental sample
  misc_feature (1)..(100): Xaa is any amino acid
MCIFERGFQFFFRRAISSSLIFTFIESPSMSMAIMSPSLMMPMFPPNAASGDTCPIEAPLEAPEKRPSVIRATLSSRPMPARAAVGASISFMPGPPLGPS

SEQ ID NO: 55477 - DNA, 612 bp, Unknown
  Obtained from environmental sample
  misc_feature (1)..(612): n is a, c, g, or t
atggaaacaacacaaacaactaatcccctcagttttgagacggtctggtcggctttaatggaagaccgggagcgtttgaaggaaaccgaacgaattatgaaagaaagctctgaacggcttgaacgggagatgaaggaatttgaccggcagatgaaagaaagcgcggcggatttcaataaaaaacttggagaatatatcaatctttttggcgaagttactgaatacgagatggcgcccaaaatgcgcgagaagtttattgagttagggttcacttttcccaaagcagaacggaatgtcagtatcagggactatgctaataatatttttcttgaaattgatgttatgctggaaaatggcgatgaagctgtactggttgaaataaaaaccaaacttaccgttgaacgcataaatgaccatatagaccgccttgagaaaatgcgaaagtatgccgatttacgcggtgacaagcgtgcatttctgggcgcagttgcgggagttgtggtaactgataaagaaagaaattacgcattggaacaaggtttttatttaatagaaccatctggacaagaccttagtattactccgccaggcggcaaacccaaagaatggtaa

SEQ ID NO: 55478 - protein, 203 aa, Unknown
  Obtained from environmental sample
  misc_feature (1)..(203): Xaa is any amino acid
METTQTTNPLSFETVWSALMEDRERLKETERIMKESSERLEREMKEFDRQMKESAADFNKKLGEYINLFGEVTEYEMAPKMREKFIELGFTFPKAERNVSIRDYANNIFLEIDVMLENGDEAVLVEIKTKLTVERINDHIDRLEKMRKYADLRGDKRAFLGAVAGVVVTDKERNYALEQGFYLIEPSGQDLSITPPGGKPKEW

SEQ ID NO: 55479 - DNA, 414 bp, Unknown
  Obtained from environmental sample
  misc_feature (1)..(414): n is a, c, g, or t
atggggcttatacatacagagatcacggtaaaaaataccagggacgtttttaaggcagaggaagggcttatcgatgagcaggaaatccggcaagcaacgattcaggccatggtcgataccggagcgagtacgcttgtaatcaacgaggaacttcgcaaacaattggggcttgcggtgcgggcagaacgccaggttaccctggcaaatgaaaccaaagtaaaatgtcttttgacagaaccggttgaaatccgctggaaagacagagacacaatctgcaaggcttatgttattccggaagccaaggaagtcctgttaggcgcacttccgcttgaggatatggacttaatcatcgaccccaagaagcaggagataaccggagcgcacggcgacgaaattattttaatagcaaaatga

SEQ ID NO: 55480 - protein, 137 aa, Unknown
  Obtained from environmental sample
  misc_feature (1)..(137): Xaa is any amino acid
MGLIHTEITVKNTRDVFKAEEGLIDEQEIRQATIQAMVDTGASTLVINEELRKQLGLAVRAERQVTLANETKVKCLLTEPVEIRWKDRDTICKAYVIPEAKEVLLGALPLEDMDLIIDPKKQEITGAHGDEIILIAK

SEQ ID NO: 55481 - DNA, 576 bp, Unknown
  Obtained from environmental sample
  misc_feature (1)..(576): n is a, c, g, or t
atgggaattttagactctattaaaaagaccgcggcagactcgcttaagaaggctgcggctactacggtaaataccgcagccgctacctcaaaggccgcggcggcctcgtcgtccaaggcggcggaggcagccatttccaaggcagcggcattggtaggatcaaaggtcggaggcaccgcgcagagtaccccgccggcggcaccgccggctgcgccgaatcgggcggccgcagacgcggcaacggcggcggcggcggccaaggcggcagcattggtaggatcaaaagccgcgcccgcgcncgcgccaaaggaactgacacgggccgaggtggaggcaatcatcgaagccagggtaaaagcgaagggcaatccttccaactggagggtttcgattgtcgatcttatgtcggctttggacatgaacagcagctttgattcgcgcaaggctcttgccgccaggctgaactattccggcgcctcccccgacggttccgctgaaaaaaatatgtggcttcacgccgagttgttaaaagcccttgcccaaaacgaaggcaaggtgccgtcgaacctgctatag

SEQ ID NO: 55482 - protein, 191 aa, Unknown
  Obtained from environmental sample
  misc_feature (1)..(191): Xaa is any amino acid
MGILDSIKKTAADSLKKAAATTVNTAAATSKAAAASSSKAAEAAISKAAALVGSKVGGTAQSTPPAAPPAAPNRAAADAATAAAAAKAAALVGSKAAPAXAPKELTRAEVEAIIEARVKAKGNPSNWRVSIVDLMSALDMNSSFDSRKALAARLNYSGASPDGSAEKNMWLHAELLKALAQNEGKVPSNLL

SEQ ID NO: 55483 - DNA, 411 bp, Unknown
  Obtained from environmental sample
  misc_feature (1)..(411): n is a, c, g, or t
ttgacggacaaaatgaacctgcttttttttgaactgggtaagctgccgaaagaggtttcggcggacgatatgcggctattatggctgacgctttttaaggcggacacggaagaggagcttgcaaagatagaatcgatggaggtaccggtaatggaaaaggcgatacaggcgtatcatcagataacggcggagtccatgtttcgcgagagtatgcggctatacgaattggcccggcacaacgaggcgtcagcgttgcgccatgcgcgggatgagggcaaggcagagggcaaggcagaaggtgaggtagagaaagctcttgacattgcccggaagatgaagaaggctgggcggcctttggatgaaattacggaattcaccggccttccagcagaatccattgaagaaatgtga

SEQ ID NO: 55484 - protein, 136 aa, Unknown
  Obtained from environmental sample
  misc_feature (1)..(136): Xaa is any amino acid
MTDKMNLLFFELGKLPKEVSADDMRLLWLTLFKADTEEELAKIESMEVPVMEKAIQAYHQITAESMFRESMRLYELARHNEASALRHARDEGKAEGKAEGEVEKALDIARKMKKAGRPLDEITEFTGLPAESIEEM

SEQ ID NO: 55485 - DNA, 324 bp, Unknown
  Obtained from environmental sample
  misc_feature (1)..(324): n is a, c, g, or t
gtgtttacggagaaagaatatttttttaagggacactttcccgagtaccctgtagttcccggtgtaatccttgttgagacaatggctcaatgcggcggcgcaggcttgcggaaattgggagtgatgggcgacgacgctctgttcttctttgctacggtggataaagtaaaattccgccgtcaggttcgccccggcgatgaagtccgctgtgagatagagaaccttcgcgtctctcctaagatgattaaacagcagggcaaagcttatgtcggcgatgaagttgcggcggaagcggaatggatgtgcttggtaggaagtaaataa

SEQ ID NO: 55486 - protein, 107 aa, Unknown
  Obtained from environmental sample
  DOMAIN (16)...(97): Thioesterase superfamily
  misc_feature (1)..(107): Xaa is any amino acid
MFTEKEYFFKGHFPEYPVVPGVILVETMAQCGGAGLRKLGVMGDDALFFFATVDKVKFRRQVRPGDEVRCEIENLRVSPKMIKQQGKAYVGDEVAAEAEWMCLVGSK

SEQ ID NO: 55487 - DNA, 1206 bp, Unknown
  Obtained from environmental sample
  misc_feature (1)..(1206): n is a, c, g, or t
atgccgataaaacccatggtaagaaacaatatctgtctgaacgctcatcctgtggggtgtgcagtcgatgtaaagaatcagattgaatacgcaaagaaacatttgactaaaaccgaaggcgcgccgaaacttgttttggttgtcggctgttctaatggctacggccttgcaagcagaatatgcgccggctttgggtacaacgctgctactgtcggtctgtctcttgaacatgagccgtcggcaaagcgaacggatactccgggcttttatcataatcaagcgtttgacaaggaagcggaaaaagaaggacttgtttcaatctccataaacgccaacgcttatgccgatgaaacaaaaaccatagcggctcaagcgattagggaagccgccgccaaagcgggcattccggcaaagatcgatttatttgtttactcgcttgcgtctcctgtaagattagatcccaagacgggtattttgcacaggtctgtaattaaacctatcggcaaaaccttttcaggcaaaactcttaacatgatgaccggaacattcagcataatggaagcggagcctgccagcgatgaagatattcataacactgtaaaagttatgggcggcgaagactgggagttatggatggatgcgctggataaggaaggacttttctccgcacagacacgcacattagcatatacttatttgggtcctgaattatcgtgggctatttataaaaacggaactatcggcaaggcaaaagaagaccttgaacgagcgtgccgcgagataaataaaaaattcaaagagaataaaaaaattgcgggcgcatgggtctccgtaaataaagctcttgttacgcgagcaagcgcggtaataccgattatcccattctatatttcatgtctttttaaggttatgaaagatatgggtcttcacgaaggctgtatagagcagattacccgtctttaccgtgatttcctttattcccctgccgctgtaaaagacgcgggagcagtaccagtagacagcgggaaacgcatccgtattgacgactgggaaatgcgcgatgatgtgcaaaaagcggttatcaaaagaatggatatggtaacgcctgaaaatgtgtttacagaaacggatataaacggatttaaacatgatttcttggaagctcacggctttgacgttaaaggcgttgattacgacgctgattag

SEQ ID NO: 55488 - protein, 401 aa, Unknown
  Obtained from environmental sample
  DOMAIN (1)...(401): Short-chain alcohol dehydrogenase
  misc_feature (1)..(401): Xaa is any amino acid
MPIKPMVRNNICLNAHPVGCAVDVKNQIEYAKKHLTKTEGAPKLVLVVGCSNGYGLASRICAGFGYNAATVGLSLEHEPSAKRTDTPGFYHNQAFDKEAEKEGLVSISINANAYADETKTIAAQAIREAAAKAGIPAKIDLFVYSLASPVRLDPKTGILHRSVIKPIGKTFSGKTLNMMTGTFSIMEAEPASDEDIHNTVKVMGGEDWELWMDALDKEGLFSAQTRTLAYTYLGPELSWAIYKNGTIGKAKEDLERACREINKKFKENKKIAGAWVSVNKALVTRASAVIPIIPFYISCLFKVMKDMGLHEGCIEQITRLYRDFLYSPAAVKDAGAVPVDSGKRIRIDDWEMRDDVQKAVIKRMDMVTPENVFTETDINGFKHDFLEAHGFDVKGVDYDAD

SEQ ID NO: 55489 - DNA, 324 bp, Unknown
  Obtained from environmental sample
  misc_feature (1)..(324): n is a, c, g, or t
atgccggaagtcctgacttttgaatttgccgaacatcaaatttttatgtgccacggacatcgttacagttcatacggcggatataacactcttgtagcggcggcaagaaattcaaacgcggacatcgccttatgcggtcacagccacattccatttaataaaacgatgagcggcgtcagaatcatcaatccgggaagcgtaggccgtccgcgaagcaggatcggcgcaacattcgcggttattgagtgtcctgaggataaaccgtttattgtaaattttttcggaatcggcgtacagaacgttattcatgaattggaaatataa

SEQ ID NO: 55490 - protein, 107 aa, Unknown
  Obtained from environmental sample
  misc_feature (1)..(107): Xaa is any amino acid
MPEVLTFEFAEHQIFMCHGHRYSSYGGYNTLVAAARNSNADIALCGHSHIPFNKTMSGVRIINPGSVGRPRSRIGATFAVIECPEDKPFIVNFFGIGVQNVIHELEI

SEQ ID NO: 55491 - DNA, 894 bp, Unknown
  Obtained from environmental sample
  misc_feature (1)..(894): n is a, c, g, or t
atgatcgcgagccacgccgcgcttattgagtggtttgatcctctgcttgtacttgccacaattcaaaaagaaaaatgtacggcggtttacggcgtacccacaatgtttatcgccgaattaaatcaccccatgtttaaaatgttcgatctttccagtctgcgcacgggaattatggcgggctctccttgcccgatagaggcgatgcgtcgggtaatcgatcttatgtacatgaaggaagttactatttgttacgggctgacagaatcatcgcccgttatgacccagacgcgcttcgatgacgatatcactacaaaagtggaaacagtaggcagagcattgccgggcgtagaagttacaatccgtgaccccgacacgggcgaagaatgtcccgacggcgtacacggagagttttgctgccgaggctacaacacaatgaaaggttactacaaattgcccgaagccaccgcccaatgtatcgacaaaaacggctggcttcattcgggcgacaggggagtgaaggataaggacggcaattttagagttacggggcgcttaaaagacatgataatccgcggaggagaaaatatttctcccaaagaagtagaggactttttgtatacaatgccgggcgttaaggacgtgcaggtagtgggaattaccagcgagaaatacggcgaagaagtaggcgcttttgtcattctccaccccgacataaaaatgaacgtggaggatgtgcgcgactattgccgcgataaaatcggcaggtacaaaatccccaaatatgtgttctttgttgacagttacccgcttacatcaagcggcaagatacaaaagtatctgttacgcgaaatgggggataaactggttaaagagcaggcgcaggggaatacttga

SEQ ID NO: 55492 - protein, 297 aa, Unknown
  Obtained from environmental sample
  DOMAIN (1)...(216): AMP-binding enzyme
  misc_feature (1)..(297): Xaa is any amino acid
MIASHAALIEWFDPLLVLATIQKEKCTAVYGVPTMFIAELNHPMFKMFDLSSLRTGIMAGSPCPIEAMRRVIDLMYMKEVTICYGLTESSPVMTQTRFDDDITTKVETVGRALPGVEVTIRDPDTGEECPDGVHGEFCCRGYNTMKGYYKLPEATAQCIDKNGWLHSGDRGVKDKDGNFRVTGRLKDMIIRGGENISPKEVEDFLYTMPGVKDVQVVGITSEKYGEEVGAFVILHPDIKMNVEDVRDYCRDKIGRYKIPKYVFFVDSYPLTSSGKIQKYLLREMGDKLVKEQAQGNT

SEQ ID NO: 55493 - DNA, 1230 bp, Unknown
  Obtained from environmental sample
  misc_feature (1)..(1230): n is a, c, g, or t
ttgctggcaaacgatctggacaacatttttgaattccaggcgaaactgccggatacttacacctcggtaaggaaatcaatcttcgatgcctacaacagttattacgataagtccatggaaacgcttttcaaggaagcgccggaatacctttccgggccgaacaacgtgtacgtgcttagcagttcccctgcgtcaagtttcccggaactcagtttcgtggatccggatgacgattattggacgcttaccaacctgaacaagtccaaaaaaagttatcccctggacgatgacgggatgctgcatcacactccggtatccgggttttccttctataaggttaaaaggcccctttccgtgtccgtcgaaacaattagcaccgatccaaaatatatcatggatctgatcctccgcaatatacgcaccgaaaggaatctttggggcaatgacaaataccggatactctcttacggggaaccttcctccatgggatctttcaaggatgcgctcggaaggacatggatcaccgcctattggctcataggctttgaggacgaagtccagataatgtatatcctccccctgcccaacggaccggtcgttgttacaaccaagcaggacagcatgttccttcacgtttacgaatgggatatgcacaagacatgcgatcatctctttgcggcctactccggctcttttgaagaatggaataattttatcgcccttaaacagtttattcccgattttctgaaagacattcgctttaattggaagagcggcgaacaggatttttccttcagcagcggccccctgtccatcagcgctgacaagcgggtatttgactggaatgcccgttccgaattgtttctggctcattcatggtacaaaatcagcggcaaaccggaattcggcatccgcagggtaatcctgtatggcgatcaaaggtacaaagaatatgttcatctctatcggaatattaagcccgatccgaaactgggcactaacgccatggaaaactggaacgatctggttaaagaaaagccgccctttgacgggaaaccggtcctgtcgcccaaagataacaacggctttgcaggggctatcctgaaagcgcgccggcccaatcccgatgtgcttttttccctttacttttccatggagaatccccaagacgaagaaaatataagccgcaggtttgaagcgtttaaaacaggcgtgtctgtagaattttaa

SEQ ID NO: 55494 - protein, 409 aa, Unknown
  Obtained from environmental sample
  misc_feature (1)..(409): Xaa is any amino acid
MLANDLDNIFEFQAKLPDTYTSVRKSIFDAYNSYYDKSMETLFKEAPEYLSGPNNVYVLSSSPASSFPELSFVDPDDDYWTLTNLNKSKKSYPLDDDGMLHHTPVSGFSFYKVKRPLSVSVETISTDPKYIMDLILRNIRTERNLWGNDKYRILSYGEPSSMGSFKDALGRTWITAYWLIGFEDEVQIMYILPLPNGPVVVTTKQDSMFLHVYEWDMHKTCDHLFAAYSGSFEEWNNFIALKQFIPDFLKDIRFNWKSGEQDFSFSSGPLSISADKRVFDWNARSELFLAHSWYKISGKPEFGIRRVILYGDQRYKEYVHLYRNIKPDPKLGTNAMENWNDLVKEKPPFDGKPVLSPKDNNGFAGAILKARRPNPDVLFSLYFSMENPQDEENISRRFEAFKTGVSVEF

SEQ ID NO: 55495 - DNA, 675 bp, Unknown
  Obtained from environmental sample
  misc_feature (1)..(675): n is a, c, g, or t
atgcggaataaaataataaactcggctgatgaggctgtggccccgataaaagacggttcagttattatggtcggcggttttatgacctgcggtacgccggaaattttaattggcgcgctggttaaaaaaggcgttaaaaatcttaccattatttgcgacgatggcggatggccggacaagggcgtcggcaggctcatagccaacggtcaagcaaagcgcctaatcgcgtcccatgtggggcttaatcccgaagtcgcaaggcgctctaataccgatgtcgaagccgacaagctcgacttgacgcttgttccccaggggacgctcgccgaacgtataagggcgggcggcgcgggacttggcggcgttcttactccgaccggagtggggactataatagccgagggtaaacagattgttaatattgacggcagggattttctgctggagaaacccctccgcgccgagttcgcctttatcagggcgtccaagattgatacattcggtaacacggttttttacggaaccacaaaaaattttaaccctcttatggcgactgccgccgattatgtaattgccggagcctgtgagattgtggaaaccggcagtatcgatcccgactttatccatctttcaggcatttttgtaaacgcgatagtaggaggggaaaaaccatga

SEQ ID NO: 55496 - protein, 224 aa, Unknown
  Obtained from environmental sample
  DOMAIN (6)...(221): Coenzyme A transferase
  misc_feature (1)..(224): Xaa is any amino acid
MRNKIINSADEAVAPIKDGSVIMVGGFMTCGTPEILIGALVKKGVKNLTIICDDGGWPDKGVGRLIANGQAKRLIASHVGLNPEVARRSNTDVEADKLDLTLVPQGTLAERIRAGGAGLGGVLTPTGVGTIIAEGKQIVNIDGRDFLLEKPLRAEFAFIRASKIDTFGNTVFYGTTKNFNPLMATAADYVIAGACEIVETGSIDPDFIHLSGIFVNAIVGGEKP

SEQ ID NO: 55497 - DNA, 471 bp, Unknown
  Obtained from environmental sample
  misc_feature (1)..(471): n is a, c, g, or t
atgttctttgacagcgcggtatctttcggaataatacgcggcggccatgtggacgctaccattattggggcgctggaagtggacgaaaaaggcagcatctcaaactggatagtgcccggaaaatcgattcccggcatgggcggcgcaatggatctaatggtagcggcgaaaaaggttatagtcgtaacgactcataccaataagggcgcgccgaagatactgaaaaattgtacccttccgtatggagctttggacgctgttgacatgatcattacggaaatgggggtgatggaaattacgcctgacggcattatgctgacagagctgcaccccgattatacaatagagcaggtacaagcggcgacaggggcgagattaattatcagcgggaatttgaaacgcgatgatctaggggttcagggtacggggttcggggttcagggtaacaaaaagaaaattgttgtaacgtaa

SEQ ID NO: 55498 - protein, 156 aa, Unknown
  Obtained from environmental sample
  misc_feature (1)..(156): Xaa is any amino acid
MFFDSAVSFGIIRGGHVDATIIGALEVDEKGSISNWIVPGKSIPGMGGAMDLMVAAKKVIVVTTHTNKGAPKILKNCTLPYGALDAVDMIITEMGVMEITPDGIMLTELHPDYTIEQVQAATGARLIISGNLKRDDLGVQGTGFGVQGNKKKIVVT

SEQ ID NO: 55499 - DNA, 807 bp, Unknown
  Obtained from environmental sample
  misc_feature (1)..(807): n is a, c, g, or t
gtggacgacgccccgaatattctagtattcttccgcagcgaggcgtcccggctttccttttcctgcgatgtcatgttaagcggagaggcggcgattgagcagatcgaaaaaaacggcctgtacgacatttactttattgactggaagatgcagggcattaacggcattgaaaccgccggaaagatcaagggactgagcgccggaaagccgaagccctcaatagtccttatgaccaccgccgccgaatggaagcttatagaggcggatgccaaagcggccggcgttgaacattatttacagaagccgctgttccattccgatattgttgattgtcttaacaaatttttcggcccggagaatattgatggaagtcaggcgcaggataaaaaagataacttcgaaggtttccgtatcctgcttgttgaagacatagagataaaccgcgaaattgtgcttgcatatctggaaccgaccgggctggttatagactgcgccgtaaacggaaaagccgccgtgaaaatgtttacaagcgcggaaaaaccctacgatatggttttcatggatctgcaaatgccggagatggacggttatgaggccgccttcaaaatcagacaattcgagaaaggccgttatgggggaaggatgggagcggtaaagcaaattccgattatcgccatgacagcaagcgtatcccgtaatgatattgaaaaatgccttgaggctggcatgaacgaccacataggtctgcccctggatgttgaagagttgctgaagaaactccgttcctgcctgcgggcgcctcaatag

SEQ ID NO: 55500 - protein, 268 aa, Unknown
  Obtained from environmental sample
  DOMAIN (1)...(113): Response regulator receiver domain
  misc_feature (1)..(268): Xaa is any amino acid
MDDAPNILVFFRSEASRLSFSCDVMLSGEAAIEQIEKNGLYDIYFIDWKMQGINGIETAGKIKGLSAGKPKPSIVLMTTAAEWKLIEADAKAAGVEHYLQKPLFHSDIVDCLNKFFGPENIDGSQAQDKKDNFEGFRILLVEDIEINREIVLAYLEPTGLVIDCAVNGKAAVKMFTSAEKPYDMVFMDLQMPEMDGYEAAFKIRQFEKGRYGGRMGAVKQIPIIAMTASVSRNDIEKCLEAGMNDHIGLPLDVEELLKKLRSCLRAPQ

SEQ ID NO: 55501 - DNA, 984 bp, Unknown
  Obtained from environmental sample
  misc_feature (1)..(984): n is a, c, g, or t
ttggcgagtctttgtttggactttacccacaagattgagtatgatgattttacaaatctgatggaagataacagctccctgccgaataattttgtccgcgatactattatgagcgctccaagcaaggacatgatgaactctctttccaaaagcgttctgactctttacgcctatgatgataatcctgatgatatttccgtcgagaacgtgcttcgacaatcgatcaatcttatctctcaatttcccctgcttgccgtttatggttataaatcttatttacattatcacgaagataaaagtcttatgattcatccgccattgaaaggcgcgtccattgcggaaaatattcttcatatgctgcgaccggattcaagctatactgatcttgacgctaaacttttggatctcgcccttgtgcttcacgccgaacatggcggcggcaacaactcaacttttacaaatcatgtcgttacctcgtcccataccgatacatattccgcggttgtcgcctcgcttgcgtcgttaaaaggcccacggcacggcggcgcgaatatcaaagttgtgcagatgttccgcgatatgatggaaaatgtttcagactggaacgacgatgccgagataaacgtatatcttgaaaaacttcttaataaggaaggctttgaccgttccggtttaatttacggaatgggtcacgcggtttactccctgtcggatccgcgcgcgcttatcttccgtcaatttgtcgaacagcttgcaaaagaaaaagatcggtacgatgagtacaaactttatacaaaggtagaaatattagcgccgcanattatcgggcgtattcgtcagatatacaagggcgtaagcgccaatatcgatttttattcaggttttgtttacagcatgctcgatattcccgaagactttttacgccgctgtttgccgttgcgcgtatcgccggttggagcgcccacaggctggaagaaattgtga

SEQ ID NO: 55502 - protein, 327 aa, Unknown
  Obtained from environmental sample
  DOMAIN (1)...(317): Citrate synthase
  misc_feature (1)..(327): Xaa is any amino acid
MASLCLDFTHKIEYDDFTNLMEDNSSLPNNFVRDTIMSAPSKDMMNSLSKSVLTLYAYDDNPDDISVENVLRQSINLISQFPLLAVYGYKSYLHYHEDKSLMIHPPLKGASIAENILHMLRPDSSYTDLDAKLLDLALVLHAEHGGGNNSTFTNHVVTSSHTDTYSAVVASLASLKGPRHGGANIKVVQMFRDMMENVSDWNDDAEINVYLEKLLNKEGFDRSGLIYGMGHAVYSLSDPRALIFRQFVEQLAKEKDRYDEYKLYTKVEILAPXIIGRIRQIYKGVSANIDFYSGFVYSMLDIPEDFLRRCLPLRVSPVGAPTGWKKL

SEQ ID NO: 55503 - DNA, 852 bp, Unknown
  Obtained from environmental sample
  misc_feature (1)..(852): n is a, c, g, or t
atgatggccgagtcgtcagcaatcagtcaaagacaaccgtcggctatgttaaaaaagataaaagcgtccatagacggaataaccgtgtcttccgatgaggttctttcccgttttgaagttattgattctgaagtgaagacagtttctcagcatgaacaaaatatccgcaacgcgatggaagaacaggaagtgggggggaagcaaatactggactccatgctgcacctgaaagagacaagcgtatcggtaagaaaaggatcggaagaaatgctggaatcaggcaatcacctgaccaagcaaacagacgatttcattaatatcagcaataccgtggtaaccggcatgaacgatatcgtaaacggatccatgcaggagataaaagaagcggtaacccttgtagatgaaatgagcgccgagaacaacaagaacttcgatcagcttaaagaggaatcacataaatttaaggtcgaatcagccgatgaaaagaaaaaaatcatcgtgattgatgatgatggaaccgtccttaccatgacaaaaagcatactgagtggtgtttatgatgttaccgcggttaattcaggcaaagacgcgctgcagttattcttccagggttatattccccatttggtgttattggatttgagtatgcctgaaatgagcggatgggataccttccttagaattcgggatttgaccaaattacacaacgttccgatagcgatatacacgacatcggaagactcgaaagacaaggccaaagcacaggagataggagccgttgattttatcaaaaagccctgcangaaagaggaactgttagcagggatcaaacaaataatagttaaaagttaa

SEQ ID NO: 55504 - protein, 283 aa, Unknown
  Obtained from environmental sample
  DOMAIN (163)...(277): Response regulator receiver domain
  misc_feature (1)..(283): Xaa is any amino acid
MMAESSAISQRQPSAMLKKIKASIDGITVSSDEVLSRFEVIDSEVKTVSQHEQNIRNAMEEQEVGGKQILDSMLHLKETSVSVRKGSEEMLESGNHLTKQTDDFINISNTVVTGMNDIVNGSMQEIKEAVTLVDEMSAENNKNFDQLKEESHKFKVESADEKKKIIVIDDDGTVLTMTKSILSGVYDVTAVNSGKDALQLFFQGYIPHLVLLDLSMPEMSGWDTFLRIRDLTKLHNVPIAIYTTSEDSKDKAKAQEIGAVDFIKKPCXKEELLAGIKQIIVKS

SEQ ID NO: 55505 - DNA, 558 bp, Unknown
  Obtained from environmental sample
  misc_feature (1)..(558): n is a, c, g, or t
atggagaagatgccttatgtgctgcggcccgacaaccttaacccgcaagcacccggaacaggctcgcgaatatacaaagccggcggtcaaaaggtggcggttgccgtgctgctggggcaaagcggttttggaaggctccattcaacaagcccctttatccgcgtccccgtgcttctggaacgcctgcgccaggaaacgccttacgtcatcattgattttcacgcccaggcgactgccgaaaagaaaacacttttctttactgccgatggccgctgctctgcggttataggttcgcataccagagtgcagacagccgacgaggaaatactccccaaagggacagccgtaataagcgacgccgggcgcacaggctcaagcgaatccgtcggcggctgcgacaccgcatcccgcatacaggaataccttagcggcatccccgaatggacaaaagacgcctgggaaaagcccgaactgcagggcgtgtatatcgacatcacccccgacggcagggcgaaatcaatagaaagggtaagaatacaagtgaaaagtgaagagtga

SEQ ID NO: 55506 - protein, 185 aa, Unknown
  Obtained from environmental sample
  misc_feature (1)..(185): Xaa is any amino acid
MEKMPYVLRPDNLNPQAPGTGSRIYKAGGQKVAVAVLLGQSGFGRLHSTSPFIRVPVLLERLRQETPYVIIDFHAQATAEKKTLFFTADGRCSAVIGSHTRVQTADEEILPKGTAVISDAGRTGSSESVGGCDTASRIQEYLSGIPEWTKDAWEKPELQGVYIDITPDGRAKSIERVRIQVKSEE

SEQ ID NO: 55507 - DNA, 1227 bp, Unknown
  Obtained from environmental sample
  misc_feature (1)..(1227): n is a, c, g, or t
ttgaaaatcgtagttatcggtgcccaatggggcgatgagggaaaaggaaaaattgttgattatcttgcaaacgaagcgcagataattgtccgctacgccggcggagccaacgccggacacacaattgttacaggcggagaacaatacgctctgcaccttattccttcggggattttttatcctgataaaatttcaattctgggcgccggcatggttatcgatccaaaggcgttattcgacgaaataaaaatgttggaagaccgcggcattgacacaaaaggcagaatttttatctccgaccgcgcgcacatcgttctgcccaaatacattcaaattgacaaggaacgcgacgcggcgcgtaagaaaccgataggtacgacaggccgcggcataggtatcacctattcaatgaagagcgaaagagacagtatccgcatagcggatcttacatggaaagaaaaaatggacgagcttgataaatccgaccgcgattttcttgcgccgtatacggacaaactccttgaaatgtcagttgaccttagcacttaccttatgcaccgtaaaaattcacaggtgctttttgaaggcgcccaagggacgcttcttgatctcgatttggggacatatccctatgtgtcaagcggaatgtcatgcgctgccggcgccgccattggcggctgcatcggcccgcggggcatcgacaaggtgctgggggttttcaaagcctactccaccagagtcggaaacggccccctgcccagcgagtttgatcccgattccgaggacgaactctgccgctttgtccgcgatacgggccgtgaatacggcgtgaccacagggcggcccaggcgctgcggctatctggatcttgtttccctccgttacgcctgcctgaccaattctattgacagcctggtgatgacccacctggatgtgtatgacacgtttgacgaaataaaagcctgcatcgcgtatcgcatagataatcgtatcgtagaaacttttccctcttccattgaagaactgaaaaaggcacagcctctgcttcggagtttttccggctggaaacattcactggcagacgccctgacctatgaagaatttcccgaagcggccatggagtatattgattttattgaacgttactgcgaaacgcctgtagacattgtgtccgtgggctttgaccgaaaggcaactataatcagaaagagtccgtggactcgctga

SEQ ID NO: 55508 - protein, 408 aa, Unknown
  Obtained from environmental sample
  DOMAIN (2)...(401): Adenylosuccinate synthetase
  misc_feature (1)..(408): Xaa is any amino acid
MKIVVIGAQWGDEGKGKIVDYLANEAQIIVRYAGGANAGHTIVTGGEQYALHLIPSGIFYPDKISILGAGMVIDPKALFDEIKMLEDRGIDTKGRIFISDRAHIVLPKYIQIDKERDAARKKPIGTTGRGIGITYSMKSERDSIRIADLTWKEKMDELDKSDRDFLAPYTDKLLEMSVDLSTYLMHRKNSQVLFEGAQGTLLDLDLGTYPYVSSGMSCAAGAAIGGCIGPRGIDKVLGVFKAYSTRVGNGPLPSEFDPDSEDELCRFVRDTGREYGVTTGRPRRCGYLDLVSLRYACLTNSIDSLVMTHLDVYDTFDEIKACIAYRIDNRIVETFPSSIEELKKAQPLLRSFSGWKHSLADALTYEEFPEAAMEYIDFIERYCETPVDIVSVGFDRKATIIRKSPWTR

SEQ ID NO: 55509 - DNA, 657 bp, Unknown
  Obtained from environmental sample
  misc_feature (1)..(657): n is a, c, g, or t
atgaagatatntacggaaattgcaaaaataccagttaatgacgcggtatcttttgatacagaaaatataactacggaacaaataaaggaagatgcagaataccaaggggtacgaattaaattaaccgcacgtcttgaccgcagccgtagtgttttacagtttgatataggatttggtgatattattgttccgcagcctgttgatataatgtatcctacgctcttggatatggaaccgccacgtttgaaggtgtactctttagaatcggtcattgctgaaaaatttcaagcaattgtatatctagccgatttgaacagtagaatgaaagatttttatgatatttacgaattaagccgcagccgtgattttgacggtgcctctctgtctgaagctatagttcaaacctttaaacgcaggaatacagaattcatctcatgtccgatagtttttacagatgattttcttttattaccgaataaacaaatacaatggcaggcattccaacgcagaacaggtatagtcaatgttcctaaagatttttcggttattattgccactattaagaggttcttgtttcctgtctatgaagttttggcaaacaaaggagtatttagtggtttatgggacaaggagaaagaaatgtggtataaattttga

SEQ ID NO: 55510 - protein, 218 aa, Unknown
  Obtained from environmental sample
  misc_feature (1)..(218): Xaa is any amino acid
MKIXTEIAKIPVNDAVSFDTENITTEQIKEDAEYQGVRIKLTARLDRSRSVLQFDIGFGDIIVPQPVDIMYPTLLDMEPPRLKVYSLESVIAEKFQAIVYLADLNSRMKDFYDIYELSRSRDFDGASLSEAIVQTFKRRNTEFISCPIVFTDDFLLLPNKQIQWQAFQRRTGIVNVPKDFSVIIATIKRFLFPVYEVLANKGVFSGLWDKEKEMWYKF

SEQ ID NO: 55511 - DNA, 1287 bp, Unknown
  Obtained from environmental sample
  misc_feature (1)..(1287): n is a, c, g, or t
atgcgggcagtcggtgtgcggtggacttttgcccccgtgctgggcgttgcggaagatgtgcgctggggccgcacctacgaaagtttcagcgaaaatgtgggcattgtaacactcatgggcgccaatgtgattaagggtttgcaggataacggcgctgccgcgtgtatgaagcattatctgggcgaaggacagacgatagacgggcgtaatcagggcaacgccctgctggatcgcgccggaattgagcgtattcttccgccgtaccgggcggctattgaagcgggggcattctcactgatgccctcgttttccagcgtgaacggcgttaagatgcatgaaagcaaagatttactgaccgacttgttaaaagaagaaatgggctttgaagggtttattgtttccgattgggcggccgttacgcaattatccggtggcagttataaagcgcagattgccaatgcgatcaacgccggcgttgatatggtgatggcaaccaacggacgcgacagttgggtaaattttatcagacatttgcaggaactggttaacgaagggaaggttccgatggcacgtattgatgacgcggtactgcgcatcctccggttcaagcagcgcataggcctgtttgacgcgccgttgacagaaaaagcaggcacaatcggctctgacgcgaaccgggcggcggcgcggacgctggttgctgactcgctcgtactattacagaacaagaataatgttatcgctcaacttccgtcctancagcgtattctggtagcgggacaaggcgcacacgatataggaatgcaatgcggcggctggacaataacatggcagggatcaaacggcaaaattacaaagggaacaacaatactggaaggaatacaagcggcgacaaaagacaaaattgcggtttcttatgccgaagacggaaatgtagccggctcttttgacgctgtaatcgccgtaatcggagagaccccttacgcggaaactgaaggcgaccgctccggcaatatcagtatccggagcaaagatatggaaatgctcaagaatgtctataaatatcgctgccctgtaattgttttaatgctgtccggccgcccgatgaacataggcgacgagtacaaaaaatggtcggcgtttatcgccgcatggctgccggggacagaaggcgcgggagtcgcggacgttcttttcgggggtaaaagttttgtggggcgcaccccttacacatggcgcaaaacaattaaaggagaggttttgtatccgtttggggcggggctttag

SEQ ID NO: 55512 - protein, 428 aa, Unknown
  Obtained from environmental sample
  DOMAIN (1)...(164): Glycosyl hydrolase family 3 N terminal domain
  misc_feature (1)..(428): Xaa is any amino acid
MRAVGVRWTFAPVLGVAEDVRWGRTYESFSENVGIVTLMGANVIKGLQDNGAAACMKHYLGEGQTIDGRNQGNALLDRAGIERILPPYRAAIEAGAFSLMPSFSSVNGVKMHESKDLLTDLLKEEMGFEGFIVSDWAAVTQLSGGSYKAQIANAINAGVDMVMATNGRDSWVNFIRHLQELVNEGKVPMARIDDAVLRILRFKQRIGLFDAPLTEKAGTIGSDANRAAARTLVADSLVLLQNKNNVIAQLPSXQRILVAGQGAHDIGMQCGGWTITWQGSNGKITKGTTILEGIQAATKDKIAVSYAEDGNVAGSFDAVIAVIGETPYAETEGDRSGNISIRSKDMEMLKNVYKYRCPVIVLMLSGRPMNIGDEYKKWSAFIAAWLPGTEGAGVADVLFGGKSFVGRTPYTWRKTIKGEVLYPFGAGL

SEQ ID NO: 55513 - DNA, 762 bp, Unknown
  Obtained from environmental sample
  misc_feature (1)..(762): n is a, c, g, or t
ttgattcccgaacctgaggcgaaaaacactgcgcctgtaatagcctgcgccatagaatatgcagttaagaccggcggctggaaccgtacaatgatggtacttaccagcgatcacgttataaagccgcctgatgtttttcttaaagacctatattctgccgtacaattcattaatcaaaataaacttattgtctttggtatttctccaataaggcaggaaaccggttatggatatattgaagcgtcagaaaaacttgctgaaaattcttatgttgttaccgcatttcatgaaaaaccaaatcttggtacggcagaacattttatagcagcaaaaaattatttttggaattcaggaatgtttgcgtttcgctgtgactttttatctgatgaataccgccgtttatcgccggaagtaatctgcccatttgaagatctcaagcctcccgataacaagtcatttacaaaaattaatgatctttgcattttggataattggtcaggattggataatgcttataatcaggcaaatcaaatttcttttgatcatgcaattactgaaaaatgctcggaaattattatgatccgcgcgtcttttgactggattgatataggcagttgggatgattatgccctccttctttcaagtaattcctctgctgctatcgataccggtaaagatgtttatactgcgggtacagacagttgttttgtagattccgatattcctgtagctcttgccggagttgagaccttattgtcgtaa

SEQ ID NO: 55514 - protein, 253 aa, Unknown
  Obtained from environmental sample
  DOMAIN (1)...(216): Nucleotidyl transferase
  misc_feature (1)..(253): Xaa is any amino acid
MIPEPEAKNTAPVIACAIEYAVKTGGWNRTMMVLTSDHVIKPPDVFLKDLYSAVQFINQNKLIVFGISPIRQETGYGYIEASEKLAENSYVVTAFHEKPNLGTAEHFIAAKNYFWNSGMFAFRCDFLSDEYRRLSPEVICPFEDLKPPDNKSFTKINDLCILDNWSGLDNAYNQANQISFDHAITEKCSEIIMIRASFDWIDIGSWDDYALLLSSNSSAAIDTGKDVYTAGTDSCFVDSDIPVALAGVETLLS

SEQ ID NO: 55515 - DNA, 777 bp, Unknown
  Obtained from environmental sample
  misc_feature (1)..(777): n is a, c, g, or t
atgaaagtcgccattatccactattggctagtcaatatgcgcggcggagaaaaggtattagggtctctgcttgaaattttcccggatgcggatattttcacccatgtttacaacccaaaggcggtttcatccctaataaaaaacaggcgcgtaattgcttcgcgtataaaccgcctgcctttcgcaaaaaaaatctaccagctttatatgccgcttatgaccaatgccctgaatgatttcaacctgcaatcatacgatcttgtaatctcaagtgagtcgggtccggccaagggagtaatacctaacccaagcgcataccacttatgctattgccacagtcctatgcgctatttatgggatatgtatcatgagtatttccatggagcaaatcctctagtacgcgtttttatgaaacacatcactccgaaactcaggctctgggatgccgtttccgcaaatcaggttgattttttcattgccaattcatgttatgtggcgcaacgcataaggcgctgttacaaccgggaggcggcggtagtttatccgccggttgagatagaaaaatttctatccgttgaacggcaatcaggggattattatctcttttttggacagcttacatggtataaacgggctgaccttgccatcgaagcctgcatcgcttccggtcggcgtcttgtagtcgcaggagcaggcaaaaaaaacaagaaatggctggagtataagaaacaggccttattacctttatgggcagggtttccgatgaagacgcactga

SEQ ID NO: 55516 - protein, 258 aa, Unknown
  Obtained from environmental sample
  misc_feature (1)..(258): Xaa is any amino acid
MKVAIIHYWLVNMRGGEKVLGSLLEIFPDADIFTHVYNPKAVSSLIKNRRVIASRINRLPFAKKIYQLYMPLMTNALNDFNLQSYDLVISSESGPAKGVIPNPSAYHLCYCHSPMRYLWDMYHEYFHGANPLVRVFMKHITPKLRLWDAVSANQVDFFIANSCYVAQRIRRCYNREAAVVYPPVEIEKFLSVERQSGDYYLFFGQLTWYKRADLAIEACIASGRRLVVAGAGKKNKKWLEYKKQALLPLWAGFPMKTH

SEQ ID NO: 55517 - DNA, 357 bp, Unknown
  Obtained from environmental sample
  misc_feature (1)..(357): n is a, c, g, or t
atgggcagggtttccgatgaagacgcactgaaactttattcgtccgccaaggcgctgctttttcccggtattgaggatttcggaattattccggtagaagcccaggcctcaggctgtccggtgatcgcgtaccgccgcggcggtgcgcttgatacagttattgaaggtgtaacgggcgttttctttgatgaacaaactcccgcttcactcattgaagcaatcaatcgctttgagtcgatgaaaacggaaggcgtctttaataacaggaaggcattttccggccatgtacgtcaatttacaccggaagttttcaaagaaaaggtccaaaggattattgaagaacgaaaacgcttgtaa

SEQ ID NO: 55518 - protein, 118 aa, Unknown
  Obtained from environmental sample
  misc_feature (1)..(118): Xaa is any amino acid
MGRVSDEDALKLYSSAKALLFPGIEDFGIIPVEAQASGCPVIAYRRGGALDTVIEGVTGVFFDEQTPASLIEAINRFESMKTEGVFNNRKAFSGHVRQFTPEVFKEKVQRIIEERKRL

SEQ ID NO: 55519 - DNA, 393 bp, Unknown
  Obtained from environmental sample
  misc_feature (1)..(393): n is a, c, g, or t
gtggagttgagcaaactagaccagatagtaaagaaacctgtgaatgacatgactgaccttgagaagtgggcagtgttttttgaatatgcagacattcccagtcaacgtgaaaggataaacaaaataatcgaatcgaaggaggcgcttcaaatggccggaaatttattgatgagtataagtcaaaatgaaaaggaacaggctgtatttcgcagccgcagaatgtaccaaactgacatggactctaatatagcaaccgctgtagacagagggaggcgtgagggcaggttagctatcgctcaaaacatgttgaaacgcaacagacctatagatgagattatcgaggatactggtttaacccgtgaggaagtggagaatttgggcaagcttatatga

SEQ ID NO: 55520 - protein, 130 aa, Unknown
  Obtained from environmental sample
  misc_feature (1)..(130): Xaa is any amino acid
MELSKLDQIVKKPVNDMTDLEKWAVFFEYADIPSQRERINKIIESKEALQMAGNLLMSISQNEKEQAVFRSRRMYQTDMDSNIATAVDRGRREGRLAIAQNMLKRNRPIDEIIEDTGLTREEVENLGKLI

SEQ ID NO: 55521 - DNA, 837 bp, Unknown
  Obtained from environmental sample
  misc_feature (1)..(837): n is a, c, g, or t
atgaaaagactctttttattactgttattgattccgtcatttgtttttgccgagggactgtattcccccacatggggctttagtttagatcttcccgaatattatgaatattccgaaggggacggcaaagacaggttttcttttaaggggccggaaggcgcggtctttgatttggttgtctacaacggggtttacgcgaatataaaagaaatggcggaagatgtaaccaaaagactggggaacaaaggcgacattgattattttaaatataacggcaagcaggcggctgttttagaattgaatttcggagacaaattaaacggctggggaatttgcgttgagcttgcgggaactcaaggacgccgtccgcctctgcttctttccctcgcttacggtccttccgcaaagagcgaattgactttgtttcacttttccgcgcttgattcaatcgcgccctcggacgcggaaacattatatcccggcatgataacggagtacagttatccgcgtggagagcagataattacccccattgccgcgagcggagtaaccgcggctatatgcaaaaacgacgccgaggccgcgcaggtttttattgaaagggaatttaaaattttatcgacttatgttaatacccccgcgtggcagaacgcgtggattcgctattacagatcgatataccgtgattcatacacaagggtaaaaaacatagccgaagcgctgattagaaaatgggggcgcggcaacgaaagggttttcgcgcagaaagcgcttacttttgtacaggggtttaaatacgaaagaaatcacgaaggcagcgattttttaacctggtag

SEQ ID NO: 55522 - protein, 278 aa, Unknown
  Obtained from environmental sample
  SIGNAL (1)...(17)
  misc_feature (1)..(278): Xaa is any amino acid
MKRLFLLLLLIPSFVFAEGLYSPTWGFSLDLPEYYEYSEGDGKDRFSFKGPEGAVFDLVVYNGVYANIKEMAEDVTKRLGNKGDIDYFKYNGKQAAVLELNFGDKLNGWGICVELAGTQGRRPPLLLSLAYGPSAKSELTLFHFSALDSIAPSDAETLYPGMITEYSYPRGEQIITPIAASGVTAAICKNDAEAAQVFIEREFKILSTYVNTPAWQNAWIRYYRSIYRDSYTRVKNIAEALIRKWGRGNERVFAQKALTFVQGFKYERNHEGSDFLTW

SEQ ID NO: 55523 - DNA, 627 bp, Unknown
  Obtained from environmental sample
  misc_feature (1)..(627): n is a, c, g, or t
gtgaaaaccctaaaaatattgtacgaagataatatttgtattgtaattgacaaaccggcagggctcgcggttcaaggcggaaaaggggttaaatcgtccgtagacgggattttggcggaaatgcgcgatcccgcaccacttctggttcaccgtctggacaaggacacctcgggggttctcctgaccgcgaaaacaaaggaagccgcagcggagttttcccggcttttgggggtggacaggcaggctgtaaagcggtacatcgcggtctgcgcgggaagccccgtaaaaaaagaggggtccatttcgcatgatttaatgatacggggcgtattgaaaaaatcggagacaaggtacaaagtgataaaaagcggtgaattctccgtcctggagcttgagcttggaacagggagaatgcaccaaatccgccgccaccttgccttaagcgggaatcctgtgcttggggacgataaatacggggattttgcgctaaacaagaaactgcgaaaagagaaggggcttaaacgcctgcttttacactcgttgcggcttgtgataaaaggcaaatatcaaattgacgtgacagcgcccttgcccgattattttgagccttttacttctttctcctga

SEQ ID NO: 55524 - protein, 208 aa, Unknown
  Obtained from environmental sample
  DOMAIN (12)...(147): RNA pseudouridylate synthase
  misc_feature (1)..(208): Xaa is any amino acid
MKTLKILYEDNICIVIDKPAGLAVQGGKGVKSSVDGILAEMRDPAPLLVHRLDKDTSGVLLTAKTKEAAAEFSRLLGVDRQAVKRYIAVCAGSPVKKEGSISHDLMIRGVLKKSETRYKVIKSGEFSVLELELGTGRMHQIRRHLALSGNPVLGDDKYGDFALNKKLRKEKGLKRLLLHSLRLVIKGKYQIDVTAPLPDYFEPFTSFS

SEQ ID NO: 55525 - DNA, 852 bp, Unknown
  Obtained from environmental sample
  misc_feature (1)..(852): n is a, c, g, or t
gtgcgggaaattgaaagaatatcaagcgatgaaatttacatggataacacccgcgacgccggatacgaattgccgcccgaaatggtaagccgatttttaagcgcggaaggggagaggcataagacgggatacaggtattgggcgcgcgcgtataactccggcgttgggaagtcggttgcggtttacaatactcaggcggctgccggaaaggtaaccgaacacgcaaggtcatttttagaaaatactgtttcccgtcttgaagaagcggctaaacacatggaagaacctccgataagcctctatgcgaataacgccggtttcttcggaaatatttggcgcgaagggccgcagtttatcgaagcccttttccgcatggcgcagggctacagggatttacaatttgtcactcccagcgcttatattttcagccggaagcttaattcccttcaggttgtcgctcccgaattttcctcgttgggcgttaacggctatgccgaaacatggctggacacttccaacgactggatataccgccaccttatccgctcaatggaaagaatgacggaattagccgagcgtttcccggacgacacgggcctgaaagaacgcgccttgaaccaggccgcccgcgagatactgcttgcccagtcttccgactgggcgtggcttcttcacaggcaggagtcaaccgaatttgcacgtaacaacgctgaaaacgccctgcgcaactttaccactatatacgaggccctgggcagcaattacatcagcaccgaatggcttacaactcttgagcgccgccacaatatcttcccgaatattaattaccgcgttttcaggagaaagaagtaa

SEQ ID NO: 55526 - protein, 283 aa, Unknown
  Obtained from environmental sample
  misc_feature (1)..(283): Xaa is any amino acid
MREIERISSDEIYMDNTRDAGYELPPEMVSRFLSAEGERHKTGYRYWARAYNSGVGKSVAVYNTQAAAGKVTEHARSFLENTVSRLEEAAKHMEEPPISLYANNAGFFGNIWREGPQFIEALFRMAQGYRDLQFVTPSAYIFSRKLNSLQVVAPEFSSLGVNGYAETWLDTSNDWIYRHLIRSMERMTELAERFPDDTGLKERALNQAAREILLAQSSDWAWLLHRQESTEFARNNAENALRNFTTIYEALGSNYISTEWLTTLERRHNIFPNINYRVFRRKK

SEQ ID NO: 55527 - DNA, 783 bp, Unknown
  Obtained from environmental sample
  misc_feature (1)..(783): n is a, c, g, or t
ttgactataacagcacggatcgcgaagcaagggttaagaggcagtaaaatggacagccgttacgcaatctcacttgttcttgccgcccatgtcccttttgtcagggaacaccgcaaagacgaagacttgtcacaggcgggggaagaaggccgcttttttgaatatgtttcggaaaccctgctgccgctcctgggcgttttagaccggctggaaagcgaccatgttcctttctgcttaggccttgccgtctctcccattcttatgttcctgttgggcgacgaacatcttctgaataaatacatgctttatacggacaaacaaattgaattcggcaaacaggaaatagagcgcaccgcggataacgccgaaatgaataagctggctcaagcctactgcgacgaattgctggaaagaagaatcgcctttaccgaacgctacgaaaaaaatattctgaaagcttttgatttttaccggcgcaagggaaaagttgaaattctggcaagcagcgcaaccaacgctttcctgccttttatcggacataatgccgaaacgcttcaggcgcagatggaaataccggtggcaggttaccgctgttactttatgaacagcccgcagggattctggctgccggctttgggctggacaaacgcgatagaaccgtatttaaaggcgtacaattttacatatacaatcgtggacagtcacggtttgttatacggcaaaccattgccggagaaggggagttttttccccgttaaacacctaacggcactcttattttag

SEQ ID NO: 55528 - protein, 260 aa, Unknown
  Obtained from environmental sample
  misc_feature (1)..(260): Xaa is any amino acid
MTITARIAKQGLRGSKMDSRYAISLVLAAHVPFVREHRKDEDLSQAGEEGRFFEYVSETLLPLLGVLDRLESDHVPFCLGLAVSPILMFLLGDEHLLNKYMLYTDKQIEFGKQEIERTADNAEMNKLAQAYCDELLERRIAFTERYEKNILKAFDFYRRKGKVEILASSATNAFLPFIGHNAETLQAQMEIPVAGYRCYFMNSPQGFWLPALGWTNAIEPYLKAYNFTYTIVDSHGLLYGKPLPEKGSFFPVKHLTALLF

SEQ ID NO: 55529 - DNA, 783 bp, Unknown
  Obtained from environmental sample
  misc_feature (1)..(783): n is a, c, g, or t
ttgggagcgaacctcaccatgtcggtggaaatgtacgaaacggaagacgggaatttagtcgccacgtcgggccttgtccgttccgaaaatatcgcggaccttgtggataaagccgccgccgtctgcgccgacatgtacaagacgttcttgagttccgtaccgaaacagccggtgacgtataccgcgccggtgtatcagacgcctgctcccacacccgcgccgacgccgacgtatcagcagtctatcgtagacggttcgggtatattgacagacagcagggacgggaagagatacaagacggtggttataggggggaagagatggatggctgagaatttgaattatcaggcgcaaacgggtaattcttggtgttatggcaacgataattccaactgcgataaatacggtaggttgtacgactggaatacggcaaagacagcgtgttctcccgggtggcatttgccgtcgcgtcaggagtggaataatttggttgctgcggctggcggtaaagagaatgcgggtaaaaagttgaaagcgaaaagcggttggtacggtaaaaaaggtaatgggacggatgactttggtttttcggccctgcctggcggctaccgcctctccgacggctatttcaacgatgccggcaactacggcaactggtggacggctacggagtacagtagcgtcaacgcctactaccggtacatgtactacgacgacgtcaacgtgttcgagaaccgcaactacaagagccgcggcttctcggcgcgctgtgttaaggactga

SEQ ID NO: 55530 - protein, 260 aa, Unknown
  Obtained from environmental sample
  misc_feature (1)..(260): Xaa is any amino acid
MGANLTMSVEMYETEDGNLVATSGLVRSENIADLVDKAAAVCADMYKTFLSSVPKQPVTYTAPVYQTPAPTPAPTPTYQQSIVDGSGILTDSRDGKRYKTVVIGGKRWMAENLNYQAQTGNSWCYGNDNSNCDKYGRLYDWNTAKTACSPGWHLPSRQEWNNLVAAAGGKENAGKKLKAKSGWYGKKGNGTDDFGFSALPGGYRLSDGYFNDAGNYGNWWTATEYSSVNAYYRYMYYDDVNVFENRNYKSRGFSARCVKD

SEQ ID NO: 55531 - DNA, 1137 bp, Unknown
  Obtained from environmental sample
  misc_feature (1)..(1137): n is a, c, g, or t
atgagtgacctttctaagatattgatagtagatgactccagagtgtttaggagcatacttgagaaaatgattgcaacaatccccggagttgaggttgttggtgctgtggatagtggcatagctgctattgagtttttaaagatacgctcagtagatctaatgactctggatgttgagatgcctggaatggatgggcttgcaacgctcaaaaagatgcttgcaagcaaagctgagcttaaatccgcgccagatgtgttgatggtaagctccttgacccgcacaggttcagacattacgctgaaagcccttgaatgcggagcttttgactttatagccaagcctgctccggagattcccaactcgcaagaaagccttcacagaatgctcaacaccaccatctctgcgtgggtatctcgcaaacacagaggagtggctattccagttcactccatagttcatcctgccgctacaggtactgctggtgcagccgctgctgccgctgcaggggctggtttcacctatactttggcaaaaccatctgtgcacacaaagcctatacaggcaatagtcataggagtttccaccggaggtccaaaatctttggcagatatgcttccaaagctttgctcaatgacacacctgccaattttgcttgtgcagcacatgcctcccaatttcacaaaatctttggcagatagccttaatgcaaaatgcgatcataaagtgatagaaggcttgcctggcaccgtagttgaagataaaacggtttatattgctccgggtggttgccatatggttgtaaattccaagggaacacgttatgttttagacaataacaataaccctccagaaaacggctgccgtccaagcgtggatgttttgttccgttctgcggctcaagcttaccctgcagattctcttgtgggagttatattaacgggaatgggcaacgatggcacgccctctttaccgcatttgaaaaacaaaaatgcctatttaattgctcaagatgaagaatcttctgttgtgttcggtatgcctcgcgcagcggctgcaaccggtttattggataaggtggcaactttaacacgtattcctgaagcgatacttgaacgtgtcaatttaggtaggaaataa

SEQ ID NO: 55532 - protein, 378 aa, Unknown
  Obtained from environmental sample
  DOMAIN (5)...(123): Response regulator receiver domain
  misc_feature (1)..(378): Xaa is any amino acid
MSDLSKILIVDDSRVFRSILEKMIATIPGVEVVGAVDSGIAAIEFLKIRSVDLMTLDVEMPGMDGLATLKKMLASKAELKSAPDVLMVSSLTRTGSDITLKALECGAFDFIAKPAPEIPNSQESLHRMLNTTISAWVSRKHRGVAIPVHSIVHPAATGTAGAAAAAAAGAGFTYTLAKPSVHTKPIQAIVIGVSTGGPKSLADMLPKLCSMTHLPILLVQHMPPNFTKSLADSLNAKCDHKVIEGLPGTVVEDKTVYIAPGGCHMVVNSKGTRYVLDNNNNPPENGCRPSVDVLFRSAAQAYPADSLVGVILTGMGNDGTPSLPHLKNKNAYLIAQDEESSVVFGMPRAAAATGLLDKVATLTRIPEAILERVNLGRK

SEQ ID NO: 55533 - DNA, 951 bp, Unknown
  Obtained from environmental sample
  misc_feature (1)..(951): n is a, c, g, or t
atgagtgcattaatgagtcatgatgagtacaatgtaattatcaaatatatttttgatatttgtggaatagttctgggcgatgacaagcagtacttaattgaacaacgcctctctcctattttaaacgaattcaactgcgaaacattttcgcagctcgcaggaaaactgagcaggggagaaaccacatttttaactcgtgaaaaaatgctgaatgccatgaccactaatgaaacttcgtggtttagagacgaacatccttatgagacattcagagaaaaaatcatgcccgatataatggaaactgttataaagcgcaaagagcgttcttggcagcgtcgcggtccgaaagttaggatgtggagcgtggcagcaagcacagggcaagagccttactctatgggtatgattattgcagatgtggttggcaataagggcatgggcttagttacaatggaagattttggaattttgggcacagatatttcttcaaaagtattatcaaaagctatggaaggcaaatacggtcctttggaagtggctcgcgggctaacttntgatatgcgaaaaaaatattttttgcaagaaggcgataattatattatcaacaatcaaattcgcaatattatagagtttaaagcattcaatattcaagacccattcacgcaaataggttcttttgatgttatattttgtcgcaacattttaatttacttcacagacgaagcaaaacgcaaaatccttgcgcagctttatcaaacacttgctccgggcggttatttgcttttaggttcggcagaaaatatgtacaacctcaacgatgagttcacaactgaaagatatggcgcgactacggtttacagaaagtcggcaagtgcgagtccaagtgcagctgctacaccttctccttttggctcggcttttgatttgtcacccagcaagtatacaatctaa

SEQ ID NO: 55534 - protein, 316 aa, Unknown
  Obtained from environmental sample
  DOMAIN (138)...(262): Methyltransferase domain
  misc_feature (1)..(316): Xaa is any amino acid
MSALMSHDEYNVIIKYIFDICGIVLGDDKQYLIEQRLSPILNEFNCETFSQLAGKLSRGETTFLTREKMLNAMTTNETSWFRDEHPYETFREKIMPDIMETVIKRKERSWQRRGPKVRMWSVAASTGQEPYSMGMIIADVVGNKGMGLVTMEDFGILGTDISSKVLSKAMEGKYGPLEVARGLTXDMRKKYFLQEGDNYIINNQIRNIIEFKAFNIQDPFTQIGSFDVIFCRNILIYFTDEAKRKILAQLYQTLAPGGYLLLGSAENMYNLNDEFTTERYGATTVYRKSASASPSAAATPSPFGSAFDLSPSKYTI

SEQ ID NO: 55535 - DNA, 1419 bp, Unknown
  Obtained from environmental sample
  misc_feature (1)..(1419): n is a, c, g, or t
atgtccataaagagatttcttggttttggtttcttccttctccttttcgccgcggcttttgtttttggccagtccgagcagcgttactataaaggcgctattttaaacgaggaagcgtacagtaagcttcccaaaaaagcggcccttgcgacccgcgcttacgaagggctgccaaaagccttttccctgaaacagtacgcgcccctgcccggggaccagaccaattacggaacctgcgtcgcgtgggcttcggcttatgcggccaggacaatctccgagtctgtggcgctgaaccgcaggaatcaaaccgagacaacccagaatgtcttttctccggtttatgtgtaccggaatatcaggcccgacgatcctgaatgtcagcgcggcgcccagatttttgacgctctggatttaatgcgggactcaggcgcggtcagaatgttggacattgagcgttccatggcttttcccaggattgatctggccaattacagggaaagcaggagataccccatcggcggttatgttaccctgttctccagagaggacaaacagaagcccgcccttatcacgcggatagtgaagaaaagccttgccgagggaaaacctgtcgttatcggcatgaacactccggattcgtttgttgaagcgaaaaacgtttggcagcccatggaaagccccaataatttttacggcggccatgccatgtgcgtggtgggctatgacgatgacaaaggcgcttttgagcttatcaacagttggggaaggaagtgggggaacggaggctttatctgggtgccctataaggcctttgtggactttgtaatggaaagctacgagatgatagaaaatctcgcaatctacagcgacacggtaaagtacgaaggcttcagccgtatagagatacttggacagggcgcgcccagagcggcggcccttgacctttcgcctgagggttattacaaaacctccgaatcgtttaccgagggaacacaattccgctttgtcgtaggggccggggagagcgcttatgtatattccttcgcggtctccaggcccgcgcgggacaacaatttttattcgcccatcctgatgttcccgcagaccggcgtctcgccgcttctcaattaccgcgacagcgccgtgatactgcccggtgaggacaagacccttgccctggacgcggaagcgggcacggaatatctggtgacgttgtactcgaaacagcccctggacatacaggccgttatgcgccgctttgtttcctttaaaggaactctcggagagcgcctgcggncagccacaggcagcaacccattgctctctctttcgtataacgctaaagaagcggcctttaccgcggcaacggataattcccgctccgtagccgctctggttgtggcgatagaacaccggtag

SEQ ID NO: 55536 - protein, 472 aa, Unknown
  Obtained from environmental sample
  SIGNAL (1)...(23)
  misc_feature (1)..(472): Xaa is any amino acid
MSIKRFLGFGFFLLLFAAAFVFGQSEQRYYKGAILNEEAYSKLPKKAALATRAYEGLPKAFSLKQYAPLPGDQTNYGTCVAWASAYAARTISESVALNRRNQTETTQNVFSPVYVYRNIRPDDPECQRGAQIFDALDLMRDSGAVRMLDIERSMAFPRIDLANYRESRRYPIGGYVTLFSREDKQKPALITRIVKKSLAEGKPVVIGMNTPDSFVEAKNVWQPMESPNNFYGGHAMCVVGYDDDKGAFELINSWGRKWGNGGFIWVPYKAFVDFVMESYEMIENLAIYSDTVKYEGFSRIEILGQGAPRAAALDLSPEGYYKTSESFTEGTQFRFVVGAGESAYVYSFAVSRPARDNNFYSPILMFPQTGVSPLLNYRDSAVILPGEDKTLALDAEAGTEYLVTLYSKQPLDIQAVMRRFVSFKGTLGERLRXATGSNPLLSLSYNAKEAAFTAATDNSRSVAALVVAIEHR

SEQ ID NO: 55537 - DNA, 801 bp, Unknown
  Obtained from environmental sample
  misc_feature (1)..(801): n is a, c, g, or t
atgggcagccccgtaatagagcttgatcgggaatcgtttcgggaagtcagacaccgggtacagataagcgcgttttatcttgccacaaaagaattgagcgtcggcgagttccgccgctttgtcgaagactcaaactatgttaccaccgccgaagccgacggcggagcctttgcttacgatgacgcgaagggcgaatccggtttccgcgctgacgtcacctggcgtaaccccggcttcaggcagggggatgatcacccggtggtttgcgtaagctggtttgacgcggtacagtactgcaactggctttcagtcaaagaagggcttaaacccgcgtataccattacaggtcaaaccgtaaactgggacaggagcgcgaatggttaccgcctgcccactgacgccgaatgggagtacgcctgccgagccggaacctcaactcctttttttacaggagagcgtatttccacaagccaggcaaattacaacggtaactttccttatggcattggcaacaaaggcttgtttcgcaaaattaccgtaagctccggctctttccctcccaacgcttggggcatttacgatatgcacggtaatgtctgggagtggtgctgggattattacaatctcccaaacgctggtccggtctcggatccaatcgggcctgcttccggcgcgcacaggataaaccgcggcgggggctggacatctcccggcaaatcattacgttcggctctccgctcaagcgacctccccgaaaccgccggcagcagtctgggcttccgcatagcanagaataaataa

SEQ ID NO: 55538 - protein, 266 aa, Unknown
  Obtained from environmental sample
  DOMAIN (7)...(264): Domain of unknown function (DUF323)
  misc_feature (1)..(266): Xaa is any amino acid
MGSPVIELDRESFREVRHRVQISAFYLATKELSVGEFRRFVEDSNYVTTAEADGGAFAYDDAKGESGFRADVTWRNPGFRQGDDHPVVCVSWFDAVQYCNWLSVKEGLKPAYTITGQTVNWDRSANGYRLPTDAEWEYACRAGTSTPFFTGERISTSQANYNGNFPYGIGNKGLFRKITVSSGSFPPNAWGIYDMHGNVWEWCWDYYNLPNAGPVSDPIGPASGAHRINRGGGWTSPGKSLRSALRSSDLPETAGSSLGFRIAXNK

SEQ ID NO: 55539 - DNA, 804 bp, Unknown
  Obtained from environmental sample
  misc_feature (1)..(804): n is a, c, g, or t
gtggacggacttccgaacacggtaaatgacgcgaccggcattgcaaaaaaactctcggggctgggttattcggtcgaagtcctgttcgacagcgatctggccggcatgagcagggcggtaagcgcgtggattcgacagctctccacggatcgggcaagcgaaggtttcttctggtacgccggccacggtatgcaggtagccggagaaaattaccttttgcccgttgatataaacgctgaagacgaggcaggcgtcgtttacggttcctatccgctgggacggcttctcctctcgctggaacagaccgccaggaacaagctcaatgtggtggtgctggacgcgtgccgggacaacccttttaaaaatcttccgggcggaagccgggggctttcccgtggttttaccactgttgagcacccgcctcaggatatttttgtcatgttttcaaccgccccaggcactgtcgcagcggacggcgacagcggaaagaacagcccttttgccgaagcttttctcaagtacatggactccgatgagatccttccggtaatggccggccttgtaacccgtgaaaccatgcgtctaacggacggcaaacagcggccttaccagaatggcagcatagtgagcgaactctactattcactctcttcaggcgcatctgcgcccgcgcgtgaactgccggcagggtctaacgtagcgtctctttctaccactcctgccggaaatccgccttctgtcgccgtgccttctccggctatggcggctatccccgccggaagtttaccatgggcagccccgtaa

SEQ ID NO: 55540 - protein, 267 aa, Unknown
  Obtained from environmental sample
  DOMAIN (3)...(215): Caspase domain
  misc_feature (1)..(267): Xaa is any amino acid
MDGLPNTVNDATGIAKKLSGLGYSVEVLFDSDLAGMSRAVSAWIRQLSTDRASEGFFWYAGHGMQVAGENYLLPVDINAEDEAGVVYGSYPLGRLLLSLEQTARNKLNVVVLDACRDNPFKNLPGGSRGLSRGFTTVEHPPQDIFVMFSTAPGTVAADGDSGKNSPFAEAFLKYMDSDEILPVMAGLVTRETMRLTDGKQRPYQNGSIVSELYYSLSSGASAPARELPAGSNVASLSTTPAGNPPSVAVPSPAMAAIPAGSLPWAAP

SEQ ID NO: 55541 - DNA, 678 bp, Unknown
  Obtained from environmental sample
  misc_feature (1)..(678): n is a, c, g, or t
ttggtcgttgagaatgcggttctgtacatgaaggattacctgggcgtaaaggcgaaagtcggcgctgtgtaccgccgtatatccgatgaataccttgaccctataacgtttttggcagattctctgattggcgtacctcatatcatggatgcttaccgcgcggggaatgtagcgataatcaatgcgcccggtaatggtgttgctgacgacaagggcgtttattattttgtacccaagatgataaaatactatctgggcgaagagccgattcttcaaaatgcgccgacatacctgccttactatgaagacgacctcaagtttacgcttgagaacatcaaacgccttgtcataaaggacgtatctgaggcaggcggctacggcgtagtgttcggcagcgaactgtcaaaagagaaattagctgaaatcaaggctcttattataaaagaacccaggcggttcatttcgcagaaggtcatagattttatcgatcttgatgtcatggatgaaaacggaggcaaaatccgccgaaaggctgactttagggcttacgtgctgaccggcaaaaccacgcgtgtgtgggcaagcgggcttacgcgtttctcacgcatcaaaggctcgttcattgtcaattcttcacaaggaggagggtttaaagatacatgggtattatttcggtag

SEQ ID NO: 55542 - protein, 225 aa, Unknown
  Obtained from environmental sample
  DOMAIN (80)...(224): Domain of unknown function (DUF407)
  misc_feature (1)..(225): Xaa is any amino acid
MVVENAVLYMKDYLGVKAKVGAVYRRISDEYLDPITFLADSLIGVPHIMDAYRAGNVAIINAPGNGVADDKGVYYFVPKMIKYYLGEEPILQNAPTYLPYYEDDLKFTLENIKRLVIKDVSEAGGYGVVFGSELSKEKLAEIKALIIKEPRRFISQKVIDFIDLDVMDENGGKIRRKADFRAYVLTGKTTRVWASGLTRFSRIKGSFIVNSSQGGGFKDTWVLFR

SEQ ID NO: 55543 - DNA, 540 bp, Unknown
  Obtained from environmental sample
  misc_feature (1)..(540): n is a, c, g, or t
ttggacatcaaggacaagtacggcgatcatcgccgtttcatacaggggtatttgtacgatgataaggactgcttcaccgtcagttcgacgctgcgtttcgcatatgacaacgcgctggtatgccggaatgtaatcggcagtgaggcgcttgcctacattcaactcgctattgacgcgttccattccagccgcaaggcaaaaaaccttcgcctgtcgctgatgccggtcattgattatctgctcgcgttctggggcagcgtagacgataaaatcgccagcggcgaggcgcgcacaattgttaaatgcggcaaactcgttgagcgtcttgatttgtattttagatttgcgtacgactacaatctcattaacagcgagtatgaaaagctgtgccatgtgcttgcgcgtgtgcgtaaaggtttcctcaacgcgcaccatctggcggtgctggttgaagtcctcgcaatagaggaaagctacaaggggcgttttgacgaagtgcttgacagcctaaataaactatttgaggaacaagccgcttga

SEQ ID NO: 55544 - protein, 179 aa, Unknown
  Obtained from environmental sample
  misc_feature (1)..(179): Xaa is any amino acid
MDIKDKYGDHRRFIQGYLYDDKDCFTVSSTLRFAYDNALVCRNVIGSEALAYIQLAIDAFHSSRKAKNLRLSLMPVIDYLLAFWGSVDDKIASGEARTIVKCGKLVERLDLYFRFAYDYNLINSEYEKLCHVLARVRKGFLNAHHLAVLVEVLAIEESYKGRFDEVLDSLNKLFEEQAA

SEQ ID NO: 55545 - DNA, 786 bp, Unknown
  Obtained from environmental sample
  misc_feature (1)..(786): n is a, c, g, or t
ttgagaaccgtccgtttccggtatcagacggagctggcgttttcatcgcccgcgtcagatcaccggtttctgctgaggatactgccgcaaagcgacagcagacagcggataaaaaatctgtcgtggcgcgtagagccgtcgcccgccgatacaatctggcagaccgttgacggcttcggtaacgacgcgcttgcgggacacatcaatgaaccgcacaatcgctttcttttcgggatagaggggactgcggaagtatcgggcgaaccgtatattgcatccggcgaaccgccgcgcatattgctctacccgacggagttgacgtgcgctcatagcaggcttgtcgatttctacaatgatgttatccgtttcgcccctgtaaatcacctggaacgtattcaatttttctcacaggccgtccacgcccgcctgcactacaagcgcggcgcgacttcgtattcaacttcagtggcggaagcctttgatatcggcgttggcgtctgccaggactacgcgcaaatactgcttactctcctgcgcctcgacaaaatcctctgccgctatgtcgcgggcctcgcctccgattacggcgaaacccacgcctgggtcgaggcgtggacaggggatcaatacattggcatagaccccacgcgtgacaaattcatagacgaaggttacatcgccctatcaagaggccgcgactttattgacagctcaatcgaacgcggagtgttcaaaggcgcgtgccgcgggacgcagacggtgagcctgagcatggaaatttcgtga

SEQ ID NO: 55546 - protein, 261 aa, Unknown
  Obtained from environmental sample
  DOMAIN (162)...(216): Transglutaminase-like superfamily
  misc_feature (1)..(261): Xaa is any amino acid
MRTVRFRYQTELAFSSPASDHRFLLRILPQSDSRQRIKNLSWRVEPSPADTIWQTVDGFGNDALAGHINEPHNRFLFGIEGTAEVSGEPYIASGEPPRILLYPTELTCAHSRLVDFYNDVIRFAPVNHLERIQFFSQAVHARLHYKRGATSYSTSVAEAFDIGVGVCQDYAQILLTLLRLDKILCRYVAGLASDYGETHAWVEAWTGDQYIGIDPTRDKFIDEGYIALSRGRDFIDSSIERGVFKGACRGTQTVSLSMEIS

SEQ ID NO: 55547 - DNA, 480 bp, Unknown
  Obtained from environmental sample
  misc_feature (1)..(480): n is a, c, g, or t
atgggcaaactcatggagtatgttgatatctgcattgcaaacgaagaagacgccgccgatgttttcggcatacgcgcaagcggcagcgacgtaacaacaggaaaaatcagccatgacggctacaaggaagtcgccgccgctcttatcaaaaaattcggttttaatcaggttgcaattaccttacgcgaatcaatttccgccaacgacaacaactgggcagccatgctctgcgccggaaacgatttttatttttcccaaaaatatcccgttcacatagtagacagggtaggcggcggcgacagtttcggcgccggcttaatctacgcgaaccttcagggaatgccgccccaggaaggccttgaatttgccgttgccgcaagctgtcttaaacacacgatagaaggcgactacaacttagtttctgttgacgaagtgaaaaaactggcaggcggcaacgcttcgggcagggtgcagcggtaa

SEQ ID NO: 55548 - protein, 159 aa, Unknown
  Obtained from environmental sample
  misc_feature (1)..(159): Xaa is any amino acid
MGKLMEYVDICIANEEDAADVFGIRASGSDVTTGKISHDGYKEVAAALIKKFGFNQVAITLRESISANDNNWAAMLCAGNDFYFSQKYPVHIVDRVGGGDSFGAGLIYANLQGMPPQEGLEFAVAASCLKHTIEGDYNLVSVDEVKKLAGGNASGRVQR

SEQ ID NO: 55549 - DNA, 624 bp, Unknown
  Obtained from environmental sample
  misc_feature (1)..(624): n is a, c, g, or t
ttgtgtgaattcttcgtgtatattgttctcaataatttttctcgatatactgaactcatgagtaaaataatcacattcggcgaaataatgctgcgtcttgcgcccgagggctattaccgctttgttcaggcaaacactttcggcgcgacttacggcggcggcgaggcaaatgccgctatttcgctcgcgggtttcggcatggacgccgcctttgttacaaaacttcccaagcacgagatagggcaggcggctgtaaacaaactgcgcgaattcggagttgacacttcgttaattgtccgaggcggaagcagggtaggaatttattttttggagaagggcgcgtctcagcgtccgtcaaaagtaatttacgatcgcgccaattccgctattgcaacagccgccgaaaccgatttgacgggacaaaatttttcagggcgcaagctggtttcattttacgggaataacccccgcgctttccgacagcgccgctgcgatatgtcttgccgcctgcaaaacggcgcgctcaaaagaaatcaccgtttcntgcgatctaaattaccgcacaaacctatggccgcgcgaaaaagccgcggaagttatgggcaaactcatggagtatgttga

SEQ ID NO: 55550 - protein, 207 aa, Unknown
  Obtained from environmental sample
  misc_feature (1)..(207): Xaa is any amino acid
MCEFFVYIVLNNFSRYTELMSKIITFGEIMLRLAPEGYYRFVQANTFGATYGGGEANAAISLAGFGMDAAFVTKLPKHEIGQAAVNKLREFGVDTSLIVRGGSRVGIYFLEKGASQRPSKVIYDRANSAIATAAETDLTGQNFSGRKLVSFYGNNPRAFRQRRCDMSCRLQNGALKRNHRFXRSKLPHKPMAARKSRGSYGQTHGVC

SEQ ID NO: 55551 - DNA, 405 bp, Unknown
  Obtained from environmental sample
  misc_feature (1)..(405): n is a, c, g, or t
atgagaacttttgagccgaaaaaaataaaagcgcttgccatcgacctggacgggactatacttctgccgaatacgacgctcggcgagcgcacattgtggtgtattaaaaaattaatttcaaagggaatgaaaataataatcgctacgggcagggctatcgaagcggcagagcgtttcagagtcgctatgggggctgaggggcctatggtgtattttaacggggccgaggttgtggatatgccttcagggaaaatactgcataccaatttgatcggcaaggatgttgtggatttcggaacggatatcgcgcgaagtttggggattcattttcaggtttacctgccggcgggcatttcgccggaaacggggaaacgcgatattaagcaaaagtggaagcgctgttaa

SEQ ID NO: 55552 - protein, 134 aa, Unknown
  Obtained from environmental sample
  misc_feature (1)..(134): Xaa is any amino acid
MRTFEPKKIKALAIDLDGTILLPNTTLGERTLWCIKKLISKGMKIIIATGRAIEAAERFRVAMGAEGPMVYFNGAEVVDMPSGKILHTNLIGKDVVDFGTDIARSLGIHFQVYLPAGISPETGKRDIKQKWKRC

SEQ ID NO: 55553 - DNA, 669 bp, Unknown
  Obtained from environmental sample
  misc_feature (1)..(669): n is a, c, g, or t
ttggccgagcgaccgagaaaaaacgccgagatggttctcgccgtactggataaaatcactccgatgcttgaagacggcaaacccattcgtttagccgatttgaacgacgatgaaaaagcggcgatttacgattgccattttataaccgccaagccccagctttatgtgtgcaatgtcgatgaagaaggaatacgttccattgccgcaggcggcgatgggaatgttcatgtgcaagccgtgaaaaaacgagcggcggcggaaggttcaaccgcaatttgtatctgcggcaagttcgaggcggaactttcggacataaccaatatagaagaaaaacttgcgttccttgaggagcttggtcttaaagagcccggactttcttctcttatccgttcggcgtataaacttcttaacctgcgtactttttttactgcgggagaagatgaatgccgagcgtggacaattcacgcaggcgacagcgccccaaaagcggcgggcgttattcacacggattttgaaaaaggttttataaaagcggaagtttatacatgcgatgatatttttaaatacggaacagaagcgaaaataaaagaagcgggaagatatcgagttgaaggaagagattatatcgttgaagacggcgatgtaatgttctttaaatttaatgtttaa

SEQ ID NO: 55554 - protein, 222 aa, Unknown
  Obtained from environmental sample
  DOMAIN (138)...(221): Protein of unknown function (DUF933)
  misc_feature (1)..(222): Xaa is any amino acid
MAERPRKNAEMVLAVLDKITPMLEDGKPIRLADLNDDEKAAIYDCHFITAKPQLYVCNVDEEGIRSIAAGGDGNVHVQAVKKRAAAEGSTAICICGKFEAELSDITNIEEKLAFLEELGLKEPGLSSLIRSAYKLLNLRTFFTAGEDECRAWTIHAGDSAPKAAGVIHTDFEKGFIKAEVYTCDDIFKYGTEAKIKEAGRYRVEGRDYIVEDGDVMFFKFNV

SEQ ID NO: 55555 - DNA, 717 bp, Unknown
  Obtained from environmental sample
  misc_feature (1)..(717): n is a, c, g, or t
atggacaagctgacaatcctcagagaaaaattcggctactcctcatttcgtcccggtcaggaagaagtgatcgacgctattcttgcgggtacagacgctcttgcggtgatgccgacgggagcgggaaaatctctctgctaccaaatccccgctctcatgcttgacggcatgaccatcgttatttcaccgcttatttctctaatgaaggatcaggtcagcgcgctgaaagaagcgggctgcggagcggcatttctgaacagttcattaagcggcagtgaataccataatacgatggaagaaataacgaacggtgatattaaactgctttacattgcgcctgaacgtttacaaagaacggatataccggaacttgagattaacagcgttccgcttgttgtgattgacgaggtgcattgcgtgtcacagtggggacatgacttcagaacaagttatctgcaaatagcgaaatttataaaaggcattaaacctcgtcccgtagttgcggcttttaccgctaccgncacagttaatgtaagggaagacatttgcagattacttgcgttacgcanacccctttccgtaacaccggttttgacagacccaatctttattttgaggtacaaaaaccaaaggagaaaaaaaccgcgcttttggaatgtctttacaaacgaagcggggcaagcggcattatttattgcgctaccagaaaaaccgtag

SEQ ID NO: 55556 - protein, 238 aa, Unknown
  Obtained from environmental sample
  DOMAIN (13)...(176): Type III restriction enzyme, res subunit
  misc_feature (1)..(238): Xaa is any amino acid
MDKLTILREKFGYSSFRPGQEEVIDAILAGTDALAVMPTGAGKSLCYQIPALMLDGMTIVISPLISLMKDQVSALKEAGCGAAFLNSSLSGSEYHNTMEEITNGDIKLLYIAPERLQRTDIPELEINSVPLVVIDEVHCVSQWGHDFRTSYLQIAKFIKGIKPRPVVAAFTATXTVNVREDICRLLALRXPLSVTPVLTDPIFILRYKNQRRKKPRFWNVFTNEAGQAALFIALPEKP

SEQ ID NO: 55557 - DNA, 1353 bp, Unknown
  Obtained from environmental sample
  misc_feature (1)..(1353): n is a, c, g, or t
ttgcagattacttgcgttacgcanacccctttccgtaacaccggttttgacagacccaatctttattttgaggtacaaaaaccaaaggagaaaaaaaccgcgcttttggaatgtctttacaaacgaagcggggcaagcggcattatttattgcgctaccagaaaaaccgtagacgaaacatgtaactttctcatcaggcacggttttaacgctacccgttaccacgcaggccttggcgacgaggaacgcagaaataatcaggatgattttatttacgaccgtaaaatgataatggttgcaactaacgctttcggcatgggaattgataagtcaaatgtgtcgtatgtgattcattacaacatgccaaacactatcgaaagctattatcaggaagccggacgcgccggacgagacggctctcccgcggactgcattcttttgtacaacggtcaggacgtgcggataaatcagtaccttataacccatgacgaagatgaagaaaccgcagacatagagttacaggctcacaatctggaacttcttaaacagatgactttctatgccgccggaaacgactgcctccgccgccgtctgcttgcctacttcggcgaaaaatccccggcaaactgcggcaattgttcaaactgtctgactgaatttacagaaaccgacgttaccatggaagcgcaaaaaattgtttcctgtgtataccgcctgaaacagcgcggacgcagtttcgggaaaacaatgatcattgacattctgcgcggcggcaaaaacgaaaaaatcctccgcttaggtttcgacactctcagtacttacgcgattatgtccggcatgagcgcacacaggattcgcctcatcattgatcacctgatagacgaaggtttcttactgctggaagagggagagtatcctgttgtaacgctcggtaattcggaaggaattttcagggaagaagaacgcgttttaataaaactgccgcaagagcgcgagaaagcatctgataaaaaacatcctcagcaaaagggcgtaaaatttatttacgcgcaaaatgtgtctgatgaaaaaacaccgaaacaaagcggtgctaaatttttagagacgcaaaatatgttcgcggatattgacgatattttgtttgataaattaaaaaaattacgaaaagaaatcgccgcaagggaatcggttcccgcatacgtagtttttcatgacgcgaacctgagggatatgtgtcgtaaaaaacctatctctttgattcaattttccggcattaacggtgtggggcaaagaaaactggaaaagtacggagaagcatttacggaacttatcagggaatattgcggggaataa

SEQ ID NO: 55558 - protein, 450 aa, Unknown
  Obtained from environmental sample
  DOMAIN (374)...(450): HRDC domain
  misc_feature (1)..(450): Xaa is any amino acid
MQITCVTXTPFRNTGFDRPNLYFEVQKPKEKKTALLECLYKRSGASGIIYCATRKTVDETCNFLIRHGFNATRYHAGLGDEERRNNQDDFIYDRKMIMVATNAFGMGIDKSNVSYVIHYNMPNTIESYYQEAGRAGRDGSPADCILLYNGQDVRINQYLITHDEDEETADIELQAHNLELLKQMTFYAAGNDCLRRRLLAYFGEKSPANCGNCSNCLTEFTETDVTMEAQKIVSCVYRLKQRGRSFGKTMIIDILRGGKNEKILRLGFDTLSTYAIMSGMSAHRIRLIIDHLIDEGFLLLEEGEYPVVTLGNSEGIFREEERVLIKLPQEREKASDKKHPQQKGVKFIYAQNVSDEKTPKQSGAKFLETQNMFADIDDILFDKLKKLRKEIAARESVPAYVVFHDANLRDMCRKKPISLIQFSGINGVGQRKLEKYGEAFTELIREYCGE

SEQ ID NO: 55559 - DNA, 735 bp, Unknown
  Obtained from environmental sample
  misc_feature (1)..(735): n is a, c, g, or t
gtgggtcagaatcggccgagagacgaagttgacgaaattctcagcgcaaggggctggatcgatgcggttcttccgcgtggaggaaaggaactcatccggcgggtggtggataacgccagggttccggtaatcgaaaccggcgaaggcaactgccacatctacgtggaaccctcggtagatattgaccgggcggtggaaataatcgccaacgccaagctccaaaagccgggggcctgcaacgccgtggaaacgcttctggtacacaaagacgccgccggagtgctcctgccccttgttgccaaacggcttgccggaaaggcggagcttcgctgcgacagtgaatccctggcggcaataggctccctgcccgctggccttgtcgtaaagaacgccgttcccgaagactgggctacggagtttctggactatatcatggcgataaaaatcgtcgcctctttggacgaggccattaaccacatcgacacctacggcacaaaacactccgaggcgatacttacaaacgatctccgctcagcagaggaattctgccgccgggtggatgccgcctgcctttacaccaacgcctctactcgatttactgacggtggcgtattcggctttggggcggaactgggaatcagtacgcagaaattccacgtccgtggtccaatgggccttgacgccctgacgaccatcaaataccgcgttacaggttcgggtcagattcgcgaataa

SEQ ID NO: 55560 - protein, 244 aa, Unknown
  Obtained from environmental sample
  misc_feature (1)..(244): Xaa is any amino acid
MGQNRPRDEVDEILSARGWIDAVLPRGGKELIRRVVDNARVPVIETGEGNCHIYVEPSVDIDRAVEIIANAKLQKPGACNAVETLLVHKDAAGVLLPLVAKRLAGKAELRCDSESLAAIGSLPAGLVVKNAVPEDWATEFLDYIMAIKIVASLDEAINHIDTYGTKHSEAILTNDLRSAEEFCRRVDAACLYTNASTRFTDGGVFGFGAELGISTQKFHVRGPMGLDALTTIKYRVTGSGQIRE

SEQ ID NO: 55561 - DNA, 1125 bp, Unknown
  Obtained from environmental sample
  misc_feature (1)..(1125): n is a, c, g, or t
atgagtccgtcggacatccatggtttttccggtatcctcaccctccggggaacggtggtncgagggttctttcgcattctcagtcggagaatgtgtatggcacatggatatntgcgttatacgcaaatattcgcaaacagaaatgagcttttccgtcggaaaggctcaaaacagaagaccgtaaagcggttttttgtacggcatggaagccgcggcgcatatccgtcgttgacggagcgccgaaaaagccaaaggagtgagtatatgataatcaatcacaacttaagtgcaatgtttgccgacaggtccctcaaggttacccaggtgttcctggataaaaacatggagaaattgtcgagcggactgcgcatcaaccgcgccggtgatgatgcttccggattggcagtatcagaaaaaatgcgcgctcagattcgcggtttgaatcaagcgtcaacaaacgcccagaacggtatttcgttcatccaaaccactgagggttatcttcaggaatccgaggacatcgtccagcgtctgcgtgaattgtcaattcaggcatcaaacggaatttacaccgaggaagatcgtatgtacatccaagttgaagtttcttccctggttgcggaagtcgacagaatcgcatcacacgcacaattcaacggaatgaatctgttgacaggccgtttcggacgcccaatcggcgaaaatgtggttacagcatctatgtggttccatatcggagcaaacatggatcaaagaacgcaagtttatatcggcacaatgacagctaagggtcttggtatccgtaatgtcggtgacgatacctttatttcactgtcctccccggacggtgccaaccgtgccatcggaaccctcgacaaagcgctgaaaataatcaacaaacaaagagctgatcttggcgcctaccagaaccgtcttgaacacactgtccgcggattagatgtgggtgcagaaaacctgcaagcttcagagtcccgcatccgcgacgcgaacatggcaaatcagactgtagaatacaccaaaaacatgatcctcacacagtccggaaccgccatgttggcacaagccaatcaaagaggtcagtcagtacttcagcttctgcaatag

SEQ ID NO: 55562 - protein, 374 aa, Unknown
  Obtained from environmental sample
  DOMAIN (281)...(352): Bacterial flagellin C-terminus
  misc_feature (1)..(374): Xaa is any amino acid
MSPSDIHGFSGILTLRGTVVRGFFRILSRRMCMAHGYXRYTQIFANRNELFRRKGSKQKTVKRFFVRHGSRGAYPSLTERRKSQRSEYMIINHNLSAMFADRSLKVTQVFLDKNMEKLSSGLRINRAGDDASGLAVSEKMRAQIRGLNQASTNAQNGISFIQTTEGYLQESEDIVQRLRELSIQASNGIYTEEDRMYIQVEVSSLVAEVDRIASHAQFNGMNLLTGRFGRPIGENVVTASMWFHIGANMDQRTQVYIGTMTAKGLGIRNVGDDTFISLSSPDGANRAIGTLDKALKIINKQRADLGAYQNRLEHTVRGLDVGAENLQASESRIRDANMANQTVEYTKNMILTQSGTAMLAQANQRGQSVLQLLQ

SEQ ID NO: 55563 - DNA, 1017 bp, Unknown
  Obtained from environmental sample
  misc_feature (1)..(1017): n is a, c, g, or t
atgagcgatcaatttaatgctaacaatttgcttgaagtaaaagacctgcgaatgtattttcacacgggaacgaaaggattattcaaccgcgaaaaacgttatacctacgccgtggacggggtttctttcaacataaagaaaggcgaaaccctgggcctcgttggagaatccggctgcggcaagtcaacggtcgtccgcgcggtatcgcaccttcacacgccgacttccggcgaagtctaccttgatggaaagaacgtaacgacgatgaagagccgtgagcttttggaagcgcgcaggaatatgcagctcgtctttcagaacccctacggctttttgaatccaagaatgactaccggcgacataatcgccgaaccgatgaggatatacaagcagcgcgggcttttggagatgaccgagaatgatatcatcaagcgtgttgaagacctcatggagatggtcggccttttgaagtattatcgcaaccgttacccgcacgagttttctggtggtcagaggcagcgtatcggcatcgcccgcgccctggcgttaaagccccagttgatcttagccgatgagccgatttccgcacttgacgtttccattcaggcgcagattttgaacctttttaaggacatacaaaaagaaatggggctttcctatctttttatcgcccatgatctcgccgttatcgaatatatttctgaccgcgtcgcggtgatgtaccttggtaagatcatggagataagcaacaacgacgatctctacaacaacccgcggcatccttacacccaggcgctcttgtcggcagccccgatcccggatcccaaggttgaagcccaacgcaaacgcattatcctgacgggagacgttccctctcccaacattcagagaccgggctgttatttctacgaccgttgtcagcaccgcatggacaagtgcaaagcctcccagccggaactaaaagccgggaaagacggaaacgaggaacacaaagttgcctgcttcctttgcgagtaa

SEQ ID NO: 55564 - protein, 338 aa, Unknown
  Obtained from environmental sample
  DOMAIN (246)...(313): Oligopeptide/dipeptide transporter, C-terminal region
  misc_feature (1)..(338): Xaa is any amino acid
MSDQFNANNLLEVKDLRMYFHTGTKGLFNREKRYTYAVDGVSFNIKKGETLGLVGESGCGKSTVVRAVSHLHTPTSGEVYLDGKNVTTMKSRELLEARRNMQLVFQNPYGFLNPRMTTGDIIAEPMRIYKQRGLLEMTENDIIKRVEDLMEMVGLLKYYRNRYPHEFSGGQRQRIGIARALALKPQLILADEPISALDVSIQAQILNLFKDIQKEMGLSYLFIAHDLAVIEYISDRVAVMYLGKIMEISNNDDLYNNPRHPYTQALLSAAPIPDPKVEAQRKRIILTGDVPSPNIQRPGCYFYDRCQHRMDKCKASQPELKAGKDGNEEHKVACFLCE

SEQ ID NO: 55565 - DNA, 360 bp, Unknown
  Obtained from environmental sample
  misc_feature (1)..(360): n is a, c, g, or t
gtgctgacaacggtcgtagaaataacagcccggtctctgaatgttgggagagggaacgtctcccgtcaggataatgcgtttgcgttgggcttcaaccttgggatccgggatcggggctgccgacaagagcgcctgggtgtaaggatgccgcgggttgttgtagagatcgtcgttgttgcttatctccatgatcttaccaaggtacatcaccgcgacgcggtcagaaatatattcgataacggcgagatcatgggcgataaaaagataggaaagccccatttctttttgtatgtccttaaaaaggttcaaaatctgcgcctgaatggaaacgtcaagtgcggaaatcggctcatcggctaa

SEQ ID NO: 55566 - protein, 119 aa, Unknown
  Obtained from environmental sample
  misc_feature (1)..(119): Xaa is any amino acid
MLTTVVEITARSLNVGRGNVSRQDNAFALGFNLGIRDRGCRQERLGVRMPRVVVEIVVVAYLHDLTKVHHRDAVRNIFDNGEIMGDKKIGKPHFFLYVLKKVQNLRLNGNVKCGNRLIG

SEQ ID NO: 55567 - DNA, 534 bp, Unknown
  Obtained from environmental sample
  misc_feature (1)..(534): n is a, c, g, or t
atggactccattgagccatggcttcagtgggcggacaaaaaaggcaagggcgctttcgtgcttatgcgtaccagcaacaagggcaggcgggattttgaatgtctgaatattattgatgagaaccactcctctaaacggcttttcgacgcggtaggggacaagctttcagagcttgctgtttcccgccccggcgttcacggctacggtgcatttggcgcggttgtgggcgcagatccccaaaccgaggaagagcgcaaggaagcggcggcaatccgcgccggacggtccaacatctttttccttattcccggctacggtgcccagggtggtgcggcctccgacgccgctctgcttttacatgaaggcaacggcggcgtagtaaatgcctcgcgttcgatactcaaagcctggcaaaactcgcatggcagcatggaagcggacaatccatttgcggcccaggcagcaagagctgcggcaatcgaaatgcgcgacaatatccgaaaagcagcgaaaaccaataatcattctatatag

SEQ ID NO: 55568 - protein, 177 aa, Unknown
  Obtained from environmental sample
  misc_feature (1)..(177): Xaa is any amino acid
MDSIEPWLQWADKKGKGAFVLMRTSNKGRRDFECLNIIDENHSSKRLFDAVGDKLSELAVSRPGVHGYGAFGAVVGADPQTEEERKEAAAIRAGRSNIFFLIPGYGAQGGAASDAALLLHEGNGGVVNASRSILKAWQNSHGSMEADNPFAAQAARAAAIEMRDNIRKAAKTNNHSI

SEQ ID NO: 55569 - DNA, 2406 bp, Unknown
  Obtained from environmental sample
  misc_feature (1)..(2406): n is a, c, g, or t
atggtattttctagcataatagcagaagaattgaaaattgaagaacagcgcgttaaagcggctttaaagcttatggaagaaggcgggacggtgccgtttattgcacgctaccgcaaagaccaaactgataatctagacgaaattcagttgcgcgatattcagcacagaaaggaatctttaaccgaacttgcagaacgcaaagaaacggtcttaaaaactattgaggagcttggcaagctaactccagaactaaaagctcaaatagacaactgccgcgataaaaatattttggaagatatttacgctccctacaaacccaaacgcagcacacgtgccacaatcgcaaaagacaaaggcatggaaggtcttgcaaaaattatatgggaacaagaagaaacatccaactccgcagaaacaatcgctatggcttttctctccgaagaaaaaggcgttgcagacccagcggcagcaatcaaattcgctttggatattttggcagaagatgttgcagatacaccggaattccgcggatatttgcgcgcgcaaattgaaaaacagggcaaaatggtttcaaaggttaaaaaggaatttgaaggcaaagagacaaaattcaaaaactactacgatttttccgagactcttggcacaataccaagccacagaatgcttgcaatgcgccgtggcgaaaaagaaaaagttttgcgtttgaccattgaggttccagacgaggctcttgtgggctacctttgcgaaaaggtgattaaaagagagggagtttggaaaccgcatttggaagctatgtgcaaagactcttgggaacgtttgctaaaacccagtttggaaagcgaagttcgccttttattgaaagaatccgcagagttagaggctttcaaggttttcaccaaaaacctatcagatattttgctcgccccgcccgctggccacaaggcggttctcgctcttgacccaggcttcaaaagcggaattaaggttgcagttttagaccaaaacggcaaatttatggatcacggcgtaatttatccgctggaaccacaaaagcaagtttcgcagtctgctgcataccttgcggaactcgttgaaaaatacgatatagatttaatctccataggcaatggcaccgcaagccgcgaaacagacgattttgtaaaggaaatttccagcaagctgaagaacaaacgcggagaatgtccagttggtgttattgtgaatgaatcgggtgcttctgtttatagcgcaagcgaactggcaatcaaggagttcccaaaagaagatgtcaccacaaggggtgcaatctccataggccgccgcctgcaagacccattggcggagctggtgaaggtggaaccgaaagccataggtgttgggcagtaccagcacgatgttaatcaaaaggaactccaaaaacgtttggacgaagttgttgaatcctgcgtgaacaaggttggcgtggatgtgaacagcgcaagcccgtctttgctcggctatgtttctggtgtaaataaaagtttggcggagagcattgtaaaacacagagacgaaaaaggtacctttgcgagccgcgaagccttgaaagagataaaaggttttgggcaaaaagcgtttgaacaagcagcgggatttttgcgcattcacggtgcagaaaatcctttggacaacagcgcggtgcatcctgaaaattacgctttggtagaaaaaattgcggagaaggctggcactccgcttggcgaacttataggcaacgcgactgttttgcaatcactttccgcaagtgattttatagatgaaagtagcggagcagggaaaaacacggtcaaagatattttagctgaattggaaaaacccggccgcgaccctcgcaaagaattccattacgccaagttcaatcccaaaatcaaaaccatgcaggatttgataaccggtagctggctggaaggcgttgttagcaatgtgacgaatttcggtgcgtttgtggatattggcgttcaccaagacggcttgatacatatctccgagatgagcgatatttttgtgaaagatgcaaaaaccattttgacaaccggcgatgtggttaaggttagggtggtttctgttgatgcccncaataaacgcatatctctttctatgaagcaagagagcgagcgcagagtaggtggcggtggatttaaaggtggcggcagagatgccaaaggcggctatcagggcaagggtagcttccaacccaagcctatacctcaagctgcaactcttgcggatttaaaagctcgtttttctgggaaggcacaaaaacaggcttctcaaaacattccaaaaaagccagcggcagcagctatcaaaaaaagcgatgttatggctaggcttaaaaatgcgatgaaaggcgggttgtga

SEQ ID NO: 55570 - protein, 801 aa, Unknown
  Obtained from environmental sample
  DOMAIN (643)...(716): S1 RNA binding domain
  misc_feature (1)..(801): Xaa is any amino acid
MVFSSIIAEELKIEEQRVKAALKLMEEGGTVPFIARYRKDQTDNLDEIQLRDIQHRKESLTELAERKETVLKTIEELGKLTPELKAQIDNCRDKNILEDIYAPYKPKRSTRATIAKDKGMEGLAKIIWEQEETSNSAETIAMAFLSEEKGVADPAAAIKFALDILAEDVADTPEFRGYLRAQIEKQGKMVSKVKKEFEGKETKFKNYYDFSETLGTIPSHRMLAMRRGEKEKVLRLTIEVPDEALVGYLCEKVIKREGVWKPHLEAMCKDSWERLLKPSLESEVRLLLKESAELEAFKVFTKNLSDILLAPPAGHKAVLALDPGFKSGIKVAVLDQNGKFMDHGVIYPLEPQKQVSQSAAYLAELVEKYDIDLISIGNGTASRETDDFVKEISSKLKNKRGECPVGVIVNESGASVYSASELAIKEFPKEDVTTRGAISIGRRLQDPLAELVKVEPKAIGVGQYQHDVNQKELQKRLDEVVESCVNKVGVDVNSASPSLLGYVSGVNKSLAESIVKHRDEKGTFASREALKEIKGFGQKAFEQAAGFLRIHGAENPLDNSAVHPENYALVEKIAEKAGTPLGELIGNATVLQSLSASDFIDESSGAGKNTVKDILAELEKPGRDPRKEFHYAKFNPKIKTMQDLITGSWLEGVVSNVTNFGAFVDIGVHQDGLIHISEMSDIFVKDAKTILTTGDVVKVRVVSVDAXNKRISLSMKQESERRVGGGGFKGGGRDAKGGYQGKGSFQPKPIPQAATLADLKARFSGKAQKQASQNIPKKPAAAAIKKSDVMARLKNAMKGGL

SEQ ID NO: 55571 - DNA, 678 bp, Unknown
  Obtained from environmental sample
  misc_feature (1)..(678): n is a, c, g, or t
ttgtcaattgcccttttaatgtttatgtcacactccgcacgagtgtgtggattgaaacttgagccttggggaattacaaatgtaaatgggtttgtcacactccgcacgagtgtgtggattgaaacaggaaaaaataataataagggaaaaacaggagatgtcacactccgcacgagtgtgtggattgaaacatcgagattatggattatgaaacaccgatttttgtcacactccgcacgagtgtgtggattgaaacagaaacacatcaatggggaaaatgacggttcggggtcacactccgcacgagtgtgtggattgaaacctatttcggagttaagaaattcggaatcctctttgtcacactccgcacgagtgtgtggattgaaaccgtctatcgcgtcggctggatcatcttcaaagacgtcacactccgcacgagtgtgtggattgaaacgggtactgcctgaccggggacaacggcgcgtcgtgtcacactccgcacgagtgtgtggattgaaacactatagccgcgctctgatagcctgtattggtaggtcacactccgcacgagtgtgtggattgaaactggactaccaatctcagcccctgccgcacactaagtcacactccgcacgagtgtgtggattgaaacaaaatctatattctcacacttcataa

SEQ ID NO: 55572 - protein, 225 aa, Unknown
  Obtained from environmental sample
  misc_feature (1)..(225): Xaa is any amino acid
MSIALLMFMSHSARVCGLKLEPWGITNVNGFVTLRTSVWIETGKNNNKGKTGDVTLRTSVWIETSRLWIMKHRFLSHSARVCGLKQKHINGENDGSGSHSARVCGLKPISELRNSESSLSHSARVCGLKPSIASAGSSSKTSHSARVCGLKRVLPDRGQRRVVSHSARVCGLKHYSRALIACIGRSHSARVCGLKLDYQSQPLPHTKSHSARVCGLKQNLYSHTS

SEQ ID NO: 55573 - DNA, 708 bp, Unknown
  Obtained from environmental sample
  misc_feature (1)..(708): n is a, c, g, or t
atgccgtttaagggggtcgatattatggacgttaagaaggaatttgtcttaaaagctctggatgaaagggtggtattcaccgagctttgccgtgagtacggaatcagcaccaaatgcgggtacaaatggaaacagaggttccttgaggaaggatacgcgggtcttgaggaacactcaagaaagccgttaaccaacagccggagcataccggagccggtaagcgtggaaatgttgaggataaaaaaattacaccccgcatggggggcgaaaaaaatccttgaaatatacaaaagaaaccatacagggaaatacgctccggcgcggggaagcgttgaaaatctttttgtacgcgctggttacactggagttcggcggagaagaaacatacgcggcggcaagataatacaaaaccgcataataccaacgaaaccgaacgaagtgtggactgttgattttaagggctggtggtataccaagaacagggaaaaagtaaaccctcttaccatacgtgacgaattcagtaaattcatactggcgatagacgtggtcgaaaaaggcgataaagccacagtaaaacatgtttttcaacgtgttttcaagcaatacggcttaccgcagtgtatacgcagcgacaacggcccgccgttcgcgagcgcgctaaatttctggggttgtcaaaattgtctggtggggagaccctcgccataa

SEQ ID NO: 55574 - protein, 235 aa, Unknown
  Obtained from environmental sample
  misc_feature (1)..(235): Xaa is any amino acid
MPFKGVDIMDVKKEFVLKALDERVVFTELCREYGISTKCGYKWKQRFLEEGYAGLEEHSRKPLTNSRSIPEPVSVEMLRIKKLHPAWGAKKILEIYKRNHTGKYAPARGSVENLFVRAGYTGVRRRRNIRGGKIIQNRIIPTKPNEVWTVDFKGWWYTKNREKVNPLTIRDEFSKFILAIDVVEKGDKATVKHVFQRVFKQYGLPQCIRSDNGPPFASALNFWGCQNCLVGRPSP

SEQ ID NO: 55575 - DNA, 351 bp, Unknown
  Obtained from environmental sample
  misc_feature (1)..(351): n is a, c, g, or t
atggcaaagaaaagagaagcatatgtttatcatgacttggaattcaagattaaacttgtaaagctttatcttgaaggaaatggcggttatagggcattggcaagagaatatggattaaaagaatcaacacagcttagagattgggtaaaaaaatataaaaacggcgatcttactgaagaaaattcagacagacgaggcaagtgcacatttctaaaaaaaatcttcaaggacagagatgaggaaatggaatacttgaaacatgaaaatgaatatcttaaaaaaaaattgcttttaatgggcgagccggagagctccattgcaaatttatggtcatcaaagaatctaaagtaa

SEQ ID NO: 55576 - protein, 116 aa, Unknown
  Obtained from environmental sample
  DOMAIN (14)...(85): Transposase
  misc_feature (1)..(116): Xaa is any amino acid
MAKKREAYVYHDLEFKIKLVKLYLEGNGGYRALAREYGLKESTQLRDWVKKYKNGDLTEENSDRRGKCTFLKKIFKDRDEEMEYLKHENEYLKKKLLLMGEPESSIANLWSSKNLK

SEQ ID NO: 55577 - DNA, 612 bp, Unknown
  Obtained from environmental sample
  misc_feature (1)..(612): n is a, c, g, or t
gtgggagagataatggataaggaaactattctcgcaaaagtaagtgacggcgcgtcggctgccatgctggaaaaaagccaggccgattgcgttgaaacttgttttgaccgggcggaacaacaaaaaaaccaatgcggtttcggtagaagcggcgtatgctgccgtatctgtcacatggggccgtgcaggatcactccaaagtcgccaaagggtatatgcggagctacagttgacactatagtcgcgagaaacttcctgcgcgaagtcgcaagcggtaccagcgcgcattccgaccacggccgccacctggtgttaaaactgcgggaagtggcccaggggaaagctcccggttttcagatcaaagacgaaaaggccctgcgccgggccgcgcggctttacggtgtgggagaagaaggcagggacgccaacgcggtggccctggatctctcggacgtgttcataaaggaatttacagagcaggaaaaccacctgaagaccctggaattggcgccaaagaaacgccaggctgtgtgggaagcgacgcggcgtcaaacaaacggcattgaccgcatggtagtagaagcaatgcacagaacacacatggggcgttga

SEQ ID NO: 55578 - protein, 203 aa, Unknown
  Obtained from environmental sample
  misc_feature (1)..(203): Xaa is any amino acid
MGEIMDKETILAKVSDGASAAMLEKSQADCVETCFDRAEQQKNQCGFGRSGVCCRICHMGPCRITPKSPKGICGATVDTIVARNFLREVASGTSAHSDHGRHLVLKLREVAQGKAPGFQIKDEKALRRAARLYGVGEEGRDANAVALDLSDVFIKEFTEQENHLKTLELAPKKRQAVWEATRRQTNGIDRMVVEAMHRTHMGR

SEQ ID NO: 55579 - DNA, 813 bp, Unknown
  Obtained from environmental sample
  misc_feature (1)..(813): n is a, c, g, or t
gtggacattctggacgcaaacaccggccccatctttcttgcccaccgtccggataaaaccctttccgaaataacatcctcctggatgaaaaatcatgagccgattttttcttttgttaatggcaatgtaaagcatgaaggttggattgttgacagctgtgagacgattgaaaaaattgcgtcctgtttcaaaaatattcctgccctttacatcgccgacggacaccaccgttgcgcttcagccgtaaaggttgcgcagaaacgcagagaggcgaatcccggatttacgggcagagaggaattcaactactttctagccgtgattttcccgtcggatgagctcacgatttttgactacaaccgacttgttaaggaccttaacggtcttaatgaagatacgtttctcgaaaaaatacgcctgtctttcgacgttgaaaaaacatcaggttctgccccgggcgctgtaaaaccgcaggcgaaacacgaattcggccttttcctgaaaaacgcctggtaccgcctgaaagtaaaaaacgggatttgggaggataacgatccggttgaaaggcttgatgtttccattttacagaattaccttttaaaacccatcctgggaattgatgacccaagaacagacaagcggatagattttgttggcggaatccgcggattaggcgagcttgaaaagcgtgtaaatgacggcatggccgccgcgttttccatgtatccgacaacgctggatgatttaatggctattgcggatgccggaagatcatgcccccaaaaagcacctggtttgaaccaaaactgctga

SEQ ID NO: 55580 - protein, 270 aa, Unknown
  Obtained from environmental sample
  DOMAIN (2)...(263): Protein of unknown function (DUF1015)
  misc_feature (1)..(270): Xaa is any amino acid
MDILDANTGPIFLAHRPDKTLSEITSSWMKNHEPIFSFVNGNVKHEGWIVDSCETIEKIASCFKNIPALYIADGHHRCASAVKVAQKRREANPGFTGREEFNYFLAVIFPSDELTIFDYNRLVKDLNGLNEDTFLEKIRLSFDVEKTSGSAPGAVKPQAKHEFGLFLKNAWYRLKVKNGIWEDNDPVERLDVSILQNYLLKPILGIDDPRTDKRIDFVGGIRGLGELEKRVNDGMAAAFSMYPTTLDDLMAIADAGRSCPQKAPGLNQNC

SEQ ID NO: 55581 - DNA, 1371 bp, Unknown
  Obtained from environmental sample
  misc_feature (1)..(1371): n is a, c, g, or t
atgcttcaattaaaacaacgcttaggtccctggtctttttaccgtgaggtcctggctgtcgccctgcctgtaatgacgcagcagtttataatgagtatggtttccctgattgacaactttatggtagcgggccttggagatgtcagcatggcggcggtaaatgtaaccaaccatcttttttttgtttatatcgtattgataaacgttacctgccaggccggcggcatttacattgcccagttcaagggagcgaatgacagcgaggggatgaagcatgccttccgcttcaaggtaatttttgccgtcgccatcgcggcgctggcttttacagtcggcagatcccttacaagcccgttgatcgcgatgatgacaacggcaaacatttcccaaaaggaaattgtctctgtcggctcccgttacctgaaactcatctcctggacctttctgccaatggcaatttcatccgcaatagggacaagtttccgtgataccgcgaggccaaaaattccgctcattatctccatcttcgcgactatgataaacactgccggaaactggatcttaatttacggtaacctgggcgcccctcgccttgaagtcgaaggcgcggcgattgcgacaatcattgcccgccttttcgagctatgcgtctttgtgatctatacagcatgggacagagctccattttttgtaataaggatttttaatattcacaaaaaattgtttaatgagatctttcataaatcctcgatgatattcgtttcggaaatatcatggatcagttcggaaactataatgattgccatgtacaatcgccgcggcggcgcggaagtcgtagcgggtatggcggcgggctggacaatcgcgaatttatttttcattctctttggcggaatctacacggcgtcggcaatactcgttggcggcacccttggctcaggccagctagacgaagcgcgccgccgctcggtatggctcaaatcgggatcagtggtagcgggcattatcatggcactacccggcgcgatcgtatccgccctgcttgtacctctggttttttccaatcttagcactgaagccagggcaaactgccttggccttgtctacgtgatcctcgcataccttccactctgggggcttttaaatacgcaattcgccatatcccgcgccggaggcgacactgctatggggatgtacgccgacctttcggttaataccgttcttttcgccccaggagcttttattctgtcttattttacaaccatcgcgcctgttcctatgttagccatactaaagacttcggatatcgtaaagtattctatctgccgccatttaatgcgtaaggaaaaatgggtgaggaatttaacttag

SEQ ID NO: 55582 - protein, 456 aa, Unknown
  Obtained from environmental sample
  DOMAIN (250)...(415): MatE
  misc_feature (1)..(456): Xaa is any amino acid
MLQLKQRLGPWSFYREVLAVALPVMTQQFIMSMVSLIDNFMVAGLGDVSMAAVNVTNHLFFVYIVLINVTCQAGGIYIAQFKGANDSEGMKHAFRFKVIFAVAIAALAFTVGRSLTSPLIAMMTTANISQKEIVSVGSRYLKLISWTFLPMAISSAIGTSFRDTARPKIPLIISIFATMINTAGNWILIYGNLGAPRLEVEGAAIATIIARLFELCVFVIYTAWDRAPFFVIRIFNIHKKLFNEIFHKSSMIFVSEISWISSETIMIAMYNRRGGAEVVAGMAAGWTIANLFFILFGGIYTASAILVGGTLGSGQLDEARRRSVWLKSGSVVAGIIMALPGAIVSALLVPLVFSNLSTEARANCLGLVYVILAYLPLWGLLNTQFAISRAGGDTAMGMYADLSVNTVLFAPGAFILSYFTTIAPVPMLAILKTSDIVKYSICRHLMRKEKWVRNLT

SEQ ID NO: 55583 - DNA, 2550 bp, Unknown
  Obtained from environmental sample
  misc_feature (1)..(2550): n is a, c, g, or t
ttgcgagctgctctcctccggctgggagcgccagccgatatgtttatgcttgaccggacggtcaactcgaccgtcccgccgccatcaccggcgctcgacgggtatttggcctacaagggcggccaatcctttctgtactacctgcacagtacgggcggcgacagcctattcaataatatgttgacagagttcaagctcacccgctccgcagaggccgcgatcgagcgggtctacgcaaagaagatggaggaactcggcaaggagtggctgagcgagctgcgccgcgtctactggccggaggtcggccgacgcgtaaatccggagacgcaagctgtctccataaccgcaaaggaccgcagccgcgtcaacatacgtcccaggatctcgccggacggcaagcgcgtcgcctttttcagcgacaagcacgacttcacgaggataatcataaccgacacagccggcaaggagctgcgccgaatcggcggcgaacacagcctcggtagctccttcgagtccttccgccccatgaacggcgcgatcgcctggtcgcccgacggcgataggctcgccttcatcgccaagaaaggcggaaaggacgaggcgcgcatcgtcagcgcggagaacgggaagaccctgcgcgccatcatcccgccgctgtcggcaatcggcggtctagactggtcaaaggacggaaacctgctcacattcaccggaatatcctacgggaaaacggatctatacctatataatttaacctccgacgaactaacgatcatcgtagacaactacgagtctaaggattcgccgcgattcagcccggacggcgccaagatcatcttcgccacgaccgacaccgcggggctgggatcggggccgttctccggtaaaccgagatcaacgccggacatcgccatatacgacatcaccgacggcagctaccatctgctgaccgatacggagtggggcaacaagcagccggccttttcgcccgacgggacgcagttcgtcttcgtctcggacaggaacgggattgacaatctatatatagacagcgtagacaatccgggcaggccgcgcccgctcaccgattataccggcaagtgcgcgaacccggactgggcggccgacgggtcgtcaatagtcttcgacctctttatgaaccagtcttggaatatctggaggatggccatgccattggagaagaccttgggcgacaccgctttgacgccgaccgcatgggcgcggcatgaggcggattcgtccgtaccgttcttcaaaaggatcgccgttcccgccaaagacagcgccgtcgccgtcgattcggtcaaggcggaaggcgccggcgcggtcagaccgaaccgaaacggcggcttcaaaaccggcaggcggcgcgaccggatcaaagattcgacggacatcctcgaaaaacccttcgtcttagaggcgccacgcgactcaatcccgccctccgagcgctacactctgcgattcacgcccgacttcgtgatcttcggcctcggcgtgagcacctacagcggcgcctccggccaggctttagccaccttcagcgacatcatgggcgaccaccgcgtcacctttgccggcgacttgcagatagactttgacgattacgcgcaaatattcgcctcatacgagtacctaaagcgccgcgtcaacatgatggccggcgggttctactataagtattacagctacgacgggctcggaagccgctacttccacgacttggagacgggcggcgtgctcgggctcagctacccgttctccgtcttctcgcgcgccgatctcggcctctccggccgctacatccggcgcgaatcgctgtcgggcgacacggcggttgagtggaacgcgatctcggcgaacctcggctactcgttcgacaacatactctgggggataaccggcccgctcaccggcgtacgcgcctcagcctccgcgcaaatcgccccgccgctgccgttcacagacgaggcatatctatccggcgacatagacatacgccactacacgcacatattcaggcgctacgtctgggctaaccgcattgttatgggcgcgagcgtaggcttaggcggcaacggccgagcggcgagaaggtactttttgggcggcaacgaaaactggttcaactacggcgtcaatgtggaaaactacaataacaacatcggttacagctactattcaagcatcgtctccccgctgcgcggctggaactactttgacctcgccggggaccgggtgctcctgatgaactcggaattccgcttcccctttatccgcgaaatatcgacggtgtggccgatacccatgcaaatccgctacataaacggcgcgctattcatggacgccggatacgcttggacgggcagcgaggcgcttccgccgaagatagcgagcggatacggcttcggaatgcgggcgaacttggggatttttgttttgcggtatgaccgcggctggccgacagacttcagaggcctgtcacgcgggcctatcaattacttctcattaggggctgaattttaa

SEQ ID NO: 55584 - protein, 849 aa, Unknown
  Obtained from environmental sample
  DOMAIN (546)...(849): Surface antigen
  misc_feature (1)..(849): Xaa is any amino acid
MRAALLRLGAPADMFMLDRTVNSTVPPPSPALDGYLAYKGGQSFLYYLHSTGGDSLFNNMLTEFKLTRSAEAAIERVYAKKMEELGKEWLSELRRVYWPEVGRRVNPETQAVSITAKDRSRVNIRPRISPDGKRVAFFSDKHDFTRIIITDTAGKELRRIGGEHSLGSSFESFRPMNGAIAWSPDGDRLAFIAKKGGKDEARIVSAENGKTLRAIIPPLSAIGGLDWSKDGNLLTFTGISYGKTDLYLYNLTSDELTIIVDNYESKDSPRFSPDGAKIIFATTDTAGLGSGPFSGKPRSTPDIAIYDITDGSYHLLTDTEWGNKQPAFSPDGTQFVFVSDRNGIDNLYIDSVDNPGRPRPLTDYTGKCANPDWAADGSSIVFDLFMNQSWNIWRMAMPLEKTLGDTALTPTAWARHEADSSVPFFKRIAVPAKDSAVAVDSVKAEGAGAVRPNRNGGFKTGRRRDRIKDSTDILEKPFVLEAPRDSIPPSERYTLRFTPDFVIFGLGVSTYSGASGQALATFSDIMGDHRVTFAGDLQIDFDDYAQIFASYEYLKRRVNMMAGGFYYKYYSYDGLGSRYFHDLETGGVLGLSYPFSVFSRADLGLSGRYIRRESLSGDTAVEWNAISANLGYSFDNILWGITGPLTGVRASASAQIAPPLPFTDEAYLSGDIDIRHYTHIFRRYVWANRIVMGASVGLGGNGRAARRYFLGGNENWFNYGVNVENYNNNIGYSYYSSIVSPLRGWNYFDLAGDRVLLMNSEFRFPFIREISTVWPIPMQIRYINGALFMDAGYAWTGSEALPPKIASGYGFGMRANLGIFVLRYDRGWPTDFRGLSRGPINYFSLGAEF

SEQ ID NO: 55585 - DNA, 405 bp, Unknown
  Obtained from environmental sample
  misc_feature (1)..(405): n is a, c, g, or t
atgttcaataaactgcttgatgaagcccaggccggagataacgtcggtacgcttcttcgcggtattgagaaaaaagaagttgaacgcggacaggtactcgcaaaacccggttcaatcacgcctcacaaaacattcaagggccagatttactgtttgtccaaagaagaaggcggacggcacagcccgttctttacaggttacagaccgcagttctatttccgtactaccgacattacaggaacagtaaaacttcctgaaggtaaggaaatggttatgccgggtgataatacggaaataatcggcgaacttattcatccgattgccatggaaaaaggacttcgtttcgctattcgcgaaggcggcaaaacagtagcctccggtcaggttaccgagattatcgaataa

SEQ ID NO: 55586 - protein, 134 aa, Unknown
  Obtained from environmental sample
  DOMAIN (39)...(133): Elongation factor Tu C-terminal domain
  misc_feature (1)..(134): Xaa is any amino acid
MFNKLLDEAQAGDNVGTLLRGIEKKEVERGQVLAKPGSITPHKTFKGQIYCLSKEEGGRHSPFFTGYRPQFYFRTTDITGTVKLPEGKEMVMPGDNTEIIGELIHPIAMEKGLRFAIREGGKTVASGQVTEIIE

SEQ ID NO: 55587 - DNA, 312 bp, Unknown
  Obtained from environmental sample
  misc_feature (1)..(312): n is a, c, g, or t
atgatggcaaaagaaggaattcgcgtacggctgcgcggcttcgatgtagagttaattgatcagagcgccaaatctattgccgcggcagtgcgaaaggccggagcgaaagttacaggcccgatcccgctgccgacccgaattaacaaggttacggtgctgcgttcaccgcatgtaaataaaaagagccgcgaacaatttgagatgcggacgcataaacggttgatcgatattatcaatccttcggtagaagttatggattcattaatgaaacttgaacttcccgcgggcgttgatgtggagatcaaacaataa

SEQ ID NO: 55588 - protein, 103 aa, Unknown
  Obtained from environmental sample
  DOMAIN (6)...(101): Ribosomal protein S10p/S20e
  misc_feature (1)..(103): Xaa is any amino acid
MMAKEGIRVRLRGFDVELIDQSAKSIAAAVRKAGAKVTGPIPLPTRINKVTVLRSPHVNKKSREQFEMRTHKRLIDIINPSVEVMDSLMKLELPAGVDVEIKQ

SEQ ID NO: 55589 - DNA, 726 bp, Unknown
  Obtained from environmental sample
  misc_feature (1)..(726): n is a, c, g, or t
ttgagacactccgacgagcgccggggcaagccggcggtgcatttgctccacggcgttgacgcggctgtcaactcgggcagcttcctttacttcctcccgcttgcctgcgtaggcgcgtggccccaggctgataaccgcaaagcggaggtttactcattatgggccgcccatctgcgcaagctccatttgggccaggcaatcgacattcactggcaccgcgattttaatatagtcccgcctgttgatgaataccttgccatgtgcgccctgaaaaccggctgcctcgcgcgttttgccgcggaactggggattttggccgcgaaaacagcgggccgcgaatgtgaggcaaataaagcggcgcctctgggagaggcggcggaaaggctcggcatcggttttcagatactcgacgacgtgaaaaacctgactacgggcatacccggcaagaaacgcggcgatgatattgctgaaggaaaaaaaagcctgcctatacttttgtttcttaagcggcatcctgaagaaaaagaaacggcccgccgctgttttacggcggcgagggcgaagggggcgggcgcgcctgaaacagaggagttaatacaggcgcttacgggcagcggcgttattaaagaagccgaggaacagggcaaagcccttatcgccggggcgcgggcggtttttgaagagaacagcgcgccgcttgccggccttatagatcttataagctga

SEQ ID NO: 55590 - protein, 241 aa, Unknown
  Obtained from environmental sample
  DOMAIN (1)...(210): Polyprenyl synthetase
  misc_feature (1)..(241): Xaa is any amino acid
MRHSDERRGKPAVHLLHGVDAAVNSGSFLYFLPLACVGAWPQADNRKAEVYSLWAAHLRKLHLGQAIDIHWHRDFNIVPPVDEYLAMCALKTGCLARFAAELGILAAKTAGRECEANKAAPLGEAAERLGIGFQILDDVKNLTTGIPGKKRGDDIAEGKKSLPILLFLKRHPEEKETARRCFTAARAKGAGAPETEELIQALTGSGVIKEAEEQGKALIAGARAVFEENSAPLAGLIDLIS

SEQ ID NO: 55591 - DNA, 576 bp, Unknown
  Obtained from environmental sample
  misc_feature (1)..(576): n is a, c, g, or t
atggaaaanatgctgcaagctgaaatctggaccgtcgcgcanacaaacgaaggcaatgtagtattgctgcgcccgtttgataaagacataatcatacccgtctttgtaggccagttggaaatccagtcaataataatcggcatggaggatataagcctgccgcgcccccttacccatgacctttttctttccctgcttgaaagccaggggcttgcgctggatcgcgtggaaatccaggaactcaaggggaacacatttcacgcgcgccttgttataagcggcggcaaatatgccgttgacaagccgttaatcctggacagccgcccctccgacgcccttggccttgcgacacgccgcaaatgccccattatggtttctccggatataataaagcagacgggcataaccgctgattttttcatggatatgttaggtgaagaaaaaaaagccggcgccgccaatgataatcaggaaagaaggaacaggcttcagcggcagcttaacgaggcggtggaaaaggaagagtacgaggaagcggccaaaatcagggatatgctgaacgatatgcagccgtga

SEQ ID NO: 55592 - protein, 191 aa, Unknown
  Obtained from environmental sample
  DOMAIN (1)...(138): Uncharacterised ACR, COG1259
  misc_feature (1)..(191): Xaa is any amino acid
MEXMLQAEIWTVAXTNEGNVVLLRPFDKDIIIPVFVGQLEIQSIIIGMEDISLPRPLTHDLFLSLLESQGLALDRVEIQELKGNTFHARLVISGGKYAVDKPLILDSRPSDALGLATRRKCPIMVSPDIIKQTGITADFFMDMLGEEKKAGAANDNQERRNRLQRQLNEAVEKEEYEEAAKIRDMLNDMQP

SEQ ID NO: 55593 - DNA, 711 bp, Unknown
  Obtained from environmental sample
  misc_feature (1)..(711): n is a, c, g, or t
atgaaaacgcatttatacatgcatgttacgggcgcggtaaaaaatcattttggcattattcccggtttgtcaaaagtcgggtttcacgcgaaattattcaataaagagcgttttgcggatatgcttttggatttgtccctttatgttgtcccgcgattaaccatcatggacgcggtgcttgccatggaaggcgaaggacccggcgcctccgggactccaaggcatgtggggcttttgctggcatccacaagcgatcttgcccttgatgttgtcgcgggtgaaataatggggcttccctttgatcacaaccctgtcttaatggcggcaaaaagacgcgaggtatcgccatacaaaattgaagatgtaaatgtaattggcggcgagctttccgatttaaaaatatccgattataaattcccgtcaaccgtaaaaggttttagcaggactgtcgaaaaaagccctgttataaggaatatcttaaaatcggctttatcaaaatatcccgtagtggcaaaaggaagatgcataggctgcggcatgtgcgcgaccgcttgtccgcaaaaaatgattacaatgattacgcaaaaaggaaagaaaaaagccgatattaacctgaaagactgtatccgctgttattgctgccacgaactttgcccgcataaggcgattgacatcaaaagcaagtttattcacaaggctttaaagatttaa

SEQ ID NO: 55594 - protein, 236 aa, Unknown
  Obtained from environmental sample
  DOMAIN (201)...(224): 4Fe-4S binding domain
  misc_feature (1)..(236): Xaa is any amino acid
MKTHLYMHVTGAVKNHFGIIPGLSKVGFHAKLFNKERFADMLLDLSLYVVPRLTIMDAVLAMEGEGPGASGTPRHVGLLLASTSDLALDVVAGEIMGLPFDHNPVLMAAKRREVSPYKIEDVNVIGGELSDLKISDYKFPSTVKGFSRTVEKSPVIRNILKSALSKYPVVAKGRCIGCGMCATACPQKMITMITQKGKKKADINLKDCIRCYCCHELCPHKAIDIKSKFIHKALKI

SEQ ID NO: 55595 - DNA, 1143 bp, Unknown
  Obtained from environmental sample
  misc_feature (1)..(1143): n is a, c, g, or t
atgatatataaagcctttggtaaaacaggcgtaaaagtgtcggctctgggcttcggcgcaatgcgccttcccatgaaggaagttgacggcaaaaaaattgtagacgacgatcttgccgttcccctcatgcagaaggcttttgaaatgggtattaactatgtcgataccgcgccgctttactgcgaaacgttaagcgaagtttccgtaggcaaggcgttaaaaggctggcgcgacaaggtgtacctgtccacgaaaaaccccatcgaagacgcggacggcgatcactggatggagcggctggaaaaatcgctgaaaaagctggacacggactacatcgacttttatcacttctggggcatatcgttaaaaagttttgagtcatggcagggtttgaagttcggccctcttgaagccgcgtataaagcaaaagagcaggggcttattaagcacatttctttttcgtaccacgacgccgctgaaaattataagacaatagcagattcaggccactttgaaacgactctggttcaatacaatatgctggatcgttccaacgaagagaacatcgcctacgcgaagtctaagggcttaggcgtagtagtaatgggtactgtaggcggcggcaggctgggcgcgccgagcgaaaaaatccaggggctgttgaagaaacaacttaccagtaccgcggaattagccctgcgcttcgtgcttgcaaacgaaaatgtagacatggctctttccggcatgggcgatctgaacatgttaaaggaaaattttgatatcgcctcccgcaccggacatttaacagaagaagaagtgcgtcatgtgaaatccatgatggaagaaaacaaaaaccttgcaaagctgtactgcacaggctgtaattactgcaaaccctgtccgcaaggcatcgatattccgtatctttttgaaataatgaaccgctaccgcgtctacgatttaaaagaacacgcaaaaagcgcgtacaaggaaatgatgaacggtttaagctggataaaaagcgcggatgcctcaaagtgcgtctcctgcggtacatgcgaggagaaatgcccgcaaaaactgccgattatcaagcagttacaggaaacacatcgtacccttagtacgcagacgctggcgtga

SEQ ID NO: 55596 - protein, 380 aa, Unknown
  Obtained from environmental sample
  DOMAIN (340)...(363): 4Fe-4S binding domain
  misc_feature (1)..(380): Xaa is any amino acid
MIYKAFGKTGVKVSALGFGAMRLPMKEVDGKKIVDDDLAVPLMQKAFEMGINYVDTAPLYCETLSEVSVGKALKGWRDKVYLSTKNPIEDADGDHWMERLEKSLKKLDTDYIDFYHFWGISLKSFESWQGLKFGPLEAAYKAKEQGLIKHISFSYHDAAENYKTIADSGHFETTLVQYNMLDRSNEENIAYAKSKGLGVVVMGTVGGGRLGAPSEKIQGLLKKQLTSTAELALRFVLANENVDMALSGMGDLNMLKENFDIASRTGHLTEEEVRHVKSMMEENKNLAKLYCTGCNYCKPCPQGIDIPYLFEIMNRYRVYDLKEHAKSAYKEMMNGLSWIKSADASKCVSCGTCEEKCPQKLPIIKQLQETHRTLSTQTLA

SEQ ID NO: 55597 - DNA, 1542 bp, Unknown
  Obtained from environmental sample
  misc_feature (1)..(1542): n is a, c, g, or t
atgttgtcggtcgaagtagggccggggctgttaggtcaggtttatgacggtcttcaaaaccccctgccgcagcttgcaaaggcagccggttactttctggaaaggggtgtctacattgaccctctgccgggagattcaagctggcagtttacgccgaaggcaaaagaaggcgacagagtagaacgcgccgatacccttggcacggtgccggaaggttcttttacgcaccgcatcatggttccattttatctgtacggctcttacactgtttcatgggttaaacccgaaggttcttataaaatacacgatacaatcgcggagcttaaagacgaaaaaggaaataatatacaggtaaaattgagtttccgctggccggtaaagcgcgccgtcgactgttacgaagagcggcttaaacccgtagacccgatggttacccgcgtccgccttatcgacacattctttcctgtagcgcgcggcggtacttactgtattcccggtcccttcggcgccggcaagacggttctccagcagataaccagccgtttcgcggacgttgacatcgtaatcgtcgccgcctgcggtgagcgtgccggtgaggttgtagaaactcttaaagaattccccgaattaaaagacgaaagaacaggccgctctcttatggaacggacaataattatttgtaacacttcttcaatgccggttgccgcgcgtgaagcgtcggtttacacggcggtaacccttgccgagtattacaggcagatggggcttcacgtccttcttcttgccgactcgaccagccgctgggcgcaggccatgcgtgaaatgtcaggccgccttgaggaaattcccggtgaagaagcgttccccgcttacatggaatcgacaatcgctaacttctacgaaagagccggtattgtgcggttaagagacggaagtctcggttccgtaaccatcggcggcacggtaagccctgcgggcggtaactttgaagagcctgttactcaggcaactcttaaagttgtcggcgctttccacggactgtcccgcgaacgctccgatgcccgcaagttccccgctattcatcctatggattcatggtcaaagtacaagggaattattccatcggagaaagttggatatgcccacggctttatgagacgcggcagtgaagttgaacaaatgatgaaggttgtaggcgaggaaggtacaagtatcgaagactacattatttacctgaagggcgatcttatcgactccgtttacttccagcaaaactcatttgatgcggtagacgctgccgttaaacctgaaaggcaaaaatatgtatttgcaaaactgctttttgttttagcgtctcagtttactttttcagataaaaacgaagcgcgaagctggtttaacagactcaggcagaagttcctggactataatggttccgaatggaagagcgagcgttttgagggacttgaaagcgaaattgaaagcgcaatcaaaacccagtcgaaaggcttggacaaagctgccgaaaaaatattggtgtaa

SEQ ID NO: 55598 - protein, 513 aa, Unknown
  Obtained from environmental sample
  DOMAIN (145)...(367): ATP synthase alpha/beta family, nucleotide-binding domain
  misc_feature (1)..(513): Xaa is any amino acid
MLSVEVGPGLLGQVYDGLQNPLPQLAKAAGYFLERGVYIDPLPGDSSWQFTPKAKEGDRVERADTLGTVPEGSFTHRIMVPFYLYGSYTVSWVKPEGSYKIHDTIAELKDEKGNNIQVKLSFRWPVKRAVDCYEERLKPVDPMVTRVRLIDTFFPVARGGTYCIPGPFGAGKTVLQQITSRFADVDIVIVAACGERAGEVVETLKEFPELKDERTGRSLMERTIIICNTSSMPVAAREASVYTAVTLAEYYRQMGLHVLLLADSTSRWAQAMREMSGRLEEIPGEEAFPAYMESTIANFYERAGIVRLRDGSLGSVTIGGTVSPAGGNFEEPVTQATLKVVGAFHGLSRERSDARKFPAIHPMDSWSKYKGIIPSEKVGYAHGFMRRGSEVEQMMKVVGEEGTSIEDYIIYLKGDLIDSVYFQQNSFDAVDAAVKPERQKYVFAKLLFVLASQFTFSDKNEARSWFNRLRQKFLDYNGSEWKSERFEGLESEIESAIKTQSKGLDKAAEKILV

SEQ ID NO: 55599 - DNA, 1083 bp, Unknown
  Obtained from environmental sample
  misc_feature (1)..(1083): n is a, c, g, or t
atgaacgcgtactggaacagccgcataaaaaatctttctccctatgtgcccggcgaacagccgaaagacaggaagtttatcaaactgaataccaacgaaaacccctatccgccttcgccgaaggtcattgaggcgcttcaaaaggccgttaatgacagcctgcgtttgtaccccgatcccgaatgtaccgtgtttcgggaagcgatcgccgcccactgccgggtgcggactgaacaggtttttgccggcaatggctctgatgaaatactggcgtttgctttcgccgcgtttttcgaaagctccgccgacgcaaaaccgattctttttcctgacattagctacagtttttatcccgtttatacccgtttttgggatattccataccgtaccattcccttaaacgagcattttttcattaataccgcggagtataaaattccctccggcggagttgtattgccaaatcccaacgcccccaccggaatgaccctgccgttaggcgatattttatcattggctgaatatcttgaaagaaccaaaaatgtttttattcttgatgaggcatatacggggtttggcgcggattcggccgtcccccatatcggggatcatccaaacctgctcaccgttcacacgctttcaaaatcaggctctcttgccggattgcgcgccggcttcgccgtcggaagcaagggcttgatcgaggggctttgccgcgtgcgggactctatcaactcttacacccttgaccgtcttgccctcgccggcgcgaccgccgcgctctcagacgccgcttattacaatgaaatcaacagccgggtcgttaaaacgcgtgaaagggtaacggaagcgctgcgaatcatgggctttaccgtccttccctcggcggcaaattttattttcataaaggcgctcaatgtaaatggagccggttttttttcagcgctccgtgaaaaaggaatactggtaaggcattttaacaaggagcggatttcagatttcatcagggtcagcatgggaacggacaaagatatggatctgttccttgacgcatgcagggaaataatccatcaacgcaggtaa

SEQ ID NO: 55600 - protein, 360 aa, Unknown
  Obtained from environmental sample
  DOMAIN (24)...(352): Aminotransferase class I and II
  misc_feature (1)..(360): Xaa is any amino acid
MNAYWNSRIKNLSPYVPGEQPKDRKFIKLNTNENPYPPSPKVIEALQKAVNDSLRLYPDPECTVFREAIAAHCRVRTEQVFAGNGSDEILAFAFAAFFESSADAKPILFPDISYSFYPVYTRFWDIPYRTIPLNEHFFINTAEYKIPSGGVVLPNPNAPTGMTLPLGDILSLAEYLERTKNVFILDEAYTGFGADSAVPHIGDHPNLLTVHTLSKSGSLAGLRAGFAVGSKGLIEGLCRVRDSINSYTLDRLALAGATAALSDAAYYNEINSRVVKTRERVTEALRIMGFTVLPSAANFIFIKALNVNGAGFFSALREKGILVRHFNKERISDFIRVSMGTDKDMDLFLDACREIIHQRR

SEQ ID NO: 55601 - DNA, 915 bp, Unknown
  Obtained from environmental sample
  misc_feature (1)..(915): n is a, c, g, or t
gtgccagggctgcggcgagacggcctacgtcaaactgctcacccagctgtgggcgacaggctctacatcgccaacgccacgggctgctcttcgatctacggcggcaacctgcccaccacgccatacgcgcaacgcgccgacggacgcggccccacgtggaacaactcgctcttcgaggacaacgccgaggtcgcctacggtatgcgcctctccgtcgataagttcgcggagtacgcgaaagagctcgccaagaaggtttccgagtccggctcgtccgatctcaaagccgtcctgggcgaaatcctgagcgccgaccagtcctccaacgaactgatcgaagcccagcgcgcccgcgtcgccaaagccaaagatttactgaagaaaggctccgacgaggcgagcaaggagctgctcagcgttatcgactaccttgtcaagaagtcgatttgggcgctaggcggcgacggttgggcgtacgacatcggttacggcggcctcgaccacgttttggccgcgggcaaaaatgtcaagatcttggtcttggacaccgaagtctactcgaacaccggcggccaggcctccaagtcgacgccgatgggcgcggtggccaagttcgccgccagcggcaagcccaccaagaagaaggacatgggcatgatcgctatgagctacggttacatctacgtagcccgcgtggccttgggcgcgaaccagaatcaggcgataaaggcgttcgcggaagccgacgcgtacgacgggccggcgatcatcctggcctactcgcactgcatatcccacggtataaacatgatcaacggctacgacgagcagaagaaagcggtcgaatccggccactggccgctctaccgctacaatccggcgctcgttgaccaaggcaagaacccgtggagttag

SEQ ID NO: 55602 - protein, 304 aa, Unknown
  Obtained from environmental sample
  DOMAIN (129)...(259): Thiamine pyrophosphate enzyme, C-terminal TPP binding domain
  misc_feature (1)..(304): Xaa is any amino acid
MPGLRRDGLRQTAHPAVGDRLYIANATGCSSIYGGNLPTTPYAQRADGRGPTWNNSLFEDNAEVAYGMRLSVDKFAEYAKELAKKVSESGSSDLKAVLGEILSADQSSNELIEAQRARVAKAKDLLKKGSDEASKELLSVIDYLVKKSIWALGGDGWAYDIGYGGLDHVLAAGKNVKILVLDTEVYSNTGGQASKSTPMGAVAKFAASGKPTKKKDMGMIAMSYGYIYVARVALGANQNQAIKAFAEADAYDGPAIILAYSHCISHGINMINGYDEQKKAVESGHWPLYRYNPALVDQGKNPWS

SEQ ID NO: 55603 - DNA, 1935 bp, Unknown
  Obtained from environmental sample
  misc_feature (1)..(1935): n is a, c, g, or t
atgaaacagataagcgaaaataatccgctgttctccgaagaaatgcgtcttaatatgatcaatattgatcatccgggaaaaattgctgattttatagcgagcattcttaacattgacaaagccgaacagcagaaaattcttgagatactgaacgtgcgaaagcgaatggaacaggttttggtttttattaaaaaagaacaggagcttttgcgcatacaaaaaaagattcaaagggaaataaatgagaaaatagaaaaatcacagagggattattttttaaaggaagaacttaaagcgataaagggcgagcttggcatgactacggatgccaagagttccgaccaccagcgttttaaagagaaatttgactcttttaagtttgaaggcgaaataaaggaagtcgtcgatcaggagatggaaaaattctcactaatggagccaaactccgctgaatttaccgttacgcgcaactatcttgacgtgattgccgccctcccttggaataatcccgcccccgaagaatttgaacttaaaaaagcgcaggaaatcttagaagccgatcattacgggcttaaagacgtaaaattaagaatagtcgagtatttggcggtgcgcaaactgcgcaaagacacaaaaggctccattgtctgtcttgtcggtccgccgggggtgggaaaaacttccgttgggaaatcaatcgcgagggcgcttggaaagcaatttttccggttttccgtcggcggaatgagggacgaggcggaaattaaggggcacaggcgcacatacattggggcgatgccgggaaaaattattcaggggctaaaaatagttaagactaaagaccttgtttttatgatagacgaaatcgataaaatgggcgcgagttttcaaggcgatcccgcaagtgccctccttgaagtgcttgatcccgaacagaacaacgctttccgcgatcattacctagatttgccctttgacatttccaatgtgttttttattgttacggcaaatacaatggatactattcccgttccgttaattgatcgtatggaaattattcaacttcccggttacattgatacagaaaaactggaaatcgcaaagcgttatcttttgccaaagagccttgaaaaaaacggattgaaaaagaatcaggtaaaatacacaaaagacagtctgttgcacatagcaaattgttatgcgcgggaatccggagtgcgtaattttgaaaaaaaccttgataagattcaccgcaaactcgcaaaacagattgtagacgcgcaggagaaaaacgaagaaaaaacactgcgttttaatattgataaaaaactaatagaaaaacatttgggtaaaccaattttccgcgaagacgacattaaaacggctgataaaccaggaatgtcggtgggtcttgcatggacaagcatgggcggagacacactggtaatcgaagcgacatcgcttcccggaaaagagggaataacgctaacgggcaaaatgggcgacacgatgaaagagagcgccgaaattgccatgactgtcgcgcgcaaaatggcggtggaaaaatacaacgtagaaaaagactggtttgacaaaaaccacattcatctgcacatccctgaaggcgcgactcccaaagacggcccttccgccggtatcacaatggcagtggcgcttctttccctaatgcgtgacaaagtaataacgcaaaggcttgtgatgactggggaactctccctaacaggccatgtactgccaatcggcggcctaaaagaaaaaacagtcgccgccagaagaaacaaagcaaagcacatcatcttccccaaacaaaacgaacgcgacttggacgagattcccgatcatgtgaaaaaaggaatagaattccaccccgtagaacgctttgaagaagtgctatctctggctctgccggaataa

SEQ ID NO: 55604 - protein, 644 aa, Unknown
  Obtained from environmental sample
  DOMAIN (215)...(358): ATPase family associated with various cellular activities (AAA)
  misc_feature (1)..(644): Xaa is any amino acid
MKQISENNPLFSEEMRLNMINIDHPGKIADFIASILNIDKAEQQKILEILNVRKRMEQVLVFIKKEQELLRIQKKIQREINEKIEKSQRDYFLKEELKAIKGELGMTTDAKSSDHQRFKEKFDSFKFEGEIKEVVDQEMEKFSLMEPNSAEFTVTRNYLDVIAALPWNNPAPEEFELKKAQEILEADHYGLKDVKLRIVEYLAVRKLRKDTKGSIVCLVGPPGVGKTSVGKSIARALGKQFFRFSVGGMRDEAEIKGHRRTYIGAMPGKIIQGLKIVKTKDLVFMIDEIDKMGASFQGDPASALLEVLDPEQNNAFRDHYLDLPFDISNVFFIVTANTMDTIPVPLIDRMEIIQLPGYIDTEKLEIAKRYLLPKSLEKNGLKKNQVKYTKDSLLHIANCYARESGVRNFEKNLDKIHRKLAKQIVDAQEKNEEKTLRFNIDKKLIEKHLGKPIFREDDIKTADKPGMSVGLAWTSMGGDTLVIEATSLPGKEGITLTGKMGDTMKESAEIAMTVARKMAVEKYNVEKDWFDKNHIHLHIPEGATPKDGPSAGITMAVALLSLMRDKVITQRLVMTGELSLTGHVLPIGGLKEKTVAARRNKAKHIIFPKQNERDLDEIPDHVKKGIEFHPVERFEEVLSLALPE

SEQ ID NO: 55605 - DNA, 369 bp, Unknown
  Obtained from environmental sample
  misc_feature (1)..(369): n is a, c, g, or t
atggccgacttaatgcgccccgctctttacggcgcgtatcatcacataacgattcccggaaaggaaaatgttcctctcaccgaagtttacgatgtggtgggaagtctgtgcgaaaacaacgacaagttcgcaattcagcgaagtctgcctaagatagaggttgccagcgagaacggaataggcgacttagtcgttatccacgacgccggcgcccacggaagagcgatgggttttaactacaacggcaaactgcgctgcggggaactgcttctgcggcaggacggctctatcattcaaatccgccgcccggaaactacagacgactatttcgccacgctggatcttgccggggtcagggatttcagctaa

SEQ ID NO: 55606 - protein, 122 aa, Unknown
  Obtained from environmental sample
  DOMAIN (1)...(91): Pyridoxal-dependent decarboxylase, C-terminal sheet domain
  misc_feature (1)..(122): Xaa is any amino acid
MADLMRPALYGAYHHITIPGKENVPLTEVYDVVGSLCENNDKFAIQRSLPKIEVASENGIGDLVVIHDAGAHGRAMGFNYNGKLRCGELLLRQDGSIIQIRRPETTDDYFATLDLAGVRDFS

SEQ ID NO: 55607 - DNA, 948 bp, Unknown
  Obtained from environmental sample
  misc_feature (1)..(948): n is a, c, g, or t
atggagaaaaagagagctccaagaaacaggacgataaccgtttcgaagaaagagagcagtcttcttaaaaagaagctgttttatccgaccggtaaaaaaatatcctccttacagatacaaaataaaaccatttgcgccgatttgttttctgttttggatttattgccgcatgaatttgccgaccttttaataattgatccgccttataatttagacaagaattttaacggattaaaattttctaaaacaaatgacaacgcgtatttggaatatttgaaaagctggttcccgaaaatactgaacacattaaaaccaaacggttccgtatatatttgcggagactggaaaagtactttttgcctttatcaaataatgcgggataatttaataataagaaacagaattgtctggcagcgggaaaaaggaaggggagcgaaatcaaactggaaaaattcgtgcgaagacatctggttcggaacaaaaaacgattattattattttaatgtagacgcggtaaaacaaaaacgaaaaataatcgctccctacagggaaaacggcaagccaaaagactgggaagaaacagaagacggtaaattcagattaacatatcccggtaatttttgggatgacatatctatcccctattggtcaatgccggagaatacagaccatcccacgcaaaaaccggagaaactaatcgcaaaacttattttagcaagctgtccggaaaatggtattgttttggatccgtttttaggttccgggacaacatctgttgtagcgaaaaaaatagggcgaaaatatgttgggatagaaaaaaatgaagaatactgctgttgggctgaaaaacgcttagctctggcggaaaccgataaaaatatacagggattttcgggcggtgttttttgggaaagaaacacattgaatattcaaaagagagaaaagtaa

SEQ ID NO: 55608 - protein, 315 aa, Unknown
  Obtained from environmental sample
  DOMAIN (60)...(283): DNA methylase
  misc_feature (1)..(315): Xaa is any amino acid
MEKKRAPRNRTITVSKKESSLLKKKLFYPTGKKISSLQIQNKTICADLFSVLDLLPHEFADLLIIDPPYNLDKNFNGLKFSKTNDNAYLEYLKSWFPKILNTLKPNGSVYICGDWKSTFCLYQIMRDNLIIRNRIVWQREKGRGAKSNWKNSCEDIWFGTKNDYYYFNVDAVKQKRKIIAPYRENGKPKDWEETEDGKFRLTYPGNFWDDISIPYWSMPENTDHPTQKPEKLIAKLILASCPENGIVLDPFLGSGTTSVVAKKIGRKYVGIEKNEEYCCWAEKRLALAETDKNIQGFSGGVFWERNTLNIQKREK

SEQ ID NO: 55609 - DNA, 684 bp, Unknown
  Obtained from environmental sample
  misc_feature (1)..(684): n is a, c, g, or t
ttggaatatttgaaaagctggtttccgaaaatactgaacacattaaaaccaaacggttccgtatatatttgcggagactggaaaagtactttttgtctttatcaaataatgctggataatttaataatcagaaacagaattgtttggcagagggaaaaaggaaggggagcgaaagcaaactggaaaaattcatgcgaagacatctggtttggaacaaaaaacgaagattattattttaatgttgatgcggtaaagcaaaaacgaaaagtaatcgctccttacagggaaaacggcaagcccaaggactgggaagaaaccgaagacggcaatttcagactaacatgtcccggcaatttttgggacgatatatctattccctattggtctatgcctgagaacaccgatcacccaacgcaaaaaccggaaaaattaatcgcaaaacttattttagcaagctgcccggaaaacggtatagtattagatccgtttttaggttcgggaacaacatctgttgttgcgaagaaactggggcgaaaatatgtaggaatagagaaaaatgaggaatactgctgtttagctganaagcgcttaattctggcggataccgataaaaatattcagggattttcgggcggtgttttttgggaaagaaacacactgaatattcaaaaaagagaaaaataa

SEQ ID NO: 55610 - protein, 227 aa, Unknown
  Obtained from environmental sample
  DOMAIN (1)...(195): DNA methylase
  misc_feature (1)..(227): Xaa is any amino acid
MEYLKSWFPKILNTLKPNGSVYICGDWKSTFCLYQIMLDNLIIRNRIVWQREKGRGAKANWKNSCEDIWFGTKNEDYYFNVDAVKQKRKVIAPYRENGKPKDWEETEDGNFRLTCPGNFWDDISIPYWSMPENTDHPTQKPEKLIAKLILASCPENGIVLDPFLGSGTTSVVAKKLGRKYVGIEKNEEYCCLAXKRLILADTDKNIQGFSGGVFWERNTLNIQKREK

SEQ ID NO: 55611 - DNA, 1860 bp, Unknown
  Obtained from environmental sample
  misc_feature (1)..(1860): n is a, c, g, or t
atgatggaagtgtcgattatgaatattgaaatgccgaaattatttttaaaacgaccgttatatgtacaattgttttttaccggttttgcgtttgtgttgatgactcttttgagttatttttttgtaaacagaatcgtaaaagacaacattttgcgtaacacagaaagcgttcttgattatttgcaagcccaaattgaaaccgatattgcggaattgaaaaccacattgggcgcttattcacaaggtgtgcgcagtatgctcctaaacggagaagattcggacaagataagatattacaccgatgaaatatcaatttttttaagatcaatggaaaaaagcgaattttccattaacggcgtttacggttatattgaaaaatttcccggcggacctatttttcttaatggacttaatatgcgtctgccggatgactattcgcctacggagcgtccctggtacaaggcgtctcttacggcaggcagaggtatcgtagaaacgccgccttaccgcgatatggtaacaaacgaaattattataacttatttatgcaatatttatgatgataaaggcgatcgtttgggcgttgtatgcgttgacgctcgcgccggctatattggagaaaaaacaataaatatgattcaatccagaaacggtttcggatatttggctgccaaggatttaactttgcttgcccattccaaccctgaattttcaggaatgaatctatccaatcctgtaattcctctttcaaaatatgtaaccgaacttctggagagaggaacaatttcggaagctccgctggtaaattggaaaggagaggacgctgtttactttgcccgaaggcttccaaacggctggtatttgggttttttaacaataaaaagcatctattatcagaaagtaagacaaatggcgtttactttgggcgcgctgggcatagcgcttgcttcggtgttgataatggtattaattagggtagacgccgccagaaataaatcggatatggagagcaagtacaaaagcacgtttcttgccaacatgagccacgagatacgcacgccgatgaacgctataatcggcatggttacaataggaaaatccgtttccgatattgagcgcaaggattattgtctttctaaaataggggacgcttctaaccatctgcttggaataatcaacgatattctggatatgtcaaaaatagaagctaataaatttgatctttcctcggtggaatttaattttgagaaaatgctccagcgggtagtaaccgtcatcaatttccgcctggaagaaaagaagcaaaaattctctttatacattgataaaaatatacccaagatgttaatcggcgatgatcaaagacttgctcaggttcttactaatcttttggggaacgcgattaaattcacgccggaaaaaggttctattactcttaactcgcgctttgttaaagaagaagacggcgtctgtactttacaaataagcgtaagcgataccggaataggtataagccccgaacaacaggcaaaactgttccaatcgtttgaacaagcggaatcaaacacaacgcgcaaatacggaggcacaggtctgggtcttgctataagtaaaaacatagtggaaatgatgggcggcgaaatatggataaattccgaaattggaaaaggctcaacttttacctttaaggttcaaatgaagcgcgccgcggaaattacggacgagagcgcgagcaaaaacaaacaagagacggaaaaattacaggtgaatgaaggtgtctttgccgggcggcgtctgcttcttgtggaagacgtggagataaaccgcgagatttgtcagtccctgcttgaaacccactaa

SEQ ID NO: 55612 - protein, 619 aa, Unknown
  Obtained from environmental sample
  DOMAIN (166)...(245): Cache domain
  misc_feature (1)..(619): Xaa is any amino acid
MMEVSIMNIEMPKLFLKRPLYVQLFFTGFAFVLMTLLSYFFVNRIVKDNILRNTESVLDYLQAQIETDIAELKTTLGAYSQGVRSMLLNGEDSDKIRYYTDEISIFLRSMEKSEFSINGVYGYIEKFPGGPIFLNGLNMRLPDDYSPTERPWYKASLTAGRGIVETPPYRDMVTNEIIITYLCNIYDDKGDRLGVVCVDARAGYIGEKTINMIQSRNGFGYLAAKDLTLLAHSNPEFSGMNLSNPVIPLSKYVTELLERGTISEAPLVNWKGEDAVYFARRLPNGWYLGFLTIKSIYYQKVRQMAFTLGALGIALASVLIMVLIRVDAARNKSDMESKYKSTFLANMSHEIRTPMNAIIGMVTIGKSVSDIERKDYCLSKIGDASNHLLGIINDILDMSKIEANKFDLSSVEFNFEKMLQRVVTVINFRLEEKKQKFSLYIDKNIPKMLIGDDQRLAQVLTNLLGNAIKFTPEKGSITLNSRFVKEEDGVCTLQISVSDTGIGISPEQQAKLFQSFEQAESNTTRKYGGTGLGLAISKNIVEMMGGEIWINSEIGKGSTFTFKVQMKRAAEITDESASKNKQETEKLQVNEGVFAGRRLLLVEDVEINREICQSLLETH

SEQ ID NO: 55613 - DNA, 1761 bp, Unknown
  Obtained from environmental sample
  misc_feature (1)..(1761): n is a, c, g, or t
atgattggaacaaaaggaatagtgacagccgttaacggcaacatggtaagcgtccgctttgacggaatcgtctccatgaacgaggtcggctatgtgaaagtcgccgataagcggctgaaaagcgaagtaatcaggattcgcggcgagataagccaacttcaggtttttgaaattaccaaaggtatttccattggcgatgaagttgaatttacaggggatatgttgtcggttgagttgggccccggtcttcttggacaggtttacgacggtcttcaaaacccgcttccccagttggcgcaggctacgggattctttctggaaaggggtgtttatcttgacgctttgtcggtgtccaatatgtggcaatttacgccaaaggcaaaacccggcgataaagttgaacgcgccgatacgctgggaacggtacctgaaggttcttttacccaccgtattatggtgccttttaacctcttcggcagttatactgtttcatggataaaacccgcgggcagttacaacattcgcgaaactatcgcggagttaaaagatgaaaaaggaaattccgttcccgttactctcagtttccgttggcctgtaaaaagggcgataaactgctacgaagaacgcctaaaaccgacggagccgatggttacccgcgtccgtctaatcgacacgttcttccccgtcgcccgtggcggaacctactgtatccccggcccattcggcgcgggcaagacggttcttcagcagattacaagccgctttgcggacgtagatatagtaattattgcggcgtgcggtgaacgcgccggcgaagtcgtggaaaccttaaaagaattccccgaattaaaagacgaaaaaacaggccgttccctcatggaaaggactatcattatttgtaacacttcttcaatgcccgtcgccgcgcgcgaagcttccgtatatacggctgttacgcttgccgaatattacaggcagatgagcttgaacgtccttctgcttgcggactccacaagccgctgggcgcaggcaatgcgtgaaatgtcagggcgtttggaagaaatccctggcgaagaagccttccccgcttacatggaatcgacaatcgccagcttctacgaaagagccggtatcgtacgcatgcgtgacggcggtataggctccgttacaatcggtggaaccgtaagccctgcgggcggtaactttgaagagcctgtaacgcaggcgacattaaaagtcgtaggcgcgttccacggtctatcacgtgaacgctcagacgcgcgtaagttcccggccatccacccgcttgattcatggtcaaagtacaagggaattatcgagggcgaaaaagttgaatacgctcacgggtttatgcgcagaagttctgaagttgaacagatgatgaaggttgtcggcgaagaaggaacaagtatcgaagactacgttattttcttaaagggcgatcttgtcgattccgtatacttccaacaaaactcatttgatgaagtggacgcggcggttaaacctgaaagacaaaaatatgtttttgccaagttgttgtttattcttggttctaaatttacttttacggacaagaatgaagcgcgcacgtggtttaataaactcaggcaaaaattcctcgattataacggcagtccatggaagagcgagcgttttgacaaacttgaatccgaaattgattcggcggtaaagagtcaatccaagggtcttgataaaacggccgaaaaaattatttattag

SEQ ID NO: 55614 - protein, 586 aa, Unknown
  Obtained from environmental sample
  DOMAIN (8)...(72): ATP synthase alpha/beta family, beta-barrel domain
  misc_feature (1)..(586): Xaa is any amino acid
MIGTKGIVTAVNGNMVSVRFDGIVSMNEVGYVKVADKRLKSEVIRIRGEISQLQVFEITKGISIGDEVEFTGDMLSVELGPGLLGQVYDGLQNPLPQLAQATGFFLERGVYLDALSVSNMWQFTPKAKPGDKVERADTLGTVPEGSFTHRIMVPFNLFGSYTVSWIKPAGSYNIRETIAELKDEKGNSVPVTLSFRWPVKRAINCYEERLKPTEPMVTRVRLIDTFFPVARGGTYCIPGPFGAGKTVLQQITSRFADVDIVIIAACGERAGEVVETLKEFPELKDEKTGRSLMERTIIICNTSSMPVAAREASVYTAVTLAEYYRQMSLNVLLLADSTSRWAQAMREMSGRLEEIPGEEAFPAYMESTIASFYERAGIVRMRDGGIGSVTIGGTVSPAGGNFEEPVTQATLKVVGAFHGLSRERSDARKFPAIHPLDSWSKYKGIIEGEKVEYAHGFMRRSSEVEQMMKVVGEEGTSIEDYVIFLKGDLVDSVYFQQNSFDEVDAAVKPERQKYVFAKLLFILGSKFTFTDKNEARTWFNKLRQKFLDYNGSPWKSERFDKLESEIDSAVKSQSKGLDKTAEKIIY

SEQ ID NO: 55615 - DNA, 561 bp, Unknown
  Obtained from environmental sample
  misc_feature (1)..(561): n is a, c, g, or t
gtgggatcatactattattttatagcccagcttccttatctcgtatacggaacaaaaccgcccatgtcttctgaaaattttaaagcgatggtggggactctgttagatgataacgacgcaaaattaatgcaatatctttcctttgacggtgtgttttcaaacgattcctgtgaatgcgattttatcaatagttggcggaattgggaacgtgcccttagattgaatctcgcgaaagaaagggcgcttaaattaaagaaagaagttcaagtaactgacattccgttctttccgcaggaggccgccgtcgcggcttccaaagccgtagatgaaaagtccccgttggacggagaggtattactggataaagcgcgttggaacgccatagatgcgatggcgggtaatgaatattacagcataaacggcgtatatgcctattatttaaaactgttactgcttgaaagacggcaagtctttaacgctgaaaaaggatttgcagaatataaaacattgtacgcttccattctggaaagcgcgcaaaattccccgggggaaaataaatga

SEQ ID NO: 55616 - protein, 186 aa, Unknown
  Obtained from environmental sample
  misc_feature (1)..(186): Xaa is any amino acid
MGSYYYFIAQLPYLVYGTKPPMSSENFKAMVGTLLDDNDAKLMQYLSFDGVFSNDSCECDFINSWRNWERALRLNLAKERALKLKKEVQVTDIPFFPQEAAVAASKAVDEKSPLDGEVLLDKARWNAIDAMAGNEYYSINGVYAYYLKLLLLERRQVFNAEKGFAEYKTLYASILESAQNSPGENK

SEQ ID NO: 55617 - DNA, 561 bp, Unknown
  Obtained from environmental sample
  misc_feature (1)..(561): n is a, c, g, or t
atggtaaggcgtgttttcatagagaaaaaaaaaggttttaatatggaggccctgcggctcaaggaagagcttgccggctttcttggggataagtttcctgagctaaaagaattagagtctcttagaatactcaggcgttacgacgcggacgatctcgaagaagaacagtttaaacaactgacagcggcggtcttttccgagcctcagacagattgcgtattttacggaacagaattctcggcaaaagaaaaaaacgaacgcttttttggaattgagtacctgccggggcagtacaatcaaagagccgattcggcggaacaatgcgcggcgcttgttataggggtaaagcccaggatcaggacagcggatatttacgttttcgaaagcgaccgctcgcccctttcggatgccgcccttgaaggaataaaaaaataccttataaaccctgttgattcaagagaagcttcgcctaatctcccccgtactcttgacgaggcgacaaacgaacctgccgacgttgcggtgctttccggtttattcaaatggacggcacaggtctaa

SEQ ID NO: 55618 - protein, 186 aa, Unknown
  Obtained from environmental sample
  misc_feature (1)..(186): Xaa is any amino acid
MVRRVFIEKKKGFNMEALRLKEELAGFLGDKFPELKELESLRILRRYDADDLEEEQFKQLTAAVFSEPQTDCVFYGTEFSAKEKNERFFGIEYLPGQYNQRADSAEQCAALVIGVKPRIRTADIYVFESDRSPLSDAALEGIKKYLINPVDSREASPNLPRTLDEATNEPADVAVLSGLFKWTAQV

SEQ ID NO: 55619 - DNA, 1047 bp, Unknown
  Obtained from environmental sample
  misc_feature (1)..(1047): n is a, c, g, or t
atgaagttttcagtcgcagtaatccccggagacggaatcggccccgaagtgatagcgccggctcttgaagtccttgacgctgtgggggacaagtacggccatatattcaactatgtcgagcttgaggcaggcgggcttgccattgatcacagtggggaaccgcttcctaaagaaactcttgaaactgcgaaacaatgtgacgctgttcttttgggagcggtcggcggccccaagtgggatagcctccccgggcatctacgtcctgaaagagcgttgcttggtcttcgcgcagggcttggcgttttcgccaatcttcgtccggcctcactgctcccccagttaaaatcagcctgcccgattaaagacgaagtgctaatagcaagcaacagtgagggaaaagcagctttcgatttattaattgtaagagaacttacgggcggtctttacttcggtaagcgaggacgattggaagagccatcaaacggacacagtcccggttcggcttttgatactgaaacttattcatggatggaaattgaaagggtactccgcgctggttatgaagcggctacggtacggcggaaaaaactctgcgttgtggacaaagccaacgtgctagagtcgtcccgtttctggcgcgaagtatcggcggtagtttcaaaggactaccctaacatagagacaagttatctctatgttgacaatgccgccatgcagttaatccgcgccccaggacaattcgatgtaatagttacatcaaatctttttggagacatactttcagatgaagcctcagtacttaccggctcaatcggtatgcttgcctccgcaagtcttggtgaaaaaatacaggacggaaccagaccaggaatgtatgagcctattcatggctccgcgcctgacatagcgggaaaggatattgccaatccacttgcgacaatcctttcagcggcgatgatgctccgttactcattcggtcttgagaaggaagcgcaatccattgaaaccgccgttaatcatgtgctggatcagggattgagaacataa

SEQ ID NO: 55620 - protein, 348 aa, Unknown
  Obtained from environmental sample
  DOMAIN (4)...(348): Isocitrate/isopropylmalate dehydrogenase
  misc_feature (1)..(348): Xaa is any amino acid
MKFSVAVIPGDGIGPEVIAPALEVLDAVGDKYGHIFNYVELEAGGLAIDHSGEPLPKETLETAKQCDAVLLGAVGGPKWDSLPGHLRPERALLGLRAGLGVFANLRPASLLPQLKSACPIKDEVLIASNSEGKAAFDLLIVRELTGGLYFGKRGRLEEPSNGHSPGSAFDTETYSWMEIERVLRAGYEAATVRRKKLCVVDKANVLESSRFWREVSAVVSKDYPNIETSYLYVDNAAMQLIRAPGQFDVIVTSNLFGDILSDEASVLTGSIGMLASASLGEKIQDGTRPGMYEPIHGSAPDIAGKDIANPLATILSAAMMLRYSFGLEKEAQSIETAVNHVLDQGLRT

SEQ ID NO: 55621 - DNA, 789 bp, Unknown
  Obtained from environmental sample
  misc_feature (1)..(789): n is a, c, g, or t
atgaaatacatagaagagactctcggggaagttctccgggaaaaagcccggatacaaccggatcatgactttttggtttacgcggacagggatttgcgctttacttatgcggagttcgacaagcgcgttgataatttggcaaaaggcctcctttcaatggggcttaaaaaaggcgatcaccttgggatatgggcgacaaacgtccctgactggaacacgatcctctttgcctgcgccaggctgggagtggtttccgtaaccgtaaacacaggctacaagctccacgaactggagtatttgatgaagcaggctgatctggcctgcatctgcatcatcgatggctttaaggattcggattatgtctcgatggtgaatgagcttgtaccggaactaaagacagcgccaagggggaatttgcactccgagaaattcccgtttctgaaatatgtggtctacataggccagcagaagcaccgcggaatgtactcgtttaacgagctgcttcttttgggacagcacagctacgaaagggaattcaggctgatagaagcgtcgctggaccgcaacgacgtggtaaacatgcagtacaccagcggcaccacggngctttcccaagggggtcatgcttacccacaggaacatactcaacaacgggctggggatcggcgacaaccagcgcctgacggaaaaagacatcgtatgtctgcccgtgccgcttttccactgcttcggcctggtgctgggaatgatggcgattctgacccacggctcaaccgcggcaatcgttga

SEQ ID NO: 55622 - protein, 262 aa, Unknown
  Obtained from environmental sample
  misc_feature (1)..(262): Xaa is any amino acid
MKYIEETLGEVLREKARIQPDHDFLVYADRDLRFTYAEFDKRVDNLAKGLLSMGLKKGDHLGIWATNVPDWNTILFACARLGVVSVTVNTGYKLHELEYLMKQADLACICIIDGFKDSDYVSMVNELVPELKTAPRGNLHSEKFPFLKYVVYIGQQKHRGMYSFNELLLLGQHSYEREFRLIEASLDRNDVVNMQYTSGTTXLSQGGHAYPQEHTQQRAGDRRQPAPDGKRHRMSARAAFPLLRPGAGNDGDSDPRLNRGNR

SEQ ID NO: 55623 - DNA, 1029 bp, Unknown
  Obtained from environmental sample
  misc_feature (1)..(1029): n is a, c, g, or t
atgcttacccacaggaacatactcaacaacgggctggggatcggcgacaaccagcgcctgacggaaaaagacatcgtatgtctgcccgtgccgcttttccactgcttcggcctggtgctgggaatgatggcgattctgacccacggctcaaccgcggcaatcgttgaatggttcgaccccctgctggtgctggccacaatccaaaaggaaaaatgtaccgccgtgtacggggttccgaccatgttcatagcggaactgaaccaccccatgttcaagatgttcgatctttcaagcctccgtaccggcatcatggcgggatcgccctgccccattgaaaccatgcgccaggttatcgacctgatgaacatgaaggatgtcacgatatgctacggtctaaccgagtcctcccccgtaatgacccagacccgctacgacgacagcattgaggcaaaggtcgagacagttggccgcgccctgcccggcattgaagtaacgatccgcaacccggataccggcgaggagtgccccaacggcgtacacggcgaattctgctgccgcggctacaacagcatgaagggctactacaaaatgcccgaagccaccgcccagtgcattgacgaaaaaggctggctccattcaggcgatttgngcgtgaaggacgataacggcttctttaaagtcaccggccgcattaaagacatgatcatccgcggcggtgaaaacgtgtatcccaaagaaatcgaagacttcttgtacaccatgccccgaatcaaggacgtacaggttgtgggcatcaccagcaaaaaatacggcgaggaagtgggggcctttgtcatccttcatcccggcgttatcatgaacgaggaagatgtccgcgacttctgccgcgggcagataagccgtttcaagattcccaagtacgtgttttttgtcgatggtttcccgctgacttcatcgggcaaaattcagaaatacctgctgagggaacaaggcgtaaaaaaagtcgaagaacttggaatagctacttaa

SEQ ID NO: 55624 - protein, 342 aa, Unknown
  Obtained from environmental sample
  DOMAIN (1)...(262): AMP-binding enzyme
  misc_feature (1)..(342): Xaa is any amino acid
MLTHRNILNNGLGIGDNQRLTEKDIVCLPVPLFHCFGLVLGMMAILTHGSTAAIVEWFDPLLVLATIQKEKCTAVYGVPTMFIAELNHPMFKMFDLSSLRTGIMAGSPCPIETMRQVIDLMNMKDVTICYGLTESSPVMTQTRYDDSIEAKVETVGRALPGIEVTIRNPDTGEECPNGVHGEFCCRGYNSMKGYYKMPEATAQCIDEKGWLHSGDLXVKDDNGFFKVTGRIKDMIIRGGENVYPKEIEDFLYTMPRIKDVQVVGITSKKYGEEVGAFVILHPGVIMNEEDVRDFCRGQISRFKIPKYVFFVDGFPLTSSGKIQKYLLREQGVKKVEELGIAT

SEQ ID NO: 55625 - DNA, 732 bp, Unknown
  Obtained from environmental sample
  misc_feature (1)..(732): n is a, c, g, or t
atggaaacctggatgctgggaaaaatcggaaaagacggcgtttttctgcttgaatttcttgaaagttacggagtgcgtaccggattggttgtacagtatgatggcccttccggacaggcaataattcaagttgataaaaacggacagaattccattgttctttttgcaggcggaaacggccttgtaaaccagtatgaaattgaaaaatgcctttcattttttgaaaagggtgatttaattatgcttcagaatgaaatttcaaatacggctttgataatggagaaggcaaaaagcatcggtcttaaagtagcgttaaatccgtctccctggaatgaacaagccggaaaattaccgatagatcttgcggatattctatttattaatgaaattgaaggagcgggattggcgggccttgaaaacacaatccctgtaacggagattctggatcagctttgtatacattatcaaaaaacggaaattattttaacagccggatcccggggcgcctattacggtttcggaaaaatcagggctaaaggagaaatattggatgttcccgtagtggatacaaccggggccggagattgtttttcaggatattatcttgccgcgcgggaacgcggattacaagttcaggattcattggatatcgccagccgcgcggcggcaattaccgtctcaagaaaaggggcaatggagtctatacctttcaaagatgaagtttttgtttaa

SEQ ID NO: 55626 - protein, 243 aa, Unknown
  Obtained from environmental sample
  misc_feature (1)..(243): Xaa is any amino acid
METWMLGKIGKDGVFLLEFLESYGVRTGLVVQYDGPSGQAIIQVDKNGQNSIVLFAGGNGLVNQYEIEKCLSFFEKGDLIMLQNEISNTALIMEKAKSIGLKVALNPSPWNEQAGKLPIDLADILFINEIEGAGLAGLENTIPVTEILDQLCIHYQKTEIILTAGSRGAYYGFGKIRAKGEILDVPVVDTTGAGDCFSGYYLAARERGLQVQDSLDIASRAAAITVSRKGAMESIPFKDEVFV

SEQ ID NO: 55627 - DNA, 741 bp, Unknown
  Obtained from environmental sample
  misc_feature (1)..(741): n is a, c, g, or t
gtggtaaacatcggcgctggtcatttggacgcaaggatagaaggcagttataatgacgagtttgataaaatcaaagacgctgtgaactctatgtctgcggaaataaaaacatacatggaagaaaaactgcaaacagaacgtaaactttctgaaagccgtatctctataatgctttcccagatacaaccgcattttttatacaacgcccttgccgtcatatcaagcctgtgcgataaaaatcctgccgaagcaaaaaaagcgaccgttaatttttccaattatctcaggggaaatatgaatcttttagaacgcacagaaccaatcccgtttgtaaatgaactaaaccacacaataggttttttgaatttggaaaaagccatgtacggcgaagcgttaaagataatatttgacatacaaacaaaaaattttaagcttcctgctctcaccatgcagcctattgttgaaaacgcaatcaaacacggcataggcaaaaaagagggcggcggcactgttaccatttcaacaaaagaaacagacagaagttatatgataattgttacagatgacggcgcaggttttgaacaggataaaattaacgatgacggacaacagcacgtcggaattaacaacgtccgcctcaggctgtccgcacaatgcggcggatcgcttgagatacaaagcaaaccgggcgaagggacaaccgcaaaaataattattccgaaaaaggcgcaggctgaatga

SEQ ID NO: 55628 - protein, 246 aa, Unknown
  Obtained from environmental sample
  DOMAIN (141)...(242): Histidine kinase-, DNA gyrase B-, and HSP90-like ATPase
  misc_feature (1)..(246): Xaa is any amino acid
MVNIGAGHLDARIEGSYNDEFDKIKDAVNSMSAEIKTYMEEKLQTERKLSESRISIMLSQIQPHFLYNALAVISSLCDKNPAEAKKATVNFSNYLRGNMNLLERTEPIPFVNELNHTIGFLNLEKAMYGEALKIIFDIQTKNFKLPALTMQPIVENAIKHGIGKKEGGGTVTISTKETDRSYMIIVTDDGAGFEQDKINDDGQQHVGINNVRLRLSAQCGGSLEIQSKPGEGTTAKIIIPKKAQAE

SEQ ID NO: 55629 - DNA, 789 bp, Unknown
  Obtained from environmental sample
  misc_feature (1)..(789): n is a, c, g, or t
gtgctggaaaaactcgatcttgacaatgtgccggtaacaagccgcaaattcccgtacgcgggattcaagagcgaccgtgaaatagggaacaatgtgctgagagcggaaaaattaaactactcttttgagggaaaatccctattaaaagatttttcgctgatggtaaacaagggcgataaaatcgcttttgttggattagagcactcttccaagtcggcgttctttgacatcatcacaggtgaaaaaaaagccgagtcgggagactgttattgggggcagacaacttctttttcctattttccgaaagagaattctgcctactttaattcggattattcaataacagactggctaaggcaatattcgccggatcaggacgagacctatgtgcgcagttttctgggccgcatgcttttttcgggagacgaggcgttaaaacccgtaaacgtgctttcaggcggagaaaaagtccgctgtttgctctcaaaaatgatgctttccggcgcaaacgtgcttatttttgacgagccgaccaaccatcttgatcttgaagcgattaccgccctgaatgacggccttgccgccttttccggggttatactttttaactctcacgaccatgaattcatcaattcaatagcgaaccgcattgtcgaaattctcccccaggaagaaacccccggagccctaatcgacagaatgatgcccttcgacgactacctcgccgacagttccgtaaaacaactaaggtccgcggcgtataaacactcgcaaaaattgttgatttaa

SEQ ID NO: 55630 - protein, 262 aa, Unknown
  Obtained from environmental sample
  DOMAIN (58)...(223): ABC transporter
  misc_feature (1)..(262): Xaa is any amino acid
MLEKLDLDNVPVTSRKFPYAGFKSDREIGNNVLRAEKLNYSFEGKSLLKDFSLMVNKGDKIAFVGLEHSSKSAFFDIITGEKKAESGDCYWGQTTSFSYFPKENSAYFNSDYSITDWLRQYSPDQDETYVRSFLGRMLFSGDEALKPVNVLSGGEKVRCLLSKMMLSGANVLIFDEPTNHLDLEAITALNDGLAAFSGVILFNSHDHEFINSIANRIVEILPQEETPGALIDRMMPFDDYLADSSVKQLRSAAYKHSQKLLI

SEQ ID NO: 55631 - DNA, 432 bp, Unknown
  Obtained from environmental sample
  misc_feature (1)..(432): n is a, c, g, or t
atgaatattaaaatgctttttgacaaagtctttttaaaatttcttcttgtaggagtaataaataccattgtaggttcggcaataatgtttgtgttgtacaacgcggcgcacatgagttattggttttcctcaggctgtaattattttctttcaagtatattaagtttcttcctgaataaatactttacctttaccgtaaaacggtggtcggcctttatgatcatatcgtttatacttacgatagttatttcctattatgttcctttttgggcagcaagacatatcgcaaacttttttttccaaaacaacactgataaagtccgtggaaatatcgcgttaatattgggaacatgtttagcttccgctgtaagttattttgggcaaaggtttatagtgtttcggaagaaagaagaagaacaagaaaagacataa

SEQ ID NO: 55632 - protein, 143 aa, Unknown
  Obtained from environmental sample
  DOMAIN (13)...(133): GtrA-like protein
  misc_feature (1)..(143): Xaa is any amino acid
MNIKMLFDKVFLKFLLVGVINTIVGSAIMFVLYNAAHMSYWFSSGCNYFLSSILSFFLNKYFTFTVKRWSAFMIISFILTIVISYYVPFWAARHIANFFFQNNTDKVRGNIALILGTCLASAVSYFGQRFIVFRKKEEEQEKT

SEQ ID NO: 55633 - DNA, 651 bp, Unknown
  Obtained from environmental sample
  misc_feature (1)..(651): n is a, c, g, or t
atgntagaagaacagccggataaaggaagcgcgggaactgtaaatacttccattgaccgcggcaaggtaacggcggaaccccgctggccgtcctctcttgaggaagctgaaatgctaagaggcggcgcaaggacctcttccggaaataatgacggctcttccgcctcatcgcctgcatcgtcagctaacagaggttcaactgccgcttcaacgcgtgaaacggcgcctcaggcctcgtcagctaacagagattcatcttccgctcaggtaaaaacagcgccgccgcagtccgcaatgccgcaagttgtaatgccatcggcgataccggcagatgccgcgcctcccgccgaaaaaaaggagaaacttccgcctgaagaaataattaaaaaggcgcaggacgcatttaacggcggaaacgccgccgaggcgatagcgttactcgatcaatatacggaattttatcccggcggcaatgatgaattatactggctgtacggtcagttttacgaagccaatactccgtccagaaacattcttctttcgctggatttttaccgccgtcttgtaaatgaatatccgcaaagtacgcattacagcgacgcgcgcagaagaatttcgtatttggaaagattttatataaatattcaatag

SEQ ID NO: 55634 - protein, 216 aa, Unknown
  Obtained from environmental sample
  misc_feature (1)..(216): Xaa is any amino acid
MXEEQPDKGSAGTVNTSIDRGKVTAEPRWPSSLEEAEMLRGGARTSSGNNDGSSASSPASSANRGSTAASTRETAPQASSANRDSSSAQVKTAPPQSAMPQVVMPSAIPADAAPPAEKKEKLPPEEIIKKAQDAFNGGNAAEAIALLDQYTEFYPGGNDELYWLYGQFYEANTPSRNILLSLDFYRRLVNEYPQSTHYSDARRRISYLERFYINIQ

SEQ ID NO: 55635 - DNA, 1179 bp, Unknown
  Obtained from environmental sample
  misc_feature (1)..(1179): n is a, c, g, or t
atgttaagtaggcatgaagcgatacgagaagttaaggaaaacatcctcccgttctggcaaggcatggcagatgaggaaaacggcggcttttacggcgaagcagatttttatagccagatggacaaagccgctgccaagggctgtatcctaaattcacggatattgtggacattttccgccgcgtaccgcatttttggagatgccgcatataaggtatgcgcccagcgttcactggactttttatcgtcgtcttttcttgataaaacacacggcggactgtactggttggtagaccataccgggaaagcgatggataccagaaagcagttttataacatcgcctttggcatttatgcgctgagcgagcattaccgcgctacagaagacaagtcatcgctggaattggcgatgtcccttttcgatgcaactgaaaaatacgggcttgatcccgcggcgggcggctatattgaggcgtgcaaccgggaatggcaaagcatagacgattcccggctcagcggaaaagatcttaactgcccaaagtcgatgaataccaacctgcatgttcttgaagcttacacgaatcttgcccgcatcagcaacgatgggcgtgtgctcaaagcgcttaacgctctgttgcgcataacgcttgaaaaaattgtcagccgtgattggcattttgagctatttttcgacatgaattggcattcgctgaccaaagacatttcatacggtcacgatattgaaggaagctggctgctgtatgaagcggcgctggcagtcggcgataaaagccttatttccacagtaaagcaaaccgccctgacgattgcggaagttacctataatgccgccattgatcacacaaacggcgggctattcggcggttgtgacgcggcggggcatatccacgccaaaaaagaatggtggccgcaagcggaagcggtcataggtttttacaacgcctatgaattatccggcgatcaaaaatacttcgatgcggctaatagtatatggggttacattcaagaccattttgtcgatcgcgcccacggtgaatggcacaacgaattaaaccccggtaatacgccggataccagtttacccaaagccggtttctggaaatgtccgtatcacaacgcgcgagcttgtttggaggtggggagaaggatggggaaataa

SEQ ID NO: 55636 - protein, 392 aa, Unknown
  Obtained from environmental sample
  DOMAIN (29)...(382): N-acylglucosamine 2-epimerase (GlcNAc 2-epimerase)
  misc_feature (1)..(392): Xaa is any amino acid
MLSRHEAIREVKENILPFWQGMADEENGGFYGEADFYSQMDKAAAKGCILNSRILWTFSAAYRIFGDAAYKVCAQRSLDFLSSSFLDKTHGGLYWLVDHTGKAMDTRKQFYNIAFGIYALSEHYRATEDKSSLELAMSLFDATEKYGLDPAAGGYIEACNREWQSIDDSRLSGKDLNCPKSMNTNLHVLEAYTNLARISNDGRVLKALNALLRITLEKIVSRDWHFELFFDMNWHSLTKDISYGHDIEGSWLLYEAALAVGDKSLISTVKQTALTIAEVTYNAAIDHTNGGLFGGCDAAGHIHAKKEWWPQAEAVIGFYNAYELSGDQKYFDAANSIWGYIQDHFVDRAHGEWHNELNPGNTPDTSLPKAGFWKCPYHNARACLEVGRRMGK

SEQ ID NO: 55637 - DNA, 1227 bp, Unknown
  Obtained from environmental sample
  misc_feature (1)..(1227): n is a, c, g, or t
atgctaacaactaaggagaaaattatgtcatcaatcacagaaaacaaacagggtttgaaggttctcataacaggaagtattttacagttatttttgggaataatttatgtctggagcgtatttgtaataccagtcaaaaatttttatggatggtctgttgacagtgtaaagcttacgtcctcatttatgctctgcttttttgtcataggcatattggcgggcggaaaagcgcaggtgaaaattggcgtaaaaattaccgccttgattggcgggctcatggtcgcggcgggtatgctggcgaccgcgctgatccccgcagacggaaacgcgcctgtttttcttatctatcttttctacggtatcattggcggctttggggtgggcgcgggttataacgcaaatatttcctgtgcgcaaaaatggttccccaaaaaccgcggttttgctaccggcataagcgtgtgcgcgtttgggctctcgaccgttgtctttgcgccgctggttacaacattaatcaataagtttgatgtgaagtatacatttttaattttagccggaggattcgcggcggcggttctgttattgttcggttttatcaaatcgccggaacaagtccctaatgtcgccgcgcctgtcttgaaaggcaaacaatacacaacgctcgaaatgctcaaaacaccgcgtttctatctgatcgcgctgtccctgatgtttggtacttcggtatttttcatcatccttcccagcctcaaggagttggcaataaacagaaatcttgagtctttcgcgaccgggctcgttatgttcaccggcatagccaatgcgctcggcaggcttggcgcgccgcttatgtccgataaaatcgggcgtgaaatggcggacattatcattcttgccgcaaccgccctcggcgcgttcggactttgttttgccagcggtattctgctgatagtcatcatcgcggtagttgcgttctgttacggcggctattcgggactgtatcccgtcttgacttccgaaaatttcggcataaaaaatgtcggctcaaactacggcgcggtcatggtgggcttcatgctctcggcattgttgttccccatcgtgatcaaaaaaattgagggtcaaaagctgcaatttatggcgctcggcgctctggcggcaatcggcgcggtactggttatcattttatttttgatgaacaaaaagcaggcaaaagaagcagcctag

SEQ ID NO: 55638 - protein, 408 aa, Unknown
  Obtained from environmental sample
  DOMAIN (25)...(405): Sugar (and other) transporter
  misc_feature (1)..(408): Xaa is any amino acid
MLTTKEKIMSSITENKQGLKVLITGSILQLFLGIIYVWSVFVIPVKNFYGWSVDSVKLTSSFMLCFFVIGILAGGKAQVKIGVKITALIGGLMVAAGMLATALIPADGNAPVFLIYLFYGIIGGFGVGAGYNANISCAQKWFPKNRGFATGISVCAFGLSTVVFAPLVTTLINKFDVKYTFLILAGGFAAAVLLLFGFIKSPEQVPNVAAPVLKGKQYTTLEMLKTPRFYLIALSLMFGTSVFFIILPSLKELAINRNLESFATGLVMFTGIANALGRLGAPLMSDKIGREMADIIILAATALGAFGLCFASGILLIVIIAVVAFCYGGYSGLYPVLTSENFGIKNVGSNYGAVMVGFMLSALLFPIVIKKIEGQKLQFMALGALAAIGAVLVIILFLMNKKQAKEAA

SEQ ID NO: 55639 - DNA, 651 bp, Unknown
  Obtained from environmental sample
  misc_feature (1)..(651): n is a, c, g, or t
ttgcccgctatgccgcgcaggtcggatcagccgcgcaaggcgcggtctttagtaaaggaaattaacatgcagtacacaggcgcgcaaatactggttgagtctctgattgagcagggagtggataccattttcggctatcccggcggatcggtattaaatatttacgacgaactcttcaaacacagcgacaagattcgccacatccttgtaagccacgaacagcacgccgcccacgccgcggacggttacgcgcgttccacgggaaagacaggagtatgcctggcgacttcggggccgggcgcgacaaaccttataacgggaatcgccactgcgtacatggattctattccgttagttgcaattacaggcaacgtccccaccggcattttgggcaaggacagttttcaggaggtggacataacaggcatctccatgcccatagtaaagcataactggattgttaaagacgttgacaaccttgcggaagttatccgcgaagcgtttgagcttgcctcctcaggccgccccggacccgtactgattgacataccgaaagacattaccgcgccgacagcggaatggagtcccacggagtcgaaaaaaagccgagttaaaagactcggctctttccgcgcgggctcagcgtcttga

SEQ ID NO: 55640 - protein, 216 aa, Unknown
  Obtained from environmental sample
  DOMAIN (25)...(196): Thiamine pyrophosphate enzyme, N-terminal TPP binding domain
  misc_feature (1)..(216): Xaa is any amino acid
MPAMPRRSDQPRKARSLVKEINMQYTGAQILVESLIEQGVDTIFGYPGGSVLNIYDELFKHSDKIRHILVSHEQHAAHAADGYARSTGKTGVCLATSGPGATNLITGIATAYMDSIPLVAITGNVPTGILGKDSFQEVDITGISMPIVKHNWIVKDVDNLAEVIREAFELASSGRPGPVLIDIPKDITAPTAEWSPTESKKSRVKRLGSFRAGSAS

SEQ ID NO: 55641 - DNA, 480 bp, Unknown
  Obtained from environmental sample
  misc_feature (1)..(480): n is a, c, g, or t
atgctgaagcacgaagggcccgcgagggtttttgattccgaggaaacagcgtttgacgcaatcatgggaaaaaagataaaagccggagacgtcatcgttatacgttacgaagggccaaggggaggccccggcatgaaggagatgctcgctcccaccgcggctctcgccggtatgggtcttgacgacaaagtggccctgatcactgacgggcgtttctcgggcgcttccaagggcgcgtctatcggccatgtttcgccggaagccgcaatgggcggaaacatcgggattatcaacgaaggcgacatcatcgccatcgacatcgacgggctttccataaacgtaaagataagcgaagaagaaatcgcgcggcggcgaaaagactggaagccactttccaggacaaacacgggctatcttgcccgctatgccgcgcaggtcggatcagccgcgcaaggcgcggtctttagtaaaggaaattaa

SEQ ID NO: 55642 - protein, 159 aa, Unknown
  Obtained from environmental sample
  DOMAIN (1)...(156): Dehydratase family
  misc_feature (1)..(159): Xaa is any amino acid
MLKHEGPARVFDSEETAFDAIMGKKIKAGDVIVIRYEGPRGGPGMKEMLAPTAALAGMGLDDKVALITDGRFSGASKGASIGHVSPEAAMGGNIGIINEGDIIAIDIDGLSINVKISEEEIARRRKDWKPLSRTNTGYLARYAAQVGSAAQGAVFSKGN

SEQ ID NO: 55643 - DNA, 303 bp, Unknown
  Obtained from environmental sample
  misc_feature (1)..(303): n is a, c, g, or t
gtgtttgtcctggaaagtggcttccagtcttttcgccgccgcgcgatttcttcttcgcttatctttacgtttatggaaagcccgtcgatgtcgatggcgatgatgtcgccttcgttgataatcccgatgtttccgcccattgcggcttccggcgaaacatggccgatagacgcgcccttggaagcgcccgagaaacgcccgtcagtgatcagggccactttgtcgtcaagacccataccggcgagagccgcggtgggagcgagcatctccttcatgccggggcctccccttggcccttcgtaa

SEQ ID NO: 55644 - protein, 100 aa, Unknown
  Obtained from environmental sample
  misc_feature (1)..(100): Xaa is any amino acid
MFVLESGFQSFRRRAISSSLIFTFMESPSMSMAMMSPSLIIPMFPPIAASGETWPIDAPLEAPEKRPSVIRATLSSRPIPARAAVGASISFMPGPPLGPS

SEQ ID NO: 55645 - DNA, 1461 bp, Unknown
  Obtained from environmental sample
  misc_feature (1)..(1461): n is a, c, g, or t
gtgcgggagcccgaattaaagccccggtttgccgaaaaaagcgcgagggctttagcccgagcagtgggcgtatttatggcctttgtccagttctctaaagtttccctcgcttttggcgaccgtgatatcctgaaagatgtcagcctgcacctggcctcaggctcgcgggcctgtcttgcaggggctaacggctcggggaagtccacgctgatgaaagtgcttgccggggagcttcccgcggattcgggcgacagagccgtacagcgcggtacgcgaatttcctatctgccccagtccgggattgtccaccggggaaagagcctgagggacgaggcggaaacggcgtttgcccacattcacgaactgattgaccgggctgaaaaaatcgctgccctcctgcaaaacgccaaaagcgacgacggaacgtctaaagcccttctggaagaccaccaccgcctgcaggaacaaatcgaaaattcaggatattaccgccgtgaggcggcgatctcttccgtgctggctggttttggtttttcgcctaacgaccttgacagggacacgggtgaattttcgggcggctggcagatgaggatcgccctcgcgaaagcgctgcttgaacagcctgacatcctgcttcttgacgagccgaccaactatctggacatagaagcccgcgcctggcttgaaaactggctggccaaatttcccggcggctgcctgctggtttcccacgaccgctatttccttgatgtcaccgtcaacgaggtctacgaaatttttcagggcaatcttaaacgctacgtgggcaactacagcgcctatgaaaaaacgcggcaaatggaactcgccagccttatgaaacgctatacggaacagcaggaggaaatcgccaaaaccgaggctttgatccgccgtttccgttacaaagcaaccaaggcggcctttgcccaggagcttatcaaacggctcgaaaagatggagcgtatagaaatccccgaaaacctgaaaaaaataaacataaattttccgccgccgccccattcgccccgtgtcgcgctgaccattgaaggccttggcaagaactacggtacaaagaaggttcttcatgggctggatctgacacttgattccggcgagaggctggtggttgcaggtcctaacggagcgggcaagacgacgcttctgcggatactcgcgggcaatgacaatgattttgaaggctctgtaaaattcggatcgggtataagcgcagggtatttttcgcaggacgccgccgaagccttgaacggcggcgaacaggtgcttgaatttatggaagccaacgcccccacgacgctcatcccaaaattgcgggatatgctcggggcctttctctttcgcggcgatgatgtttacaaacccgatctcggtgctttccggcggggaaaaaagccgcctcgccctgctgtatatgctgcttaa

SEQ ID NO: 55646 - protein, 486 aa, Unknown
  Obtained from environmental sample
  DOMAIN (54)...(262): ABC transporter
  misc_feature (1)..(486): Xaa is any amino acid
MREPELKPRFAEKSARALARAVGVFMAFVQFSKVSLAFGDRDILKDVSLHLASGSRACLAGANGSGKSTLMKVLAGELPADSGDRAVQRGTRISYLPQSGIVHRGKSLRDEAETAFAHIHELIDRAEKIAALLQNAKSDDGTSKALLEDHHRLQEQIENSGYYRREAAISSVLAGFGFSPNDLDRDTGEFSGGWQMRIALAKALLEQPDILLLDEPTNYLDIEARAWLENWLAKFPGGCLLVSHDRYFLDVTVNEVYEIFQGNLKRYVGNYSAYEKTRQMELASLMKRYTEQQEEIAKTEALIRRFRYKATKAAFAQELIKRLEKMERIEIPENLKKININFPPPPHSPRVALTIEGLGKNYGTKKVLHGLDLTLDSGERLVVAGPNGAGKTTLLRILAGNDNDFEGSVKFGSGISAGYFSQDAAEALNGGEQVLEFMEANAPTTLIPKLRDMLGAFLFRGDDVYKPDLGAFRRGKKPPRPAVYAA

SEQ ID NO: 55647 - DNA, 630 bp, Unknown
  Obtained from environmental sample
  misc_feature (1)..(630): n is a, c, g, or t
atgaagaaccttctttgtaccgtagttcttgccaaggccttcaatggtcagcgcgacacggggcgaatggggcggcggcggaaaatttatgtttatttttttcaggttttcggggatttctatacgctccatcttttcgagccgtttgataagctcctgggcaaaggccgccttggttgctttgtaacggaaacggcggatcaaagcctcggttttggcgatttcctcctgctgttccgtatagcgtttcataaggctggcgagttccatttgccgcgttttttcataggcgctgtagttgcccacgtagcgtttaagattgccctgaaaaatttcgtagacctcgttgacggtgacatcaaggaaatagcggtcgtgggaaaccagcaggcagccgccgggaaatttggccagccagttttcaagccaggcgcgggcttctatgtccagatagttggtcggctcgtcaagaagcaggatgtcaggctgttcaagcagcgctttcgcgagggcgatcctcatctgccagccgcccgaaaattcacccgtgtccctgtcaaggtcgttaggcgaaaaaccaaaaccagccagcacggaagagatcgccgcctcacggcggtaatatcctga

SEQ ID NO: 55648 - protein, 209 aa, Unknown
  Obtained from environmental sample
  misc_feature (1)..(209): Xaa is any amino acid
MKNLLCTVVLAKAFNGQRDTGRMGRRRKIYVYFFQVFGDFYTLHLFEPFDKLLGKGRLGCFVTETADQSLGFGDFLLLFRIAFHKAGEFHLPRFFIGAVVAHVAFKIALKNFVDLVDGDIKEIAVVGNQQAAAGKFGQPVFKPGAGFYVQIVGRLVKKQDVRLFKQRFREGDPHLPAARKFTRVPVKVVRRKTKTSQHGRDRRLTAVIS

SEQ ID NO: 55649 - DNA, 762 bp, Unknown
  Obtained from environmental sample
  misc_feature (1)..(762): n is a, c, g, or t
ttgaatttatggaagccaacgcccccacgacgctcatcccaaaattgcgggatatgctcggggcctttctctttcgcggcgatgatgtttacaaacccgatctcggtgctttccggcggggaaaaaagccgcctcgccctgctgtatatgctgcttaagcctttgaatcttttgattctggacgagcctacaaaccacctcgaccttcattcaaaggacgttctgctggaaaccctcaataaatttaagggaacgattatttttgtttcgcatgaccgcgcctttatggaagcgctgtccacgaagactttagaattattgccgggtgaaggggcggcggcccaggcgcggcttttctatgggaattacgcgtactatctggaaaaggtgggggaaaaggtaataggtaatagggaagaggtaataggtaatagggaagagggaatagagaagaagggggcggggcgcggagacgcaaaagaaggtacggcgttaagcggtgatagcgcgaaggagattcgggcgctgaataaacagcggcaggcggagttgcggcggcagcagaggcaggagggagaattacttaacgctattgaagggctcgaaaatgaaaaagcccggctggaagcggaattgtccctgcctgaggtgtattcaaacggggaaaaggcgagggctgtgaaaaagaaacttgacgagtgtgttgccgctattaagtctaaaactgaagcatgggaaacattggcggcaattaggaattag

SEQ ID NO: 55650 - protein, 253 aa, Unknown
  Obtained from environmental sample
  DOMAIN (1)...(109): ABC transporter
  misc_feature (1)..(253): Xaa is any amino acid
MNLWKPTPPRRSSQNCGICSGPFSFAAMMFTNPISVLSGGEKSRLALLYMLLKPLNLLILDEPTNHLDLHSKDVLLETLNKFKGTIIFVSHDRAFMEALSTKTLELLPGEGAAAQARLFYGNYAYYLEKVGEKVIGNREEVIGNREEGIEKKGAGRGDAKEGTALSGDSAKEIRALNKQRQAELRRQQRQEGELLNAIEGLENEKARLEAELSLPEVYSNGEKARAVKKKLDECVAAIKSKTEAWETLAAIRN

SEQ ID NO: 55651 - DNA, 1161 bp, Unknown
  Obtained from environmental sample
  misc_feature (1)..(1161): n is a, c, g, or t
ttgaaaggaagcgatgtggttatcaaggaagtttccaagtcctttgggaacttcagggccttgcatgagatagatttgacaataaaaaaaggcgagttcttctcccttttggggccttcaggctgcggtaaaacaaccctcttgcggataatcggcggatttgaaaccccggacgacggggatgttacttttgacgggatcgatgtgcttcccctgcctccaaaccaaaggcaggccaatacggtctttcaaagttatgccctctttcctcatcttacaatttttgagaatgtggcctttcccctaaggcttaaaaaacttcctaagggccagattgattcgaaagtgggggagtatttaaagctggttcagcttgaaaatcacgcccataaaaagccgaatcagttgtcaggcggccagaaacagcgggtggctattgccagagctcttatcaacgagccaaaggtactccttctggacgagccgctttccgccctggacgccaagttaaggcagaggatgctcattgagctggacgagatacacgacaaaatcgggattacctttatttatgttacccatgaccagcaggaagccctttcggtatcggacaggatagcggtgatgaatttgggagatgttctgcaagtaggtactccccacgatatttacgaaagccccgccactgagtttgtcgcccgttttattggcgagatcaacctttttgacgcaaccgtgacctctgtggaaaaaatagccgcatccgtttcagtaagcggggaaaccgaatacatggaagagctggatgttcccgaactgggaaaaatcaaggtaaccaccagggatgaattaaagtccggggcaaaggtgagctttaccatacgcccggaaaagattgttatatcgaaagaaaaacccgccaccaagcgggcggacatcaacctttttcagggtggggtagacgaaccaatttactcggggttccagaccaagttctatataaaagtaaacggctccaccctcatccgggtaatcaaacagcacgccaaatattctgacgaagggccggatatagtctggaaagaccaggtttacctgtcctggagcgctcaagacgggtacatcgtaggcgacggctataccgcaggggcaaaaccgtga

SEQ ID NO: 55652 - protein, 386 aa, Unknown
  Obtained from environmental sample
  DOMAIN (292)...(376): TOBE domain
  misc_feature (1)..(386): Xaa is any amino acid
MKGSDVVIKEVSKSFGNFRALHEIDLTIKKGEFFSLLGPSGCGKTTLLRIIGGFETPDDGDVTFDGIDVLPLPPNQRQANTVFQSYALFPHLTIFENVAFPLRLKKLPKGQIDSKVGEYLKLVQLENHAHKKPNQLSGGQKQRVAIARALINEPKVLLLDEPLSALDAKLRQRMLIELDEIHDKIGITFIYVTHDQQEALSVSDRIAVMNLGDVLQVGTPHDIYESPATEFVARFIGEINLFDATVTSVEKIAASVSVSGETEYMEELDVPELGKIKVTTRDELKSGAKVSFTIRPEKIVISKEKPATKRADINLFQGGVDEPIYSGFQTKFYIKVNGSTLIRVIKQHAKYSDEGPDIVWKDQVYLSWSAQDGYIVGDGYTAGAKP

SEQ ID NO: 55653 - DNA, 723 bp, Unknown
  Obtained from environmental sample
  misc_feature (1)..(723): n is a, c, g, or t
gtgatccccggcgggagacggaactacggccctacttattccttcccgatggcggcctggttcacggtttttttccttgcgcctatcttcatcatcgtaatctacagttttctgaaaaaagggctttacggcggggtggaatggcaattctcccttgaagcctaccggaaccttacaaacccaagtttcctgaccataaccggccgcaccctcgttacttcggtaatttctactattataacgatacttatcgcccttccctgcggttttttcatggcccgcagcaaaaaccagaccgtgctgctcctgataataataatcccgttctggaccaatttccttatacgcgttttcgcctggatgaatatccttgggaacaatggctttattaacgaattcctcatgcgctttaagctcatatcagactatattccctttatgtacaaccagaaagcggttaccctcgtgctgatctatatgtacctgccttacgcaatacttcccctgttttctaccatagacaaattcgatttttcgcttctggaagccgccagggatcttggagccggcaaactaacttcgataattctggttctcctgcctaacataaagggcggcctttttacagcggtgttgtttaccttcatccccatctttggagcttacgcggtgcctcaacttgtgggcggtaaagatcctatatgctggggatatcatcgctga

SEQ ID NO: 55654 - protein, 240 aa, Unknown
  Obtained from environmental sample
  misc_feature (1)..(240): Xaa is any amino acid
MIPGGRRNYGPTYSFPMAAWFTVFFLAPIFIIVIYSFLKKGLYGGVEWQFSLEAYRNLTNPSFLTITGRTLVTSVISTIITILIALPCGFFMARSKNQTVLLLIIIIPFWTNFLIRVFAWMNILGNNGFINEFLMRFKLISDYIPFMYNQKAVTLVLIYMYLPYAILPLFSTIDKFDFSLLEAARDLGAGKLTSIILVLLPNIKGGLFTAVLFTFIPIFGAYAVPQLVGGKDPICWGYHR

SEQ ID NO: 55655 - DNA, 513 bp, Unknown
  Obtained from environmental sample
  misc_feature (1)..(513): n is a, c, g, or t
atgagcaatgaaagaggaatagcgtggacgttgagtacttttgatttagaccgatttggggagcggattgatcctgcgggttgggattgttcgcagttcttgaggaatccggttgtgcagtgggcgcattgctacgatgttccagctattgggaagattgaggggattggcgttgatgatgcggggcttcatggtactgtggttttcaacgacagggaatacgatccctttggctgggggattgggcagcgggtgaaggctggggtgatacgggctgggtcggtggggttccgggtgatggaggtggagattccgtcgaaagaggacggcagggacggcacttctttaattttccgcaaacaggagctacttgaatttagtatttgcaatgttcctgccaatccgtttgcattagcgagagaaaagagaagagaaaagagaaaagggaaaagtgaagaaagaaaaaggggcggtgattttataagcgggttttggggaggtttgattcaatga

SEQ ID NO: 55656 - protein, 170 aa, Unknown
  Obtained from environmental sample
  DOMAIN (1)...(152): Caudovirus prohead protease
  misc_feature (1)..(170): Xaa is any amino acid
MSNERGIAWTLSTFDLDRFGERIDPAGWDCSQFLRNPVVQWAHCYDVPAIGKIEGIGVDDAGLHGTVVFNDREYDPFGWGIGQRVKAGVIRAGSVGFRVMEVEIPSKEDGRDGTSLIFRKQELLEFSICNVPANPFALAREKRREKRKGKSEERKRGGDFISGFWGGLIQ

SEQ ID NO: 55657 - DNA, 792 bp, Unknown
  Obtained from environmental sample
  misc_feature (1)..(792): n is a, c, g, or t
atgcacaacgcgaagttcatagttccgaatgctttcacaagccttaattttttattgggagcagcctctatatgctggtctgcgggtctccttgcaatccaaaatgaacctagcgtagttatgggggcgcatttcataattttttgcgccttgttggacaaattagacggttttgccgcccgtgcttttaatgcaagctcggaattcggggcgcagttcgatagccttgcagatttaatagcatttggcatagcgcccgcctttatgataatgttcgcctatagagatatattgccaaattggtatgaatcgcataaactagccctatttgccggagctgcggtttatatggtatgcgctgccatgaggcttgcaaaatacaacgcaatggacagcgattcctaccctgactatttctctggaatgccatcaacttttgcaggaattgtaaatgccttggttgtaattttgctctggaaacataaattttttgattcttgccccgatatcctctacattcctctggtaattatgctggtcaccagcatactaatggtttgtcctttgtttcttgtaaaactcaaaaaaagaaaaagcaatattataaacgcggtgcaagtgctaaacatagctggggcttatatcgctggttttgccatgattttgcccgagtatttaatggctttggttttaatatatttcataatcggttttggtcatggcatagtgaaacggaactccataattagcagtcaagaaagtaaaaatgcatcaaaacaagaagaggcataa

SEQ ID NO: 55658 - protein, 263 aa, Unknown
  Obtained from environmental sample
  SIGNAL (1)...(27)
  DOMAIN (44)...(195): CDP-alcohol phosphatidyltransferase
  misc_feature (1)..(263): Xaa is any amino acid
MHNAKFIVPNAFTSLNFLLGAASICWSAGLLAIQNEPSVVMGAHFIIFCALLDKLDGFAARAFNASSEFGAQFDSLADLIAFGIAPAFMIMFAYRDILPNWYESHKLALFAGAAVYMVCAAMRLAKYNAMDSDSYPDYFSGMPSTFAGIVNALVVILLWKHKFFDSCPDILYIPLVIMLVTSILMVCPLFLVKLKKRKSNIINAVQVLNIAGAYIAGFAMILPEYLMALVLIYFIIGFGHGIVKRNSIISSQESKNASKQEEA

SEQ ID NO: 55659 - DNA, 825 bp, Unknown
  Obtained from environmental sample
  misc_feature (1)..(825): n is a, c, g, or t
atgattttaacagaatttgcgcctgcaaaaataaatcttttcttatccataataaacaaaagggaagatggttaccacaatattggcaccatgttccacaccgtaaactgcggagacttcctttttggagaacaagacagcagcggcaaaatttccatttcttacaacaaccctcaagaatattcgccagagaaagacttggtttgcagagtagccgtaaaactaaaagaaaagtacaatgtttcaagcggagttcgtttctatttggaaaagaacctacccttgggtgctgggctaggcggcggaagctccgatgctgctgccgcacttaggcttttgaacaaattgtggggcttgaacgccagctcggaggaactggaagaaatagggggaagtctgggtgccgacatagccttttttgtgaaaggaggagccgcgctggcaactggcatcggcaatattttaagcccgcaaagcgcaatagaagatgattgctgcataattttagctacgcccaaatgcgtagtccccacagccgatgcctataaagacgttatccctgccggcattctgccttggcagaactttttgaaaaacatgaaccccttagaaaatttgcacaatcaatttgaagacactgttcttaaaaaatatccactaataaatttcttaaagcaaaaactaaatacctgcggaggaaaatcccttctatccggcagcggagccagcgttttctccatatttgattccttggaaaacgcggtgaatgcttatgagatggttaagggcgagtgtcggtttttgaggattgctaggtttttttaa

SEQ ID NO: 55660 - protein, 274 aa, Unknown
  Obtained from environmental sample
  DOMAIN (86)...(144): GHMP kinases N terminal domain
  misc_feature (1)..(274): Xaa is any amino acid
MILTEFAPAKINLFLSIINKREDGYHNIGTMFHTVNCGDFLFGEQDSSGKISISYNNPQEYSPEKDLVCRVAVKLKEKYNVSSGVRFYLEKNLPLGAGLGGGSSDAAAALRLLNKLWGLNASSEELEEIGGSLGADIAFFVKGGAALATGIGNILSPQSAIEDDCCIILATPKCVVPTADAYKDVIPAGILPWQNFLKNMNPLENLHNQFEDTVLKKYPLINFLKQKLNTCGGKSLLSGSGASVFSIFDSLENAVNAYEMVKGECRFLRIARFF

SEQ ID NO: 55661 - DNA, 762 bp, Unknown
  Obtained from environmental sample
  misc_feature (1)..(762): n is a, c, g, or t
atgcataatgcgaagttcatagttccaaacgctttcaccagcattaattttttactcggtgtagcttctatatgctgctctgccagtttgtttgaaataaaaaatgaatattctgtggttatgggggcacatttcataattttttgcgcattactggataaattagacgggtttgccgctcgtgcttttaacgcaagctcggaattcggagcgcagttcgacagccttgcagacttaatagcatttggcttagcacccgcatttatgataatgtttgcctataaagatatattgcctgattggtatgaatcgcacaaactagccttatttgccggagccgcggtttatatggtgtgtgccgctatgaggcttgccaaatacaacgcaatggataacgattcctatccagattatttttctggaatgccctctacttttgcagggattgtaaatgccttggtaataattttgctctgcaaatataaattctttgacgaatgccccgatattctctacattcccctagtgattatgctaatcaccagcgtacttatggttagtcccttgtttcttgttaaactaaaaaaaagaaaaagcaatatcataaacgcaatacaagtgataaatattgccggagcttatatcgcgggctttgccatgattttgcctgaatatctaatggctttggtactcatatattttattataggttttgggcacggaataataaaccgcaacaaaataacagctaaggaggtttaa

SEQ ID NO: 55662 - protein, 253 aa, Unknown
  Obtained from environmental sample
  DOMAIN (44)...(195): CDP-alcohol phosphatidyltransferase
  misc_feature (1)..(253): Xaa is any amino acid
MHNAKFIVPNAFTSINFLLGVASICCSASLFEIKNEYSVVMGAHFIIFCALLDKLDGFAARAFNASSEFGAQFDSLADLIAFGLAPAFMIMFAYKDILPDWYESHKLALFAGAAVYMVCAAMRLAKYNAMDNDSYPDYFSGMPSTFAGIVNALVIILLCKYKFFDECPDILYIPLVIMLITSVLMVSPLFLVKLKKRKSNIINAIQVINIAGAYIAGFAMILPEYLMALVLIYFIIGFGHGIINRNKITAKEV

SEQ ID NO: 55663 - DNA, 927 bp, Unknown
  Obtained from environmental sample
  misc_feature (1)..(927): n is a, c, g, or t
atgtcggctgtggacgaaataggcgatatggccttctattttaacctgactctggagaagataaaaaatctggtactcatcatcaagcagcagaccgcagtgatgtcccagataggttcgaacctttccaaaaacatgtccgaaaccgctgcggcgatcagcgaaatcaccgtcaacatccggaatatcaagagccgcgttgtgaaccagagcgcctgtgttaccgaaaccaactcgaccatggaacatatcacggaaaatatagacaaactaaacgagcatgtggaaaagcagtcgtcaagcgtgtcccggtcttccgccgccattgaagaaatgctgaccaatatccagtcggtcacgtcaacactgataaaaaactcggaaagcgtagaggctttgaccgaggctgccggagtcgggcactccggattgcaggatgtggccaccgccatacaggacatagcccgcgagtccgaggggcttttggaaattaacgcagtgatggagaatatcgccagccagaccaacctcctttcgatgaacgctgccatagaagccgcccacgccggggaagccggcagaggtttttcagtagtggcgtcagaaatccgcaaattggctgaaagcgccagcagccagtccaagaccatcggaactgttctcaaaaaaataaaaggctctatagacaatatcacccgttcaaccgaaaatgtgcttaacaaattcgatgccatagaaaacggggtaagaacagtggccgagcaggagtcgaacatccgcagggccatggaggaacagggccaagggagcaagcagatactggaagacataagcggacttaacgaaattacccggcaggtaaaggacggctcaacagaaatgctcaagggctccaaaagaagtgattcaggaaagcgagaatcttga

SEQ ID NO: 55664 - protein, 308 aa, Unknown
  Obtained from environmental sample
  DOMAIN (82)...(307): Methyl-accepting chemotaxis protein (MCP) signaling domain
  misc_feature (1)..(308): Xaa is any amino acid
MSAVDEIGDMAFYFNLTLEKIKNLVLIIKQQTAVMSQIGSNLSKNMSETAAAISEITVNIRNIKSRVVNQSACVTETNSTMEHITENIDKLNEHVEKQSSSVSRSSAAIEEMLTNIQSVTSTLIKNSESVEALTEAAGVGHSGLQDVATAIQDIARESEGLLEINAVMENIASQTNLLSMNAAIEAAHAGEAGRGFSVVASEIRKLAESASSQSKTIGTVLKKIKGSIDNITRSTENVLNKFDAIENGVRTVAEQESNIRRAMEEQGQGSKQILEDISGLNEITRQVKDGSTEMLKGSKRSDSGKRES

SEQ ID NO: 55665 - DNA, 861 bp, Unknown
  Obtained from environmental sample
  misc_feature (1)..(861): n is a, c, g, or t
ttggagcccttgagcatttctgttgagccgtcctttacctgccgggtaatttcgttaagtccgcttatgtcttccagtatctgcttgctcccttggccctgttcctccatggccctgcggatgttcgactcctgctcggccactgttcttaccccgttttctatggcatcgaatttgttaagcacattttcggttgaacgggtgatattgtctatagagccttttatttttttgagaacagttccgatggtcttggactggctgctggcgctttcagccaatttgcggatttctgacgccactactgaaaaacctctgccggcttccccggcgtgggcggcttctatggcagcgttcatcgaaaggaggttggtctggctggcgatattctccatcactgcgttaatttccaaaagcccctcggactcgcgggctatgtcctgtatggcggtggccacatcctgcaatccggagtgcccgactccggcagcctcggtcaaagcctctacgctttccgagttttttatcagtgttgacgtgaccgactggatattggtcagcatttcttcaatggcggcggaagaccgggacacgcttgacgactgcttttccacatgctcgtttagtttgtctatattttccgtgatatgttccatggtcgagttggtttcggtaacacaggcgctctggttcacaacgcggctcttgatattccggatgttgacggtgatttcgctgatcgccgcagcggtttcggacatgtttttggaaaggttcgaacctatctgggacatcactgcggtctgctgcttgatgatgagtaccagattttttatcttctccagagtcaggttaaaatag

SEQ ID NO: 55666 - protein, 286 aa, Unknown
  Obtained from environmental sample
  misc_feature (1)..(286): Xaa is any amino acid
MEPLSISVEPSFTCRVISLSPLMSSSICLLPWPCSSMALRMFDSCSATVLTPFSMASNLLSTFSVERVILSIEPFIFLRTVPMVLDWLLALSANLRISDATTEKPLPASPAWAASMAAFIERRLVWLAIFSITALISKSPSDSRAMSCMAVATSCNPECPTPAASVKASTLSEFFISVDVTDWILVSISSMAAEDRDTLDDCFSTCSFSLSIFSVICSMVELVSVTQALWFTTRLLIFRMLTVISLIAAAVSDMFLERFEPIWDITAVCCLMMSTRFFIFSRVRLK

SEQ ID NO: 55667 - DNA, 681 bp, Unknown
  Obtained from environmental sample
  misc_feature (1)..(681): n is a, c, g, or t
atgccgatggacagatcggccgagatacggattgccgcaaaaaaactcgtaaaggttggttatgggcaaattgacaagttactgcgaatgtactctacgatgccccaaacagagcataagatacttcagattttaatagccccttcatggtcggaaaggaatattctggacagttgccttgatgaaataattaaaaaccttgcagtgaactataagctgattgtccgtccgcatcctgaatacatcaggcggtttcctgaaaaatggcaaactataatgaataaacataacatgggcaatctttcgtttgaccaggattttttgtcaaatgattcaatctaccaatccgacatactcattaccgattggtcaagcatcgcttacgagttttcgtactgtacaaagaagccaacaatatacatcaatacccctatgaaggtaatgaacagcgaatactataaattgggaatcgagccgcttgatataacccttcgcgacaaattgggcgtttcggttgacattgacaaattaagcagcttgccggcaattatcgaagatatgcggaaggatcccgaaaagtaccgtacatccattgaatctacagttgcagaatatcttttttacccgggtagaagcggtgaggcggcagggaaatatatcatatcgggattttgcctttga

SEQ ID NO: 55668 - protein, 226 aa, Unknown
  Obtained from environmental sample
  DOMAIN (30)...(222): CDP-Glycerol:Poly(glycerophosphate) glycerophosphotransferase
  misc_feature (1)..(226): Xaa is any amino acid
MPMDRSAEIRIAAKKLVKVGYGQIDKLLRMYSTMPQTEHKILQILIAPSWSERNILDSCLDEIIKNLAVNYKLIVRPHPEYIRRFPEKWQTIMNKHNMGNLSFDQDFLSNDSIYQSDILITDWSSIAYEFSYCTKKPTIYINTPMKVMNSEYYKLGIEPLDITLRDKLGVSVDIDKLSSLPAIIEDMRKDPEKYRTSIESTVAEYLFYPGRSGEAAGKYIISGFCL

SEQ ID NO: 55669 - DNA, 762 bp, Unknown
  Obtained from environmental sample
  misc_feature (1)..(762): n is a, c, g, or t
atgcgccaaactattccggagcttaaagaaacactggaccccctttacctggaagtcaacaagccggactttattccttttgatccggttcagtttccacacaggtataaaagcgtcggcgacagggaagtcaccgcattcctctcagcgacaattgcttggggcagaagggacatgatcctaaaatctgccgaaaagatgttttcgcttatgggccctagcccatacgaattcgttatggaaggcaagtgcaaaaaatttccggaaaactcacgcggctcaagtattcaccgtactttttttgaaagcgatttgcgctatttctgcaaaggccttaaagcctgttatgccaaatccggtaccctggaaaagctttttgcctccgccgccgatgtttgggaaggcataaaccttttccgtgaaacaatggccagcggcaacaagggcctttactccaaacacatatccaatcccgccgccggttccgcctgcaagcgcttgcaccttgcccttcgctggctcgtgcgttgcgaaggccccgtggacctgggcctctggaaaagcatctccccttcttccctttttattcctctggacttgcacgtgggccgcaccgcccgccaccttggccttttgcagcgtaaggcaaacgataagaaagcggttatctcccttacggagaagcttcgcgagttttgtccggaggatccggtgaagtatgactttgcgttgtttgggtattcggtggggcagaaaatatga

SEQ ID NO: 55670 - protein, 253 aa, Unknown
  Obtained from environmental sample
  misc_feature (1)..(253): Xaa is any amino acid
MRQTIPELKETLDPLYLEVNKPDFIPFDPVQFPHRYKSVGDREVTAFLSATIAWGRRDMILKSAEKMFSLMGPSPYEFVMEGKCKKFPENSRGSSIHRTFFESDLRYFCKGLKACYAKSGTLEKLFASAADVWEGINLFRETMASGNKGLYSKHISNPAAGSACKRLHLALRWLVRCEGPVDLGLWKSISPSSLFIPLDLHVGRTARHLGLLQRKANDKKAVISLTEKLREFCPEDPVKYDFALFGYSVGQKI

SEQ ID NO: 55671 - DNA, 309 bp, Unknown
  Obtained from environmental sample
  misc_feature (1)..(309): n is a, c, g, or t
atggcttacgggaactgcggcgtggacttttgtcagtatttcgcagtacattcttggagtgcgacccgtcttgnacggtcttatgatagacccgtgtatccttcaagcatgaagggatttaccgttacccgacatttccggggagcggattatcacatcacggtggataacggcgcgggcgtggaaaagggaataaagtccattttggttgacggtaatccgctggaaggcgaggcattgaaaaaagcggtattgcccgcgtttggcgataataaggtgcataaagttattgtaactatggggaaatag

SEQ ID NO: 55672 - protein, 102 aa, Unknown
  Obtained from environmental sample
  misc_feature (1)..(102): Xaa is any amino acid
MAYGNCGVDFCQYFAVHSWSATRLXRSYDRPVYPSSMKGFTVTRHFRGADYHITVDNGAGVEKGIKSILVDGNPLEGEALKKAVLPAFGDNKVHKVIVTMGK

SEQ ID NO: 55673 - DNA, 1323 bp, Unknown
  Obtained from environmental sample
  misc_feature (1)..(1323): n is a, c, g, or t
ttggggcgtttcactgtggaagcggaagataaaaaaatggcgcgtatggctggcgtttggaatcagtatcagtgtatggtaacctttaatatgtcgcgcagcgcctcttattttgaatcgggaatcgggcgcggcatgggtttccgcgattcaaatcaggatttattgggctttgttcaccttgttcccggacgcgcccgcgcccgcattttggacattgctgcgacacagtttcccgacggaagcgcatatcatcagtatcagccgcttacaaaacgaggcaacaacgaaatcggttcgggttttaacgatgatcctctgtggcttatctgcggagcggcggcgtatatcaaagagacaggcgattacagcatacttaacgaaaaagtgcctttcgataacaacgaagagttagccgacactctctttattcaccttaaacgttcattttattacaccgtaacgcacaccggaccgcacggcttaccgttaatcggacgcgccgactggaacgactgtttaaatcttaactgtttttccaaaacacccggcgaatcttttcagactaccgccaactacgaaagcggcgttgcggaatcagtcttaatagcggcgatttttgtatttgtcggtcctgactttgtagagatttgcaaaaggacgggacgcactgaagaagcgcagcgcgccgaaaaagccattgccgatatgattgaagctgttaataatcacggctgggacgggaaatggttccttcgcgcttatgacgcatacggcaaaaaaataggaagccgcgagtgcgaggacggaaaaatatttattgaatccaacggtttcgcggtaatggcggacatcggcattaaagacggacgcgcgcaaaaagcgcttgattccgtaaaagaacatcttgacaccaaatacggaattgttttgttacagccggcatacaaggattatcatattgagttaggtgaagtttcttcctatccgcccggatataaagagaacgccggtattttctgccacaataacccgtgggttacgatagcggaaacaaggcttggaagagggactcgcgcatttgaaacctacaagaaaatttgcccagcctaccgtgaagacgacagcgatttgcgcagaatggaaccgtatgtatacgcgcaaatggtagcaggcaaagacgcggtttaccacggcgaggcgaaaaattcatggcttacgggaactgcggcgtggacttttgtcagtatttcgcagtacattcttggagtgcgacccgtcttgnacggtcttatgatagacccgtgtatccttcaagcatga

SEQ ID NO: 55674 - protein, 440 aa, Unknown
  Obtained from environmental sample
  misc_feature (1)..(440): Xaa is any amino acid
MGRFTVEAEDKKMARMAGVWNQYQCMVTFNMSRSASYFESGIGRGMGFRDSNQDLLGFVHLVPGRARARILDIAATQFPDGSAYHQYQPLTKRGNNEIGSGFNDDPLWLICGAAAYIKETGDYSILNEKVPFDNNEELADTLFIHLKRSFYYTVTHTGPHGLPLIGRADWNDCLNLNCFSKTPGESFQTTANYESGVAESVLIAAIFVFVGPDFVEICKRTGRTEEAQRAEKAIADMIEAVNNHGWDGKWFLRAYDAYGKKIGSRECEDGKIFIESNGFAVMADIGIKDGRAQKALDSVKEHLDTKYGIVLLQPAYKDYHIELGEVSSYPPGYKENAGIFCHNNPWVTIAETRLGRGTRAFETYKKICPAYREDDSDLRRMEPYVYAQMVAGKDAVYHGEAKNSWLTGTAAWTFVSISQYILGVRPVLXGLMIDPCILQA

SEQ ID NO: 55675 - DNA, 1251 bp, Unknown
  Obtained from environmental sample
  misc_feature (1)..(1251): n is a, c, g, or t
atgatgggcacttcccttttattcaagcctacggcggtacagcgcaaagccctgtcccttctgaaaagcggggcaaaacatattttgcttttcggcggctcccgttcagggaaaactacggtactggttatggcgattatttaccgggctttgcggtttgccggctcaaggcatttggtttgccgctatagggctaaagacgctcgctcgtctgtcatgcgggaaaccttgttaccgtggttggataaaactgtaggaaaaatcacctacacctaccttgcccatgaaagcatgattaccctttttaattcttcggagatttggattggcggcctgggggacagggagcaagcggacaaaatactcggacacgaatacaacacgatttattttaacgagattagccagctttcctatgccgccgtgaccacggcatattcacggctggcaatgagaataaaagattgccggaacctgttttactacgactgcaatccgggcagccccctgcattgggcatataaaattttcgtgcttaagcggacgttccttactggcgacccattggaaaagccggagctatatcaagcaatgctccttaatccagaggataacaaagccaacctgccggaagactatatatctgacattctcgacacgcttcccgaaaagcaaaaggcaaggtttagggatgggctttgggtaaaggcagagggcgttatctatgacaagtttgacgaatctatgattgtgcgttcatccgacttgcctgaacgctttgaccgatacgccgacgggcaagatttcgggcttaatatcacgtttgttttgattgcctggcttggcgatgtgatatacgtcctgggcgattacggcgcttacaacatgacgacacaaagctttaacgaagaagtaaccgcaaggggcttgatggattgccctgacgggtgctttccaggggaaagcttagggcttcctgtttattgcgaccctgctggcggtgaaagaatacaggaaataaccgggggcgttaaagcaaataacagcgttgacagcggcatagattatataaacgcaaaaatagaacggcatcaatttttcgtttctgaaaagtgtaccggggtgctttcggagatttgggattattgcagggacgaagcggggcagattgtaaaggtcaacgatcattttcttgacgctctgcggtatgcggtgttctcggatgttcagcagggggtaatactctcgtga

SEQ ID NO: 55676 - protein, 416 aa, Unknown
  Obtained from environmental sample
  DOMAIN (29)...(408): Terminase-like family
  misc_feature (1)..(416): Xaa is any amino acid
MMGTSLLFKPTAVQRKALSLLKSGAKHILLFGGSRSGKTTVLVMAIIYRALRFAGSRHLVCRYRAKDARSSVMRETLLPWLDKTVGKITYTYLAHESMITLFNSSEIWIGGLGDREQADKILGHEYNTIYFNEISQLSYAAVTTAYSRLAMRIKDCRNLFYYDCNPGSPLHWAYKIFVLKRTFLTGDPLEKPELYQAMLLNPEDNKANLPEDYISDILDTLPEKQKARFRDGLWVKAEGVIYDKFDESMIVRSSDLPERFDRYADGQDFGLNITFVLIAWLGDVIYVLGDYGAYNMTTQSFNEEVTARGLMDCPDGCFPGESLGLPVYCDPAGGERIQEITGGVKANNSVDSGIDYINAKIERHQFFVSEKCTGVLSEIWDYCRDEAGQIVKVNDHFLDALRYAVFSDVQQGVILS

SEQ ID NO: 55677 - DNA, 867 bp, Unknown
  Obtained from environmental sample
  misc_feature (1)..(867): n is a, c, g, or t
gtgaatatctttagcaggatttcttctgcctttaagcgacaatctgtacgccagcaggtaaacaaggtggcgttaggcgaaactggcggcgggtttcccttgaccgctggcgactggaatgataaattttttgaagagccgcaagccgggaatgcttacctgttcaatgcctgggtaaacattgccgttggcattctgatccgcaatatcgcccgcgccgatttctgcataaagaagggcgggaacgatgttacagacggcgcaatttataatctattccaaaaacctaataattttcaaagccgctttgacctgtggaaagagaccgcagcctggtggcatttggagggggaggcgttttggtggttcgggcctgattattcgggcgggctgccaaaagagatttatgtattagaccctagaaaaatgaggcatgaaggcgagttaaggggaggggttgattttgggttttggaatgcgccgcgccgctggttttatctcaatgactttagtcatactgcgtctgaactaatacctatcttgtcagacgagattattcacttcagggaatggaacccctggaaccctgtccgtggggtaaatcctttagtctctttatcccttgaattggagcaggactattttgcgaataaggcaaattcgcaattactgaaaaacaatgcaataccgcaaggcatactgaaaacagagcaaactctaaggccggaagaagccgaccagttagagaggcggtgggaaagcaagtatggggctgtcagggcggggcgcataattgcggtattgggaaagggaaccagttttgaagcgttaagctttagccctgacgttgttaaatattcgaattaa

SEQ ID NO: 55678 - protein, 288 aa, Unknown
  Obtained from environmental sample
  DOMAIN (45)...(288): Phage portal protein
  misc_feature (1)..(288): Xaa is any amino acid
MNIFSRISSAFKRQSVRQQVNKVALGETGGGFPLTAGDWNDKFFEEPQAGNAYLFNAWVNIAVGILIRNIARADFCIKKGGNDVTDGAIYNLFQKPNNFQSRFDLWKETAAWWHLEGEAFWWFGPDYSGGLPKEIYVLDPRKMRHEGELRGGVDFGFWNAPRRWFYLNDFSHTASELIPILSDEIIHFREWNPWNPVRGVNPLVSLSLELEQDYFANKANSQLLKNNAIPQGILKTEQTLRPEEADQLERRWESKYGAVRAGRIIAVLGKGTSFEALSFSPDVVKYSN

SEQ ID NO: 55679 - DNA, 402 bp, Unknown
  Obtained from environmental sample
  misc_feature (1)..(402): n is a, c, g, or t
atgactaacattgcgttagataccaacattgtgatatacaagcatggttttgacaatgacgctaagatggttattgccgcccggtttctttatgaaaatccggtgatttctgcgcaggttatatcggagtatttgaatgttatgaaaaggatatcccaaaagaataagcgtgaactgatggaaatgtgcgcggaatggttggatgcttgccgtatacagcctattacgcattctaccatatatatggcgcggcatttaataggcaagtatgattttcagatgtttgacgggattattgtagcgtccgcgttagaggcaggttgcgatattttatattctgcggatatgcaggacggtctaattgtagagaaaacgctgacgattgtgaatccgttcaaataa

SEQ ID NO: 55680 - protein, 133 aa, Unknown
  Obtained from environmental sample
  DOMAIN (4)...(122): PIN domain
  misc_feature (1)..(133): Xaa is any amino acid
MTNIALDTNIVIYKHGFDNDAKMVIAARFLYENPVISAQVISEYLNVMKRISQKNKRELMEMCAEWLDACRIQPITHSTIYMARHLIGKYDFQMFDGIIVASALEAGCDILYSADMQDGLIVEKTLTIVNPFK

SEQ ID NO: 55681 - DNA, 1452 bp, Unknown
  Obtained from environmental sample
  misc_feature (1)..(1452): n is a, c, g, or t
ttgtccgtgtactcgcagataatgccgggcaataccccgattgatgaaatccaacggctgaaccccgtcggcattatcctgacgggcgggccgaacagcgtatacctgtgcgactcgccaaagtgcgaccccgaagttttttcattgggtattcctatcctcggtatctgctacggaatgcatttaatgtgttatacgctaggcggcaaggttgagcccggcgatatgggtgaatacgggcgcgtcagggtaacgcccgcgaaaacatcatcaaagttattcggaagtaaaaaagattcctttaccgcgctgatgagccacagggacgccgtaacaagcctgccggaaggttttcgcgtaacggcaaaaagcgccgcctgtacagcggcctgcgagaacaaggctaaaaaactttacgccgtgcagttccacccggagacaaaacacaccaagggtgggcgcgaaattatcaaacggttcttgtatgatatttgcggcgcgtcaggagattataaactcggtaattatataaatacgcagattaagcaaatacgggaaaaggtcggcggtaaaaaagttctgctcgccctgtcgggcggggttgattcgtccgtgtgcgcgggccttttatcacaagcgatacccggacagcttacctgtatctttgtcgatcacggccttatgcgcctgaacgaaggcgatgaaatagaaagcgcgttttcaaaacgaaacctcaacttcatccgcgtgaacgcgcagaaacgcttccttgccaaactggaaggcgtaaccgaccccgaaaaaaagcgcaagataatcggcgaggaatttatccgcgtgtttgaggaggaatccgcaaagttaggcgacattccgtttctggcgcaggggacgatataccccgatgtcgttgaatcgggcggcaagcacggcgctgtaatcaagagccatcacaacgtaggagggcttcccgaaaacctcaagtttacgggaatcgtggaacccttgtcgcggcttttcaaagacgaagtgcgtgagctgggcagaaaactaaaactaccatcctcgcttgtcaaccgccagccctttcccgggccgggacttgccatccgcgtcatgggcgaggtgacggaagaaaaactggatgttttgcgccgcgccgacgcaatcctccgcgaggaactggacgcaatgaaacgcaggcccaatcaatacttctgcgtcatgaccggcactcgttccgtgggcgttaaaggtgacgacagaacctacgactatgtaatcgccgtaagggctgtaacaaccgatgattttatgacctgcgaatacacccctctgccgcacaaattattaagccggatagcctcacggatcacaagcgagataccgcaggcgagccgcgttgtttacgatattacatcaaagcccccggcgacggtggaatgggagtaa

SEQ ID NO: 55682 - protein, 483 aa, Unknown
  Obtained from environmental sample
  DOMAIN (1)...(146): Peptidase C26
  misc_feature (1)..(483): Xaa is any amino acid
MSVYSQIMPGNTPIDEIQRLNPVGIILTGGPNSVYLCDSPKCDPEVFSLGIPILGICYGMHLMCYTLGGKVEPGDMGEYGRVRVTPAKTSSKLFGSKKDSFTALMSHRDAVTSLPEGFRVTAKSAACTAACENKAKKLYAVQFHPETKHTKGGREIIKRFLYDICGASGDYKLGNYINTQIKQIREKVGGKKVLLALSGGVDSSVCAGLLSQAIPGQLTCIFVDHGLMRLNEGDEIESAFSKRNLNFIRVNAQKRFLAKLEGVTDPEKKRKIIGEEFIRVFEEESAKLGDIPFLAQGTIYPDVVESGGKHGAVIKSHHNVGGLPENLKFTGIVEPLSRLFKDEVRELGRKLKLPSSLVNRQPFPGPGLAIRVMGEVTEEKLDVLRRADAILREELDAMKRRPNQYFCVMTGTRSVGVKGDDRTYDYVIAVRAVTTDDFMTCEYTPLPHKLLSRIASRITSEIPQASRVVYDITSKPPATVEWE

SEQ ID NO: 55683 - DNA, 855 bp, Unknown
  Obtained from environmental sample
  misc_feature (1)..(855): n is a, c, g, or t
atggaacgccgcgaggtttaccctgccgatatacctgacggcgtttgcatcctgacttgcgccgtagatacgcaagataaccggctgtgttatgaaatcaaaggctggggagcgggccgcgaatcgtggggcattgagtacggcgaactatggggcgacccgcgcatatcggattcgccggtatggggattgcttgacgaggttattaaaaaagaccgcagctataaaaacggacgaccggtaaaaataagctgcactgttattgatatgggcggccatgcggcaaacgaggtttgtatttacgcaaaattgcgcgagggctggaatgtctgcgctgtccgcggcgttggcggacaaggaaaactcattgtgattaataaatccagacacgagaaaactcggtcgattttctataacttaggcgttgatactattaaagacgatttgcaagcgcgcttgaacgtcaaaaagcccggaccggggtattgtcattttccatatggcaaccagtttgaagaagtcagaggctatgaccatcgttattttgtcggcttaacctcggaaaagaaagttccacgcaaaaatcgcgcaggctttataaaatacgaatgggtaaaagaccctaacagacataacgagccgtgggatgtcagcgtttataaccgcgccgcgctggaaattttaaatatccgttcaaaacatttaagcaagctggcggctgccgagccgtggaatatgcctgcggcgcaacggactgtggcaaaaagtagcgccgcggtaaaaaaccggcctaaggcgccgctgaaccgacagcttaatagatcaaccnacggtaaatcatacgctttagtttga

SEQ ID NO: 55684 - protein, 284 aa, Unknown
  Obtained from environmental sample
  misc_feature (1)..(284): Xaa is any amino acid
MERREVYPADIPDGVCILTCAVDTQDNRLCYEIKGWGAGRESWGIEYGELWGDPRISDSPVWGLLDEVIKKDRSYKNGRPVKISCTVIDMGGHAANEVCIYAKLREGWNVCAVRGVGGQGKLIVINKSRHEKTRSIFYNLGVDTIKDDLQARLNVKKPGPGYCHFPYGNQFEEVRGYDHRYFVGLTSEKKVPRKNRAGFIKYEWVKDPNRHNEPWDVSVYNRAALEILNIRSKHLSKLAAAEPWNMPAAQRTVAKSSAAVKNRPKAPLNRQLNRSTXGKSYALV

SEQ ID NO: 55685 - DNA, 414 bp, Unknown
  Obtained from environmental sample
  misc_feature (1)..(414): n is a, c, g, or t
atggggcacatacttttaagncggatgtttggtgtagaaaaacacacatttatgaaaatgaaagaaattctcaataaagaatacgagaaaatgcacatgaagggcggtagcccaccaaaaatgtctgttgaagataaattgtatgctgcgcttaaatatctgcgtgagtaccggacaatggaaagtattgggggcgattatgaggttagtaaaagtacaatttgcgaatctatccaatgggttgaaaacaccttaacaaaagacggaacattcaaattgccaggcaaaaaagtattgaaagagactgatggcacaattgagtatatagtaattgatgtaactgaaagtccggtaaacaggccaaaaaaaaccaaaagtcctattattccggcaaaaagaagcggcatacagtaa

SEQ ID NO: 55686 - protein, 137 aa, Unknown
  Obtained from environmental sample
  misc_feature (1)..(137): Xaa is any amino acid
MGHILLXRMFGVEKHTFMKMKEILNKEYEKMHMKGGSPPKMSVEDKLYAALKYLREYRTMESIGGDYEVSKSTICESIQWVENTLTKDGTFKLPGKKVLKETDGTIEYIVIDVTESPVNRPKKTKSPIIPAKRSGIQ

SEQ ID NO: 55687 - DNA, 510 bp, Unknown
  Obtained from environmental sample
  misc_feature (1)..(510): n is a, c, g, or t
atgctgaataaaattgtattaatattcagcctctgtttttcgcttgtcttttccggctgtacccgccgtaatgatgttacacataacgaacaatcaaatgtaacgccgttaattgccgtaagcattctgccgcaggagtggtttgtttcctgtatcggcggggatcgggcgcggacgcttgttttggcggggccgggacagaatcctcacaactatgaaccaacgccccaacagatcagcggtcttgcccaggccggcgcgtggatactgtccggcgttgaatttgaaataagcctccgtcccaaaattgaaaaactgttccccgccctgcccattattgacggcacggcgggagtaacattcagaatgctggaggaagacaatcatgatgacgggatagaccgccacacctggctcgggtgtgaatcggcaaagatacttgccacgcatatccgtgacgcgctatccgcccttgatccggcaggcacggctcagtacacggaaaattaa

SEQ ID NO: 55688 - protein, 169 aa, Unknown
  Obtained from environmental sample
  SIGNAL (1)...(23)
  DOMAIN (6)...(169): Periplasmic solute binding protein family
  misc_feature (1)..(169): Xaa is any amino acid
MLNKIVLIFSLCFSLVFSGCTRRNDVTHNEQSNVTPLIAVSILPQEWFVSCIGGDRARTLVLAGPGQNPHNYEPTPQQISGLAQAGAWILSGVEFEISLRPKIEKLFPALPIIDGTAGVTFRMLEEDNHDDGIDRHTWLGCESAKILATHIRDALSALDPAGTAQYTEN

SEQ ID NO: 55689 - DNA, 1014 bp, Unknown
  Obtained from environmental sample
  misc_feature (1)..(1014): n is a, c, g, or t
atggtttttgagaaaaaccatgtaagggaaaaaatatttattgcgaccaagatgcccttggttcttctgaaaaatcccgccgattttgacaaatattttgagcagtcgctcaagcggctcagaaccaattatattgattattacctgatgcacatgatcaccgatatggaccagtggaccaaactcaagagttggggcattgaagcgtggattgccgaaaaaaagaaaacagggcagatacggcagatcgcgttttcctaccacggaagctgcgccgaattcctgaaagtagttgatgattacgactgggagatgtgccagattcagtacaactattccgatgaaaattttcaggcgggagtaacgggactgcgcaaggccgcgcagaggatgccggtagtcatcatggagccgctgttgggaggaaaacttgccacaggcctgcccaaagaggcggtggaagtttttaaaaaggcaaacccaaatctgtcccccgcggcatgggggcttaactggatttggaatcaagaggaagccacgctcctgctttccggcatgagcgctatggcgcagcttgaagaaaatatccgccttgccgatacggcccgcgtgggaatgctgggtgaagcggaacatgatacatactgccgcgcgctggaagcgataaaccggacctgtaaaatccgctgtaccggctgcaattactgtatgccctgcccccttggcgttaacatccccggctgtttttccgcgtataacaccatgtattcgatgggttatatacagggaatgaaacaattcgtcaccagtaccggtctggtttcgcagcgttcaggcagtccccgcctctgtatacaatgcggcatatgcgaaagccactgtccgcagcgtttacccattatgaaaaatctggcgcgggtgcggcggcgcatggaaccgttctgggtcaggtttatcggcgtctgtgtgcgggcgctttttgacaaaaagcggaagaaagtaaatgctgaataa

SEQ ID NO: 55690 - protein, 337 aa, Unknown
  Obtained from environmental sample
  DOMAIN (277)...(300): 4Fe-4S binding domain
  misc_feature (1)..(337): Xaa is any amino acid
MVFEKNHVREKIFIATKMPLVLLKNPADFDKYFEQSLKRLRTNYIDYYLMHMITDMDQWTKLKSWGIEAWIAEKKKTGQIRQIAFSYHGSCAEFLKVVDDYDWEMCQIQYNYSDENFQAGVTGLRKAAQRMPVVIMEPLLGGKLATGLPKEAVEVFKKANPNLSPAAWGLNWIWNQEEATLLLSGMSAMAQLEENIRLADTARVGMLGEAEHDTYCRALEAINRTCKIRCTGCNYCMPCPLGVNIPGCFSAYNTMYSMGYIQGMKQFVTSTGLVSQRSGSPRLCIQCGICESHCPQRLPIMKNLARVRRRMEPFWVRFIGVCVRALFDKKRKKVNAE

SEQ ID NO: 55691 - DNA, 2574 bp, Unknown
  Obtained from environmental sample
  misc_feature (1)..(2574): n is a, c, g, or t
gtgataacttttttgtcatattgcgaaaagcgcctgcaaagactgcgcttcaaaagggggagaaaaatgaaacaaagagtattggaggtattagaaatgaaactatcacaaatgtcaatcaaaagcaaaatgcttgttttttcaggtcttttctttatgactgtagccgttctcggaacagcggcgtttttcttttcaatgagacagatagtccgttcaagcgcggcgcaaaagctgacgcaatttgtcgaaaccaaaatatttcaactggaaaaatcggcaattaaagaaatagccattgccgttaaaatggctgattcacccttgataaaagagcattttctgaatcccgaaaaccaaacgctcaaacaacttgcttttagggaatttgaaggatacagacgggcgtttaccggaaacaatattttctgggtcagtgacattaataaagaattttatttcggcgaggataatcattatacccttgatgctgaaagccccgataattactggtacaaaatgactatgtacgaaaccgaaaaatacaatttcaacatcaactacaaccccgacttgcaaaaaaccctgctctggataaacgccccggtctttcgggaggggcggccaatcggcatagtcggaaccggcattgacctttcaggctttattgactcattgtacgcggactttgacccgtccatgcccttctatctgttcaaccaagcgtcagagataacaggggcgcgggatcatgcgctggtaacaggcaagaaaacaataggagattactttggtacggcagggacttctatcctcaaatcggcagagcaatccggcaaagccccgcaagcctttttccttaacaacagcgaatatgtcataggaagcatagaaagcctggactggaacatcgccgccattcttcccattaccgcctcggacaccctcaacaacagcatgaccgtattcttcatggtaatgctggcggtcatagcggttattctcgtcatcttctatatatttatcagcggccttctcaaacccatgcgctacatggtgcaaacgctggatcaaatagccaccgactgggatcttaccaaaaggcttgaattcaagaaccatgacgaaatcgggacagttggggaattctttaacagtacctttgaaaaattcagggttctgataagcacaataaaatacaaaatcaacgggcttaaccataccagttttgaactatcgctcaacatgggaaagacttctgcagccgtacagcagatttcatctaaccttgataacatggaaaaccttatggtcaaacaggaaaacggagcgttagaagcgggtaaggcggtaggcgttattaaaacgaatatcgacagccttaacaaaatgattgagcaacaagtcgaaagcgtaaatatctcgtcttccgctatcgaggaaatgacggcaaacatacattcggtaaccgggacactgacggaaaacagcaagaacgtcggcgttttgaccgaggcgtctgagaacggcaaaacaggagttcagactgtagcgcaggaaatacaggaaatagcccatgactccgaggggcttttggaaataaactcggttatgaacaatatcgcaagccagactaacttgctctcaatgaatgccgcgattgaagcggcccacgccggagaagccggcaaaggctttgccgttgtcgccgatgagatccgcaaactcgccgagtcgtcaggtcagcagtcaaaaaccaccgcggcgatgcttaaaaagataaaagcgtctatagataacattactaaatcgtccaacgatgtattagagcgttttggggccatagactcaagcgtaaaaacggtttcagagcatgagcaaaacattcggcacgcgatggaagagcaggaaaccggagggaagcaaatactggaatcaataagccgtttaagagacataacttcatcagtcaagaaagggtctgatgacatggcggaatcgggggagactctggtcaaggaaacagacggattcataaaaaccagcaaggaagcggcggaaggcatgaacgagatactgatgggcattaaccagataaaatcttcggtgaaccatgtaaatgaaatgagtcatgaaaacaacagtaactttgaattgttaaaacaggaaacggataaatttaatgatactgtcggtaacgaaaaacaaaaagttcttatagtagatgacgacagtattcatctcgaaatggtggaagcggtattacagagtgcgtatgaaatagctaccgccaaatccggcaaagaagcgttaggtttattctatcaaggacttgttccccaattagtattattggacttaataatgccggatatggacggttggaatatttacaaaagaataaaagcaataagcggcttacacgataccccgatagcgttttttacatcttcaaacgatccaaaagacataaagcacgctcaggaaatgggcgcagttgatttcattaaaaagccatacgataaagacgacctggtacgcagagtgggacatatcttaaaaaatgaaaagtaa

SEQ ID NO: 55692 - protein, 857 aa, Unknown
  Obtained from environmental sample
  DOMAIN (323)...(393): HAMP domain
  misc_feature (1)..(857): Xaa is any amino acid
MITFLSYCEKRLQRLRFKRGRKMKQRVLEVLEMKLSQMSIKSKMLVFSGLFFMTVAVLGTAAFFFSMRQIVRSSAAQKLTQFVETKIFQLEKSAIKEIAIAVKMADSPLIKEHFLNPENQTLKQLAFREFEGYRRAFTGNNIFWVSDINKEFYFGEDNHYTLDAESPDNYWYKMTMYETEKYNFNINYNPDLQKTLLWINAPVFREGRPIGIVGTGIDLSGFIDSLYADFDPSMPFYLFNQASEITGARDHALVTGKKTIGDYFGTAGTSILKSAEQSGKAPQAFFLNNSEYVIGSIESLDWNIAAILPITASDTLNNSMTVFFMVMLAVIAVILVIFYIFISGLLKPMRYMVQTLDQIATDWDLTKRLEFKNHDEIGTVGEFFNSTFEKFRVLISTIKYKINGLNHTSFELSLNMGKTSAAVQQISSNLDNMENLMVKQENGALEAGKAVGVIKTNIDSLNKMIEQQVESVNISSSAIEEMTANIHSVTGTLTENSKNVGVLTEASENGKTGVQTVAQEIQEIAHDSEGLLEINSVMNNIASQTNLLSMNAAIEAAHAGEAGKGFAVVADEIRKLAESSGQQSKTTAAMLKKIKASIDNITKSSNDVLERFGAIDSSVKTVSEHEQNIRHAMEEQETGGKQILESISRLRDITSSVKKGSDDMAESGETLVKETDGFIKTSKEAAEGMNEILMGINQIKSSVNHVNEMSHENNSNFELLKQETDKFNDTVGNEKQKVLIVDDDSIHLEMVEAVLQSAYEIATAKSGKEALGLFYQGLVPQLVLLDLIMPDMDGWNIYKRIKAISGLHDTPIAFFTSSNDPKDIKHAQEMGAVDFIKKPYDKDDLVRRVGHILKNEK
